(19) United States
(12) Patent Application Publication
(10) Pub. No.: US 2024/0167057 A1
(43) Pub. Date: May 23, 2024

(54) MODIFIED ALPHAVIRUS VECTORS

(71) Applicant: Gritstone bio, Inc., Emeryville, CA (US)

(72) Inventor: Sue-Jean Hong, Emeryville, CA (US)

(21) Appl. No.: 18/354,193

(22) Filed: Jul. 18, 2023

Related U.S. Application Data
(63) Continuation of application No. PCT/US2022/013004, filed on Jan. 19, 2022.
(60) Provisional application No. 63/139,297, filed on Jan. 19, 2021.

(51) Int. Cl. C12N 15/86; A61P 37/04

(52) U.S. Cl. CPC C12N 15/86; A61P 37/04; C12N 2770/36134; C12N 2770/36145

(57) ABSTRACT

Disclosed herein are vaccine compositions that include alphavirus derived vectors having multiple expression cassettes driven by multiple subgenomic promoters.

### CROSS REFERENCE TO RELATED APPLICATIONS

[0001] This application is a continuation of International Application No. PCT/US2022/013004, filed Jan. 19, 2022, which claims the benefit of U.S. Provisional Application No. 63/139,297, filed Jan. 19, 2021, which is hereby incorporated in its entirety by reference for all purposes.

### SEQUENCE LISTING

[0002] The instant application contains a Sequence Listing which has been submitted electronically in .xml format and is hereby incorporated by reference in its entirety. Said .xml copy, created on Oct. 18, 2023, is named GSO-101WOC1 and is 46,329,744 bytes in size.

### BACKGROUND

[0003] Alphaviruses are a group of small positive-sense single-stranded RNA viruses that are responsible for many diseases in humans and other animals. See, e.g., “The Alphaviruses: Gene Expression, Replication and Evolution,” Microbiological Reviews, September 1994, p. 491-562; Jose et al., “A structural and functional perspective of alphavirus replication and assembly,” Future Micriobol., 2009, v.4:837-856. Because of their high replication efficiency and specificity, alphaviruses have proven to be useful in the engineering of self-replicating RNA vectors for the expression of heterologous proteins in mammalian cells. See, e.g., Frolov et al., “Alphavirus-based expression vectors: strategies and applications”, PNAS, 1996, v. 93, pp. 11371-11377; Young Kim, et al., “Enhancement of protein expression by alphavirus replicons by designing self-replicating subgenomic RNAs”, PNAS, 2014, v.11:29, pp. 10708-10713. While some progress has been made in this field, improvements are needed in areas including: the efficiency of delivery of RNA vectors to targeted cells, the efficiency of expression of heterologous proteins from RNA vectors, the ease of “personalization” of the proteins to be expressed from RNA vectors, improvements in the immune response when certain heterologous proteins (e.g., neoantigens) are expressed from RNA vectors, and/or improvements in the efficiency of manufacture of such RNA vectors.

### SUMMARY

[0004] Provided for herein is a composition for delivery of an antigen expression system comprising a self-replicating alphavirus-based expression system, wherein the composition for delivery of the self-replicating alphavirus-based expression system comprises: the self-replicating alphavirus-based expression system, wherein the self-replicating alphavirus-based expression system comprises one or more vectors, wherein the one or more vectors comprise: (a) an RNA alphavirus backbone, wherein the RNA alphavirus backbone comprises: (i) at least one promoter nucleotide sequence, and (ii) at least one polyadenylation (poly(A)) sequence; and (b) at least two cassettes, wherein each of the cassettes independently comprise: (i) at least one antigen-encoding nucleic acid sequence comprising: a. an epitope-encoding nucleic acid sequence, b. optionally a 5′ linker sequence, and c. optionally a 3′ linker sequence; and (ii) optionally, at least one second poly(A) sequence, wherein the second poly(A) sequence is a native poly(A) sequence or an exogenous poly(A) sequence to the alphavirus, wherein a first of the at least two cassettes, oriented from 5′ to 3′, is operably linked to a promoter nucleotide sequence comprising a first subgenomic alphavirus-derived promoter (SGP1) comprising a core conserved promoter sequence comprising the polynucleotide sequence ctacggcTAAcctgaa(+1)tgga (SEQ ID NO: 27974), and wherein at least a second of the at least two cassettes is operably linked to a promoter nucleotide sequence comprising a second subgenomic alphavirus-derived promoter (SGP2) comprising the core conserved promoter sequence, and wherein the SGP1 and/or the SGP2 subgenomic promoter comprises an extended 3′ promoter region derived from an alphavirus encoded 3′ of the core conserved promoter sequence.

[0005] Also provided for herein is a composition for delivery of a payload comprising a self-replicating alphavirus-based expression system, wherein the composition for delivery of the self-replicating alphavirus-based expression system comprises: (A) the self-replicating alphavirus-based expression system, wherein the self-replicating alphavirus-based expression system comprises one or more vectors, wherein the one or more vectors comprise: (a) an RNA alphavirus backbone, wherein the RNA alphavirus backbone comprises: (i) at least one promoter nucleotide sequence, and (ii) at least one polyadenylation (poly(A)) sequence; and (b) at least two cassettes, wherein each of the cassettes independently comprise: (i) at least one payload-encoding nucleic acid sequence; and (ii) optionally, at least one second poly(A) sequence, wherein the second poly(A) sequence is a native poly(A) sequence or an exogenous poly(A) sequence to the alphavirus, wherein a first of the at least two cassettes, oriented from 5′ to 3′, is operably linked to a promoter nucleotide sequence comprising a first subgenomic alphavirus-derived promoter (SGP1) comprising a core conserved promoter sequence comprising the polynucleotide sequence ctacggcTAAcctgaa(+1)tgga (SEQ ID NO: 27974), and wherein at least a second of the at least two cassettes is operably linked to a promoter nucleotide sequence comprising a second subgenomic alphavirus-derived promoter (SGP2) comprising the core conserved promoter sequence, and wherein the SGP1 and/or the SGP2 subgenomic promoter comprises an extended 3′ promoter region derived from an alphavirus encoded 3′ of the core conserved promoter sequence.

[0006] In some aspects, the extended 3′ promoter region of SGP1 is different than the extended 3′ promoter region of SGP2.

[0007] In some aspects, either the SGP1 or the SGP2 subgenomic promoter, but not both, comprises an extended 3′ promoter region derived from an alphavirus encoded 3′ of the core conserved promoter sequence.

[0008] In some aspects, the extended 3′ promoter region comprises the polynucleotide sequence CTACGACAT (SEQ ID NO: 27997). In some aspects, the extended 3′ promoter region comprises the polynucleotide sequence CTACGACATAGTCTAGTCCGCCAAG (SEQ ID NO: 27975). In some aspects, the extended 3′ promoter region consists of the polynucleotide sequence CTACGACAT (SEQ ID NO: 27997). In some aspects, the extended 3′ promoter region consists of the polynucleotide sequence CTACGACATAGTCTAGTCCGCCAAG (SEQ ID NO: 27975). In some aspects, the extended 3′ promoter region comprises the polynucleotide sequence ATAGTCTAGTCCGCCAAG (SEQ ID NO: 27976).

[0009] In some aspects, (a) each of the subgenomic promoters comprise an extended 3′ promoter region comprising the polynucleotide sequence CTACGACAT (SEQ ID NO: 27997); and (b) only one of the SGP1 or the SGP2 subgenomic promoters, but not both, comprise an extended 3′ promoter region further comprising the polynucleotide sequence ATAGTCTAGTCCGCCAAG (SEQ ID NO: 27976), wherein the polynucleotide sequence ATAGTCTAGTCCGCCAAG (SEQ ID NO: 27976) is encoded 3′ of the polynucleotide sequence CTACGACAT (SEQ ID NO: 27997).

[0010] In some aspects, the SGP1 subgenomic promoter, the SGP2 subgenomic promoter, or both comprise an extended 5′ promoter region derived from an alphavirus encoded 5′ of the core conserved promoter sequence. In some aspects, the extended 5′ promoter region comprises a polynucleotide sequence derived from an alphavirus nonstructural protein 4 (nsp4) and is encoded 5′ of the core conserved promoter sequence. In some aspects, the extended 5′ promoter region is encoded immediately 5′ of the core conserved promoter sequence. In some aspects, the extended 5′ promoter region comprises the polynucleotide sequence ctct encoded immediately 5′ of the core conserved promoter sequence.

[0011] In some aspects, the extended 5′ promoter region comprises the polynucleotide sequence acttccatcatagttatggccatgactactctagctagcagtgttaaatcattcagctacctgagaggggcccctataactct (SEQ ID NO: 27977) encoded immediately 5′ of the core conserved promoter sequence. In some aspects, the extended 5′ promoter region comprises the polynucleotide sequence acctgagaggggcccctataactct (SEQ ID NO: 27978) encoded immediately 5′ of the core conserved promoter sequence. In some aspects, the extended 5′ promoter region comprises the polynucleotide sequence gggcccctataactct (SEQ ID NO: 27979) encoded immediately 5′ of the core conserved promoter sequence. In some aspects, the extended 5′ promoter region consists of the polynucleotide sequence gggcccctataactct (SEQ ID NO: 27979) encoded immediately 5′ of the core conserved promoter sequence.

[0012] In some aspects, the extended 5′ promoter region of the SGP2 subgenomic promoter comprises the polynucleotide sequence acttccatcatagttatggccatgactactctagctagcagtgttaaatcattcagctacctgagaggggcccctataactct (SEQ ID NO: 27977) encoded immediately 5′ of the core conserved promoter sequence. In some aspects, the extended 5′ promoter region of the SGP2 subgenomic promoter comprises the polynucleotide sequence acctgagaggggcccctataactct (SEQ ID NO: 27978) encoded immediately 5′ of the core conserved promoter sequence. In some aspects, the extended 5′ promoter region of the SGP2 subgenomic promoter comprises the polynucleotide sequence gggcccctataactct (SEQ ID NO: 27979) encoded immediately 5′ of the core conserved promoter sequence. In some aspects, the extended 5′ promoter region of the SGP2 subgenomic promoter consists of the polynucleotide sequence gggcccctataactct (SEQ ID NO: 27979) encoded immediately 5′ of the core conserved promoter sequence.

[0013] In some aspects, the at least one promoter nucleotide sequence of the RNA alphavirus backbone comprises the SGP1 subgenomic promoter.

[0014] In some aspects, the extended 3′ promoter region and/or the extended 5′ promoter region is derived from the same alphavirus as the alphavirus used to derive the core conserved promoter sequence.

[0015] In some aspects, the extended 3′ promoter region and/or the extended 5′ promoter region is capable of reducing or eliminating recombination between the SGP1 and the SGP2 subgenomic promoter. In some aspects, the extended 3′ promoter region and/or the extended 5′ promoter region comprises one or more transcriptional enhancer elements. In some aspects, the SGP2 subgenomic promoter is capable of promoting expression of a cassette at least 2-fold greater relative to the same cassette operably linked to the SGP1 subgenomic promoter. In some aspects, the extended 3′ promoter region and/or the extended 5′ promoter region of SGP2 is capable of promoting expression of a cassette at least 2-fold greater relative to the same cassette operably linked to the SGP1 subgenomic promoter. In some aspects, the SGP2 subgenomic promoter is capable of stimulating a stronger immune response to epitopes encoded by the cassette operably linked to the SGP2 subgenomic promoter following administration to a subject relative to the same cassette operably linked to the SGP1 subgenomic promoter. In some aspects, the extended 3′ promoter region and/or the extended 5′ promoter region of SGP2 is capable of stimulating a stronger immune response to epitopes encoded by the cassette operably linked to the SGP2 subgenomic promoter following administration to a subject relative to the same cassette operably linked to the SGP1 subgenomic promoter.

[0016] In some aspects, the SGP2 subgenomic promoter is encoded immediately 5′ of the second cassette, optionally immediately 5′ of a Kozak sequence of the second cassette.

[0017] In some aspects, either the SGP1 or the SGP2 subgenomic promoter comprises the polynucleotide sequence GGGCCCCTATAACTCTCTACGGCTAACCTGAATGGACTACGACATAGTCTAGTCCGC CAAG (SEQ ID NO: 27980). In some aspects, the SGP2 subgenomic promoter comprises the polynucleotide sequence GGGCCCCTATAACTCTCTACGGCTAACCTGAATGGACTACGACATAGTCTAGTCCGC CAAG (SEQ ID NO: 27980). In some aspects, the SGP1 subgenomic promoter comprises the polynucleotide sequence GGGCCCCTATAACTCTCTACGGCTAACCTGAATGGACTACGAC (SEQ ID NO: 27981).

[0018] In some aspects, (a) either the SGP1 or the SGP2 subgenomic promoter comprises the polynucleotide sequence GGGCCCCTATAACTCTCTACGGCTAACCTGAATGGACTACGACATAGTCTAGTCCGC CAAG (SEQ ID NO: 27980); and (b) the other subgenomic promoter comprises the polynucleotide sequence GGGCCCCTATAACTCTCTACGGCTAACCTGAATGGACTACGAC (SEQ ID NO: 27981) but does not comprise the polynucleotide sequence ATAGTCTAGTCCGCCAAG (SEQ ID NO: 27976). In some aspects, the SGP2 subgenomic promoter comprises the polynucleotide sequence GGGCCCCTATAACTCTCTACGGCTAACCTGAATGGACTACGAC (SEQ ID NO: 27981) and the SGP1 subgenomic promoter comprises the polynucleotide sequence GGGCCCCTATAACTCTCTACGGCTAACCTGAATGGACTACGAC (SEQ ID NO: 27981), wherein the SGP1 subgenomic promoter does not comprise the polynucleotide sequence ATAGTCTAGTCCGCCAAG (SEQ ID NO: 27976).

[0019] In some aspects, an ordered sequence of one or more of the nucleic acid sequences encoding the immunogenic polypeptide is described in the formula, from 5′ to 3′, comprising: P1-(L5b-Nc-L3d)X-P2-(L5b-Nc-L3d)X-Pa-(L5b-Nc-L3d)X-(G5e-Uf)Y-G3g wherein P1 comprises the SGP1 subgenomic promoter, P2 comprises the SGP2 subgenomic promoter where for Pa a=0 or 1 for additional cassettes, N comprises the epitope-encoding nucleic acid sequence, where c=1, L5 comprises the 5′ linker sequence, where b=0 or 1, L3 comprises the 3′ linker sequence, where d=0 or 1, G5 comprises one of the at least one nucleic acid sequences encoding a GPGPG amino acid linker (SEQ ID NO: 56), where e=0 or 1, G3 comprises one of the at least one nucleic acid sequences encoding a GPGPG amino acid linker (SEQ ID NO: 56), where g=0 or 1, U comprises one of the at least one MHC class II epitope-encoding nucleic acid sequence, where f=1, X=1 to 400, where for each X the corresponding Nc is a corresponding epitope-encoding nucleic acid sequence, and Y=0, 1, or 2, where for each Y the corresponding Uf is a universal MHC class II epitope-encoding nucleic acid sequence, optionally wherein the at least one universal sequence comprises at least one of Tetanus toxoid and PADRE.

[0020] In some aspects, for each X the corresponding Nc is a distinct epitope-encoding nucleic acid sequence. In some aspects, for each Y the corresponding Uf is a distinct MHC class II epitope-encoding nucleic acid sequence. In some aspects, each N encodes a MHC class I epitope 7-15 amino acids in length, a MHC class II epitope, an epitope capable of stimulating a B cell response, or combinations thereof, L5 is a native 5′ linker sequence that encodes a native N-terminal amino acid sequence of the epitope, and wherein the 5′ linker sequence encodes a peptide that is at least 2 amino acids in length, L3 is a native 3′ linker sequence that encodes a native C-terminal amino acid sequence of the epitope, and wherein the 3′ linker sequence encodes a peptide that is at least 2 amino acids in length.

[0021] In some aspects, the epitope-encoding nucleic acid sequence comprises: at least one alteration that makes the encoded epitope sequence distinct from the corresponding peptide sequence encoded by a wild-type nucleic acid sequence; a nucleic acid sequence encoding an infectious disease organism peptide selected from the group consisting of: a pathogen-derived peptide, a virus-derived peptide, a bacteria-derived peptide, a fungus-derived peptide, and a parasite-derived peptide, and optionally wherein the epitope-encoding nucleic acid sequence encodes a MHC class I or MHC class II epitope; or combinations thereof.

[0022] In some aspects, the composition further comprises a nanoparticulate delivery vehicle In some aspects, the nanoparticulate delivery vehicle is a lipid nanoparticle (LNP). In some aspects, the LNP comprises ionizable amino lipids. In some aspects, the ionizable amino lipids comprise MC3-like (dilinoleylmethyl-4-dimethylaminobutyrate) molecules. In some aspects, the nanoparticulate delivery vehicle encapsulates the antigen expression system.

[0023] In some aspects, the backbone comprises at least one nucleotide sequence of an Aura virus, a Fort Morgan virus, a Venezuelan equine encephalitis virus, a Ross River virus, a Semliki Forest virus, a Sindbis virus, or a Mayaro virus. In some aspects, the backbone comprises at least one nucleotide sequence of a Venezuelan equine encephalitis virus. In some aspects, the backbone comprises at least sequences for nonstructural protein-mediated amplification, a 26S promoter sequence, a poly(A) sequence, a nonstructural protein 1 (nsP1) gene, a nsP2 gene, a nsP3 gene, and a nsP4 gene encoded by the nucleotide sequence of the Aura virus, the Fort Morgan virus, the Venezuelan equine encephalitis virus, the Ross River virus, the Semliki Forest virus, the Sindbis virus, or the Mayaro virus. In some aspects, the backbone comprises at least sequences for nonstructural protein-mediated amplification, a 26S promoter sequence, and a poly(A) sequence encoded by the nucleotide sequence of the Aura virus, the Fort Morgan virus, the Venezuelan equine encephalitis virus, the Ross River virus, the Semliki Forest virus, the Sindbis virus, or the Mayaro virus. In some aspects, sequences for nonstructural protein-mediated amplification are selected from the group consisting of: an alphavirus 5′ UTR, a 51-nt CSE, a 24-nt CSE, a 26S subgenomic promoter sequence, a 19-nt CSE, an alphavirus 3′ UTR, or combinations thereof. In some aspects, the backbone does not encode structural virion proteins capsid, E2 and E1. In some aspects, the cassettes are inserted in place of structural virion proteins within the nucleotide sequence of the Aura virus, the Fort Morgan virus, the Venezuelan equine encephalitis virus, the Ross River virus, the Semliki Forest virus, the Sindbis virus, or the Mayaro virus. In some aspects, the Venezuelan equine encephalitis virus comprises the sequence of SEQ ID NO:3 or SEQ ID NO:5. In some aspects, the Venezuelan equine encephalitis virus comprises the sequence of SEQ ID NO:3 or SEQ ID NO:5 further comprising a deletion between base pair 7544 and 11176. In some aspects, the backbone comprises the sequence set forth in SEQ ID NO:6 or SEQ ID NO:7. In some aspects, the cassettes are inserted at position 7544 to replace the deletion between base pairs 7544 and 11176 as set forth in the sequence of SEQ ID NO:3 or SEQ ID NO:5.

[0024] In some aspects, one or more of the cassettes are at least 100, 200, 300, 400, 500, 600, 700, 800, or 900 nucleotides in length. In some aspects, one or more of the cassettes are at least 1000, 2000, 3000, 4000, 5000, 6000, 7000, 8000, 9000, or 10000 nucleotides in length. In some aspects, the one or more vectors are capable of driving expression of a cassette that is at least 3500 nucleotides in length. In some aspects, the one or more vectors are capable of driving expression of a cassette that is at least 6000 nucleotides in length.

[0025] In some aspects, at least one of the at least one antigen-encoding nucleic acid sequences comprises an epitope-encoding nucleic acid sequence that encodes an epitope that is presented by MHC class I. In some aspects, at least one of the at least one antigen-encoding nucleic acid sequences comprises an epitope-encoding nucleic acid sequence that encodes an epitope that is presented by MHC class II. In some aspects, at least one of the at least one antigen-encoding nucleic acid sequences comprises an epitope-encoding nucleic acid sequence that encodes a polypeptide sequence or portion thereof capable of stimulating a B cell response, optionally wherein the polypeptide sequence or portion thereof capable of stimulating a B cell response comprises a full-length protein, a protein domain, a protein subunit, or an antigenic fragment predicted or known to be capable of being bound by an antibody.

[0026] In some aspects, the at least one antigen-encoding nucleic acid sequence comprises two or more antigen-encoding nucleic acid sequences. In some aspects, each antigen-encoding nucleic acid sequence is linked directly to one another. In some aspects, each antigen-encoding nucleic acid sequence is linked to a distinct antigen-encoding nucleic acid sequence with a nucleic acid sequence encoding a linker.

[0027] In some aspects, at least one of the at least one antigen-encoding nucleic acid sequences comprises an epitope-encoding nucleic acid sequence that encodes two or more distinct epitopes predicted or validated to be capable of presentation by at least one HLA allele. In some aspects, the at least one antigen-encoding nucleic acid sequence comprises at least 2-10, 2, 3, 4, 5, 6, 7, 8, 9, or 10 nucleic acid sequences. In some aspects, the at least one antigen-encoding nucleic acid sequence comprises at least 11-20, 15-20, 11-100, 11-200, 11-300, 11-400, 11, 12, 13, 14, 15, 16, 17, 18, 19, 20 or up to 400 nucleic acid sequences. In some aspects, the at least one antigen-encoding nucleic acid sequence comprises at least 2-400 nucleic acid sequences and wherein at least two of the antigen-encoding nucleic acid sequences comprises an epitope-encoding nucleic acid sequence that encodes polypeptide sequences or portions thereof that are (1) presented by MHC class I, (2) presented by MHC class II, and/or (3) capable of stimulating a B cell response. In some aspects, at least two of the antigen-encoding nucleic acid sequences comprises an epitope-encoding nucleic acid sequence that encodes polypeptide sequences or portions thereof that are (1) presented by MHC class I, (2) presented by MHC class II, and/or (3) capable of stimulating a B cell response class.

[0028] In some aspects, when administered to the subject and translated, at least one of the epitopes encoded by the at least one epitopes-encoding nucleic acid sequence are presented on antigen presenting cells resulting in an immune response targeting at least one of the antigens on a cell surface. In some aspects, when administered to the subject and translated, at least one of the antigens encoded by the at least one antigen-encoding nucleic acid sequence results in an antibody response targeting at least one of the antigens. In some aspects, the at least one antigen-encoding nucleic acid sequences when administered to the subject and translated, at least one of the MHC class I or class II antigens are presented on antigen presenting cells resulting in an immune response targeting at least one of the antigens on a cell surface, and optionally wherein the expression of each of the at least one antigen-encoding nucleic acid sequences is driven by the at least one promoter nucleotide sequence.

[0029] In some aspects, each MHC class I epitope-encoding nucleic acid sequence encodes a polypeptide sequence between 8 and 35 amino acids in length, optionally 9-17, 9-25, 8, 9, 10, 11, 12, 13, 14, 15, 16, 17, 18, 19, 20, 21, 22, 23, 24, 25, 26, 27, 28, 29, 30, 31, 32, 33, 34 or 35 amino acids in length. In some aspects, the at least one MHC class II epitope-encoding nucleic acid sequence is present. In some aspects, the at least one MHC class II epitope-encoding nucleic acid sequence is present and comprises at least one MHC class II nucleic acid sequence. In some aspects, the at least one MHC class II epitope-encoding nucleic acid sequence is 12-20, 12, 13, 14, 15, 16, 17, 18, 19, 20, or 20-40 amino acids in length. In some aspects, the at least one MHC class II epitope-encoding nucleic acid sequence is present and comprises at least one universal MHC class II epitope-encoding nucleic acid sequence, optionally wherein the at least one universal sequence comprises at least one of Tetanus toxoid and PADRE, and/or at least one MHC class II epitope-encoding nucleic acid sequence.

[0030] In some aspects, the at least one promoter nucleotide sequence or the second promoter nucleotide sequence is inducible. In some aspects, the at least one promoter nucleotide sequence or the second promoter nucleotide sequence is non-inducible. In some aspects, the at least one poly(A) sequence comprises a poly(A) sequence native to the backbone. In some aspects, the at least one poly(A) sequence comprises a poly(A) sequence exogenous to the backbone. In some aspects, the at least one poly(A) sequence is operably linked to at least one of the at least one antigen-encoding nucleic acid sequences. In some aspects, the at least one poly(A) sequence is at least 20, at least 30, at least 40, at least 50, at least 60, at least 70, at least 80, or at least 90 consecutive A nucleotides (SEQ ID NO: 27943). In some aspects, the at least one poly(A) sequence is at least 80 consecutive A nucleotides (SEQ ID NO: 27940). In some aspects, the at least one second poly(A) sequence is present. In some aspects, the at least one second poly(A) sequence comprises an SV40 poly(A) signal sequence or a Bovine Growth Hormone (BGH) poly(A) signal sequence, or a combination of two more SV40 poly(A) signal sequences or BGH poly(A) signal sequence. In some aspects, the at least one second poly(A) sequence comprises two or more second poly(A) sequences, optionally wherein the two or more second poly(A) sequences comprises two or more SV40 poly(A) signal sequences two or more BGH poly(A) signal sequences, or a combination of SV40 poly(A) signal sequences and BGH poly(A) signal sequences.

[0031] In some aspects, the antigen cassette further comprises at least one of: an intron sequence, an exogenous intron sequence, a Constitutive Transport Element (CTE), a RNA Transport Element (RTE), a woodchuck hepatitis virus posttranscriptional regulatory element (WPRE) sequence, an internal ribosome entry sequence (IRES) sequence, a nucleotide sequence encoding a 2A self cleaving peptide sequence, a nucleotide sequence encoding a Furin cleavage site, or a sequence in the 5′ or 3′ non-coding region known to enhance the nuclear export, stability, or translation efficiency of mRNA that is operably linked to at least one of the at least one antigen-encoding nucleic acid sequences. In some aspects, the antigen cassette further comprises a reporter gene, including but not limited to, green fluorescent protein (GFP), a GFP variant, secreted alkaline phosphatase, luciferase, a luciferase variant, or a detectable peptide or epitope. In some aspects, the detectable peptide or epitope is selected from the group consisting of an HA tag, a Flag tag, a His-tag, or a V5 tag.

[0032] In some aspects, the one or more vectors further comprises one or more nucleic acid sequences encoding at least one immune modulator. In some aspects, the immune modulator is an anti-CTLA4 antibody or an antigen-binding fragment thereof, an anti-PD-1 antibody or an antigen-binding fragment thereof, an anti-PD-L1 antibody or an antigen-binding fragment thereof, an anti-4-1BB antibody or an antigen-binding fragment thereof, or an anti-OX-40 antibody or an antigen-binding fragment thereof. In some aspects, the antibody or antigen-binding fragment thereof is a Fab fragment, a Fab′ fragment, a single chain Fv (scFv), a single domain antibody (sdAb) either as single specific or multiple specificities linked together (e.g., camelid antibody domains), or full-length single-chain antibody (e.g., full-length IgG with heavy and light chains linked by a flexible linker). In some aspects, the heavy and light chain sequences of the antibody are a contiguous sequence separated by either a self-cleaving sequence such as 2A or IRES; or the heavy and light chain sequences of the antibody are linked by a flexible linker such as consecutive glycine residues. In some aspects, the immune modulator is a cytokine. In some aspects, the cytokine is at least one of IL-2, IL-7, IL-12, IL-15, or IL-21 or variants thereof of each.

[0033] Also provided herein is a vector or set of vectors comprising the nucleotide sequence of any of the compositions described herein.

[0034] Also provided herein is an isolated cell comprising the nucleotide sequence or set of isolated nucleotide sequences of any of the compositions described herein, optionally wherein the cell is a BHK-21, CHO, HEK293 or variants thereof, 911, HeLa, A549, LP-293, PER.C6, or AE1-2a cell.

[0035] Also provided herein is a kit comprising the composition of any of the compositions described herein and instructions for use.

[0036] Also provided herein is a method for treating a subject, the method comprising administering to the subject any of the compositions described herein or any of the pharmaceutical compositions described herein.

[0037] Also provided herein is a method for inducing an immune response in a subject, the method comprising administering to the subject any of the compositions described herein or any of the pharmaceutical compositions described herein.

[0038] In some aspects, the subject expresses at least one HLA allele predicted or known to present a MHC class I or MHC class II epitope encoded by the epitope-encoding nucleic acid sequence of the at least one antigen-encoding nucleic acid sequence.

[0039] In some aspects, any of the above compositions further comprise a nanoparticulate delivery vehicle. The nanoparticulate delivery vehicle, in some aspects, may be a lipid nanoparticle (LNP). In some aspects, the LNP comprises ionizable amino lipids. In some aspects, the ionizable amino lipids comprise MC3-like (dilinoleylmethyl-4-dimethylaminobutyrate) molecules. In some aspects, the nanoparticulate delivery vehicle encapsulates the antigen expression system.

[0040] In some aspects, any of the above compositions further comprise a plurality of LNPs, wherein the LNPs comprise: the antigen expression system; a cationic lipid; a non-cationic lipid; and a conjugated lipid that inhibits aggregation of the LNPs, wherein at least about 95% of the LNPs in the plurality of LNPs either: have a non-lamellar morphology; or are electron-dense.

[0041] In some aspects, the non-cationic lipid is a mixture of (1) a phospholipid and (2) cholesterol or a cholesterol derivative.

[0042] In some aspects, the conjugated lipid that inhibits aggregation of the LNPs is a polyethyleneglycol (PEG)-lipid conjugate. In some aspects, the PEG-lipid conjugate is selected from the group consisting of: a PEG-diacylglycerol (PEG-DAG) conjugate, a PEG dialkyloxypropyl (PEG-DAA) conjugate, a PEG-phospholipid conjugate, a PEG-ceramide (PEG-Cer) conjugate, and a mixture thereof. In some aspects the PEG-DAA conjugate is a member selected from the group consisting of: a PEG-didecyloxypropyl (C₁₀) conjugate, a PEG-dilauryloxypropyl (C₁₂) conjugate, a PEG-dimyristyloxypropyl (C₁₄) conjugate, a PEG-dipalmityloxypropyl (C₁₆) conjugate, a PEG-distearyloxypropyl (C₁₈) conjugate, and a mixture thereof.

[0043] In some aspects, the antigen expression system is fully encapsulated in the LNPs.

[0044] In some aspects, the non-lamellar morphology of the LNPs comprises an inverse hexagonal (H_{II}) or cubic phase structure.

[0045] In some aspects, the cationic lipid comprises from about 10 mol % to about 50 mol % of the total lipid present in the LNPs. In some aspects, the cationic lipid comprises from about 20 mol % to about 50 mol % of the total lipid present in the LNPs. In some aspects, the cationic lipid comprises from about 20 mol % to about 40 mol % of the total lipid present in the LNPs.

[0046] In some aspects, the non-cationic lipid comprises from about 10 mol % to about 60 mol % of the total lipid present in the LNPs. In some aspects, the non-cationic lipid comprises from about 20 mol % to about 55 mol % of the total lipid present in the LNPs. In some aspects, the non-cationic lipid comprises from about 25 mol % to about 50 mol % of the total lipid present in the LNPs.

[0047] In some aspects, the conjugated lipid comprises from about 0.5 mol % to about 20 mol % of the total lipid present in the LNPs. In some aspects, the conjugated lipid comprises from about 2 mol % to about 20 mol % of the total lipid present in the LNPs. In some aspects, the conjugated lipid comprises from about 1.5 mol % to about 18 mol % of the total lipid present in the LNPs.

[0048] In some aspects, greater than 95% of the LNPs have a non-lamellar morphology. In some aspects, greater than 95% of the LNPs are electron dense.

[0049] In some aspects, any of the above compositions further comprise a plurality of LNPs, wherein the LNPs comprise: a cationic lipid comprising from 50 mol % to 65 mol % of the total lipid present in the LNPs; a conjugated lipid that inhibits aggregation of LNPs comprising from 0.5 mol % to 2 mol % of the total lipid present in the LNPs; and a non-cationic lipid comprising either: a mixture of a phospholipid and cholesterol or a derivative thereof, wherein the phospholipid comprises from 4 mol % to 10 mol % of the total lipid present in the LNPs and the cholesterol or derivative thereof comprises from 30 mol % to 40 mol % of the total lipid present in the LNPs; a mixture of a phospholipid and cholesterol or a derivative thereof, wherein the phospholipid comprises from 3 mol % to 15 mol % of the total lipid present in the LNPs and the cholesterol or derivative thereof comprises from 30 mol % to 40 mol % of the total lipid present in the LNPs; or up to 49.5 mol % of the total lipid present in the LNPs and comprising a mixture of a phospholipid and cholesterol or a derivative thereof, wherein the cholesterol or derivative thereof comprises from 30 mol % to 40 mol % of the total lipid present in the LNPs.

[0050] In some aspects, any of the above compositions further comprise a plurality of LNPs, wherein the LNPs comprise: a cationic lipid comprising from 50 mol % to 85 mol % of the total lipid present in the LNPs; a conjugated lipid that inhibits aggregation of LNPs comprising from 0.5 mol % to 2 mol % of the total lipid present in the LNPs; and a non-cationic lipid comprising from 13 mol % to 49.5 mol % of the total lipid present in the LNPs.

[0051] In some aspects, the phospholipid comprises dipalmitoylphosphatidylcholine (DPPC), distearoylphosphatidylcholine (DSPC), or a mixture thereof.

[0052] In some aspects, the conjugated lipid comprises a polyethyleneglycol (PEG)-lipid conjugate. In some aspects, the PEG-lipid conjugate comprises a PEG-diacylglycerol (PEG-DAG) conjugate, a PEG-dialkyloxypropyl (PEG-DAA) conjugate, or a mixture thereof. In some aspects, the PEG-DAA conjugate comprises a PEG-dimyristyloxypropyl (PEG-DMA) conjugate, a PEG-distearyloxypropyl (PEG-DSA) conjugate, or a mixture thereof. In some aspects, the PEG portion of the conjugate has an average molecular weight of about 2,000 daltons.

[0053] In some aspects, the conjugated lipid comprises from 1 mol % to 2 mol % of the total lipid present in the LNPs.

[0054] In some aspects, the LNP comprises a compound having a structure of Formula I:

[chemical structure]

or a pharmaceutically acceptable salt, tautomer, prodrug or stereoisomer thereof, wherein: L¹ and L² are each independently -0(C=0)-, —(C=0)0-, —C(=0)-, -0-, —S(0)ₓ-, —S—S—, —C(=0)S—, —SC(=0)-, —R^{a}C(=0)-, —C(=0) R^{a}—, —R^{a}C(=0) R^{a}—, —OC(=0) R^{a}—, —R^{a}C(=0)0- or a direct bond; G¹ is Ci-C₂ alkylene, —(C=0)-, -0(C=0)-, —SC(=0)-, —R^{a}C(=0)- or a direct bond: —C(=0)-, —(C=0)0-, —C(=0)S—, —C(=0) R^{a}— or a direct bond; G is Ci-C₆ alkylene; R^{a} is H or C1-C12 alkyl; R^{1a} and R^{1b} are, at each occurrence, independently either: (a) H or C₁-C₁₂ alkyl; or (b) R^{1a} is H or C₁-C₁₂ alkyl, and R^{1b} together with the carbon atom to which it is bound is taken together with an adjacent R^{1b} and the carbon atom to which it is bound to form a carbon-carbon double bond; R^{2a} and R^{2b} are, at each occurrence, independently either: (a) H or C₁-C₁₂ alkyl; or (b) R^{2a} is H or C₁-C₁₂ alkyl, and R^{2b} together with the carbon atom to which it is bound is taken together with an adjacent R^{2b} and the carbon atom to which it is bound to form a carbon-carbon double bond; R^{3a} and R^{3b} are, at each occurrence, independently either (a): H or C₁-C₁₂ alkyl; or (b) R^{3a} is H or C₁-C₁₂ alkyl, and R^{3b} together with the carbon atom to which it is bound is taken together with an adjacent R and the carbon atom to which it is bound to form a carbon-carbon double bond; R^{4a} and R^{4b} are, at each occurrence, independently either: (a) H or C₁-C₁₂ alkyl; or (b) R^{4a} is H or C₁-C₁₂ alkyl, and R^{4b} together with the carbon atom to which it is bound is taken together with an adjacent R^{4b} and the carbon atom to which it is bound to form a carbon-carbon double bond; R⁵ and R⁶ are each independently H or methyl; R⁷ is C₄-C₂₀ alkyl; R⁸ and R⁹ are each independently C₁-C₁₂ alkyl; or R⁸ and R⁹, together with the nitrogen atom to which they are attached, form a 5, 6 or 7-membered heterocyclic ring; a, b, c and d are each independently an integer from 1 to 24; and x is 0, 1 or 2.

[0055] In some aspects, the LNP comprises a compound having a structure of Formula II:

[chemical structure]

[0056] or a pharmaceutically acceptable salt, tautomer, prodrug or stereoisomer thereof, wherein:
[0057] L¹ and L² are each independently -0(C=0)-, —(C=0)0- or a carbon-carbon double bond; R^{1a} and R^{1b} are, at each occurrence, independently either (a) H or C₁-C₁₂ alkyl, or (b) R^{1a} is H or C₁-C₁₂ alkyl, and R^{1b} together with the carbon atom to which it is bound is taken together with an adjacent R^{1b} and the carbon atom to which it is bound to form a carbon-carbon double bond;
[0058] R^{2a} and R^{2b} are, at each occurrence, independently either (a) H or C₁-C₁₂ alkyl, or (b) R^{2a} is H or C₁-C₁₂ alkyl, and R^{2b} together with the carbon atom to which it is bound is taken together with an adjacent R^{2b} and the carbon atom to which it is bound to form a carbon-carbon double bond;
[0059] R^{3a} and R^{3b} are, at each occurrence, independently either (a) H or C₁-C₁₂ alkyl, or (b) R^{3a} is H or C₁-C₁₂ alkyl, and R^{3b} together with the carbon atom to which it is bound is taken together with an adjacent R^{3b} and the carbon atom to which it is bound to form a carbon-carbon double bond;
[0060] R^{4a} and R^{4b} are, at each occurrence, independently either (a) H or C₁-C₁₂ alkyl, or (b) R^{4a} is H or C₁-C₁₂ alkyl, and R^{4b} together with the carbon atom to which it is bound is taken together with an adjacent R^{4b} and the carbon atom to which it is bound to form a carbon-carbon double bond;
[0061] R⁵ and R⁶ are each independently methyl or cycloalkyl; R⁷ is, at each occurrence, independently H or C₁-C₁₂ alkyl; R⁸ and R⁹ are each independently unsubstituted C₁-C₁₂ alkyl; or R⁸ and R⁹, together with the nitrogen atom to which they are attached, form a 5, 6 or 7-membered heterocyclic ring comprising one nitrogen atom; a and d are each independently an integer from 0 to 24; b and c are each independently an integer from 1 to 24; and e is 1 or 2, provided that: at least one of R^{1a}, R^{2a}, R^{3a} or R^{4a} is C₁-C₁₂ alkyl, or at least one of L¹ or L² is -0(C=0)- or —(C=0)0-; and R^{1a} and R^{1b} are not isopropyl when a is 6 or n-butyl when a is 8.

[0062] In some aspects, any of the above compositions further comprise one or more excipients comprising a neutral lipid, a steroid, and a polymer conjugated lipid. In some aspects, the neutral lipid comprises at least one of 1,2-Distearoyl-sn-glycero-3-phosphocholine (DSPC), 1,2-Dipalmitoyl-sn-glycero-3-phosphocholine (DPPC), 1,2-Dimyristoyl-sn-glycero-3-phosphocholine (DMPC), 1-Palmitoyl-2-oleoyl-sn-glycero-3-phosphocholine (POPC), 1,2-dioleoyl-sn-glycero-3-phosphocholine (DOPC), and 1,2-Dioleoyl-sn-glycero-3-phosphoethanolamine (DOPE). In some aspects, the neutral lipid is DSPC.

[0063] In some aspects, the molar ratio of the compound to the neutral lipid ranges from about 2:1 to about 8:1.

[0064] In some aspects, the steroid is cholesterol. In some aspects, the molar ratio of the compound to cholesterol ranges from about 2:1 to 1:1.

[0065] In some aspects, the polymer conjugated lipid is a pegylated lipid. In some aspects, the molar ratio of the compound to the pegylated lipid ranges from about 100:1 to about 25:1. In some aspects, the pegylated lipid is PEG-DAG, a PEG polyethylene (PEG-PE), a PEG-succinoyl-diacylglycerol (PEG-S-DAG), PEG-cer or a PEG dialkyoxypropylcarbamate. In some aspects, the pegylated lipid has the following structure III:

[chemical structure]

or a pharmaceutically acceptable salt, tautomer or stereoisomer thereof, wherein: R¹⁰ and R¹¹ are each independently a straight or branched, saturated or unsaturated alkyl chain containing from 10 to 30 carbon atoms, wherein the alkyl chain is optionally interrupted by one or more ester bonds; and z has a mean value ranging from 30 to 60. In some aspects, R¹⁰ and R¹¹ are each independently straight, saturated alkyl chains having 12 to 16 carbon atoms. In some aspects, the average z is about 45.

### Start Here

[0066] In some aspects, the LNP self-assembles into non-bilayer structures when mixed with polyanionic nucleic acid. In some aspects, the non-bilayer structures have a diameter between 60 nm and 120 nm. In some aspects, the non-bilayer structures have a diameter of about 70 nm, about 80 nm, about 90 nm, or about 100 nm. In some aspects, wherein the nanoparticulate delivery vehicle has a diameter of about 100 nm.

[0067] Also provided for herein is a vector or set of vectors comprising any of the nucleotide sequence described herein. Also disclosed herein is a vector comprising an isolated nucleotide sequence disclosed herein.

[0068] Also provided for herein is an isolated cell comprising any of the nucleotide sequences or set of isolated nucleotide sequences described herein, optionally wherein the cell is a BHK-21, CHO, HEK293 or variants thereof, 911, HeLa, A549, LP-293, PER.C6, or AE1-2a cell.

[0069] Also provided for herein is a kit comprising any of the compositions described herein and instructions for use. Also disclosed herein is a kit comprising a vector or a composition disclosed herein and instructions for use.

[0070] Also provided for herein is a method for treating a subject suffering from Covid-19, the method comprising administering to the subject any of the compositions or any of the pharmaceutical compositions described herein.

[0071] Also provided for herein is a method for treating a subject, the method comprising administering to the subject any of the compositions or any of the pharmaceutical compositions described herein.

[0072] Also provided for herein is a method for stimulating an immune response in a subject, the method comprising administering to the subject any of the compositions or any of the pharmaceutical compositions described herein.

[0073] Also disclosed herein is a method for treating a subject, the method comprising administering to the subject a vector disclosed herein or a pharmaceutical composition disclosed herein.

[0074] Also disclosed herein is a method of manufacturing the one or more vectors of any of the above compositions.

[0075] Also disclosed herein is a method of manufacturing any of the compositions disclosed herein.

### BRIEF DESCRIPTION OF THE SEVERAL VIEWS OF THE DRAWINGS

[0076] These and other features, aspects, and advantages of the present invention will become better understood with regard to the following description, and accompanying drawings, where:

[0077] Figure (FIG.) 1 illustrates a self-amplifying mRNA (SAM) system featuring a single alphavirus-derived subgenomic promoter (SGP).

[0078] FIG. 2 illustrates a SAM system featuring multiple expression cassettes driven by separate SGPs.

[0079] FIG. 3 presents antigen-specific cellular immune responses measured using ELISpot for mice vaccinated with a SAM system featuring multiple expression cassettes driven by separate alphavirus-derived subgenomic promoters (SGPs). Shown is IFNγ ELISpot results 2 weeks post immunization. T cell response to overlapping peptide pools spanning either Spike, Nucleocapsid, or Orf3a is shown.

[0080] FIG. 4 presents antigen-specific cellular immune responses measured using ELISpot for mice vaccinated with a ChAdV system featuring multiple expression cassettes driven by separate CMV promoters. Shown is IFNγ ELISpot results 2 weeks post immunization. T cell response to overlapping peptide pools spanning either Spike, Nucleocapsid, or Orf3a is shown.

[0081] FIG. 5 presents antigen-specific cellular immune responses measured using ELISpot for mice vaccinated with a SAM system featuring multiple expression cassettes (Spike “IDT-Spike” and T cell epitope cassette 5 “TCE5”) driven by separate SGPs. Schematics for the various cassette organizations are shown at the top. Left panel shows the sum of response to 8 overlapping peptide pools spanning Spike antigen. Right panel shows the sum of response to 3 overlapping peptide pools spanning NCap, Membrane, and Orf3a. Data are for Balb/c mice immunized with 10 ug of each SAM vaccine, n=6/group, and splenocyte isolation at 2-weeks post immunization.

[0082] FIG. 6 presents the Spike-specific IgG response for mice vaccinated with a SAM system featuring multiple expression cassettes (Spike “IDT-Spike” and T cell epitope cassette 5 “TCE5”) driven by separate SGPs. Schematics for the various cassette organizations are shown at the top. Balb/c mice were immunized with 10 ug of each SAM vaccine, n=4/group. Serum was collected and analyzed at 4-weeks post immunization. 51 IgG binding measured by MSD ELISA. Interpolated endpoint titer. Geomean, geometric SD.

[0083] FIG. 7 presents antigen-specific cellular immune responses measured using ELISpot for mice vaccinated with a SAM system featuring multiple expression cassettes (Spike “IDT-Spike” and T cell epitope cassettes 6 or 7 “TCE6/7”) driven by separate SGPs. Schematics for the various cassette organizations are shown at the top. Top panel shows the sum of response to 8 overlapping peptide pools spanning Spike antigen. Bottom panel shows the sum of response to 3 overlapping peptide pools spanning NCap, Membrane, and Orf3a. Data are for Balb/c mice immunized with 10 ug of each SAM vaccine, n=6/group, and splenocyte isolation at 2-weeks post immunization.

[0084] FIG. 8 presents the Spike-specific IgG response for mice vaccinated with a SAM system featuring multiple expression cassettes (Spike “IDT-Spike” and T cell epitope cassettes 6 or 7 “TCE6/7”) driven by separate SGPs. Schematics for the various cassette organizations are shown at the top. Balb/c mice were immunized with 10 ug of each SAM vaccine, n=4/group. Serum was collected and analyzed at 4-weeks post immunization. 51 IgG binding measured by MSD ELISA. Interpolated endpoint titer. Geomean, geometric SD.

[0085] FIG. 9 presents antigen-specific cellular immune responses measured using ELISpot for mice vaccinated with a SAM system featuring multiple expression cassettes (Spike “IDT-Spike” and T cell epitope cassettes 5 or 8 “TCE5/8”) driven by separate SGPs. Schematics for the various cassette organizations are shown at the top. Top panel shows the sum of response to 8 overlapping peptide pools spanning Spike antigen. Bottom panel shows the sum of response to 3 overlapping peptide pools spanning NCap, Membrane, and Orf3a. Data are for Balb/c mice immunized with 10 ug of each SAM vaccine, n=6/group, and splenocyte isolation at 2-weeks post immunization.

[0086] FIG. 10 presents the Spike-specific IgG response for mice vaccinated with a SAM system featuring multiple expression cassettes (Spike “IDT-Spike” and T cell epitope cassettes 5 or 8 “TCE5/8”) driven by separate SGPs. Schematics for the various cassette organizations are shown at the top. Balb/c mice were immunized with 10 ug of each SAM vaccine, n=4/group. Serum was collected and analyzed at 4-weeks post immunization. 51 IgG binding measured by MSD ELISA. Interpolated endpoint titer. Geomean, geometric SD.

[0087] FIG. 11 presents antigen-specific cellular immune responses measured using ELISpot for mice vaccinated with a SAM system featuring multiple expression cassettes (Spike “SA-Spike”; and T cell epitope cassette 9 “TCE9” or a combination of Nucleocapsid and TCE11 “Nuc-TCE11) driven by separate SGPs. Schematics for the various cassette organizations are shown at the top. Left panel shows the sum of response to 8 overlapping peptide pools spanning Spike antigen. Middle panel shows the sum of T-cell responses detected by ELISpot with protein specific peptide pools for TCE (Orf3a, Membrane & NSP 3, 4, 6 & 12 genes). Right panel shows the sum of response to peptide pools spanning Nucleocapsid. Data are for Balb/c mice immunized with 10 ug of each SAM vaccine, n=6/group, and splenocyte isolation at 2-weeks post immunization. Spleens were harvested from 6 mice in each group at d14 for T-cell analysis. Sera from the remaining mice (n=6) were analyzed at 0, 4, 8 and 12 weeks for IgG responses by anti-IgG MSD ELISA. Four week IgG data is shown.

[0088] FIG. 12 presents the Spike-specific IgG response for mice vaccinated with a SAM system featuring multiple expression cassettes (Spike “SA-Spike”; and T cell epitope cassette 9 “TCE9” or a combination of Nucleocapsid and TCE11 “Nuc-TCE11) driven by separate SGPs. Schematics for the various cassette organizations are shown at the top. Balb/c mice were immunized with 10 ug of each SAM vaccine, n=6/group. Serum was collected and analyzed at 0, 4, 8 and 12 weeks post immunization. Shown is 4-weeks post immunization. 51 IgG binding measured by MSD ELISA. Interpolated endpoint titer. Geomean, geometric SD.

### DETAILED DESCRIPTION

[0089] Described herein are multicistronic alphavirus-derived self-amplifying mRNA (SAM) vectors and compositions for delivery of payload/antigen expression systems described herein. The multicistronic SAM constructs include (A) a self-replicating alphavirus-based expression system, wherein the self-replicating alphavirus-based expression system includes one or more vectors, wherein the one or more vectors include: (a) an RNA alphavirus backbone, wherein the RNA alphavirus backbone includes: (i) at least one promoter nucleotide sequence, and (ii) at least one polyadenylation (poly(A)) sequence; and (b) at least two cassettes expressing a payload sequence, wherein a first of the at least two cassettes, oriented from 5′ to 3′, is operably linked to a promoter nucleotide sequence comprising a first subgenomic alphavirus-derived promoter (SGP1) comprising a core conserved promoter sequence comprising the polynucleotide sequence ctacggcTAAcctgaa(+1)tgga (SEQ ID NO: 27974), and wherein at least a second of the at least two cassettes is operably linked to a promoter nucleotide sequence comprising a second subgenomic alphavirus-derived promoter (SGP2) comprising the core conserved promoter sequence, and wherein the SGP1 and/or the SGP2 subgenomic promoter comprises an extended 3′ promoter region derived from an alphavirus encoded 3′ of the core conserved promoter sequence.

[0090] In general, and without wishing to be bound by theory, the multicistronic SAM vectors herein address potential technical limitations present in the field, including, but not limited to: (1) improving expression of multiple payloads that include large cassettes (e.g., greater than the size of a native cassette expressed from a native alphavirus subgenomic promoter, such as cassettes approximately 4 kb or greater in length); (2) improved control of expression of multiple payloads, e.g., controlling the relative expression of different payloads; and (3) improved vector stability, such as by reducing vector recombination events (e.g., intra-vector promoter recombination between alphavirus subgenomic promoters).

[0091] In illustrative vaccine contexts, each of the cassettes can independently comprise: (i) at least one antigen-encoding nucleic acid sequence comprising: a. an epitope-encoding nucleic acid sequence, b. optionally a 5′ linker sequence, and c. optionally a 3′ linker sequence.

[0092] A cassette can optionally include at least one second poly(A) sequence, wherein the second poly(A) sequence is a native poly(A) sequence or an exogenous poly(A) sequence to the alphavirus backbone.

[0093] Multicistronic SAM vectors herein include multiple subgenomic promoters that include core conserved promoter sequences. In general, the minimum “conserved” promoter sequence includes the polynucleotide sequence ctacggcTAAcctgaa(+1)tgga (SEQ ID NO: 27974), where “+1” indicates the putative transcriptional start site of the subgenomic promoter. Additional flanking sequences of alphavirus subgenomic promoters can influence promoter activity and be considered part of the core promoter. For example, additional flanking sequences may be needed to produce detectable expression in vitro and/or efficacy in vivo (e.g., efficacy in stimulating an immune response).

[0094] A subgenomic promoter (SGP1, SGP2, or both) can include an extended 3′ promoter region. An extended 3′ promoter region can be derived from the same alphavirus as the alphavirus used to derive the core conserved promoter sequence. An extended 3′ promoter region can be derived from a different alphavirus as the alphavirus used to derive the core conserved promoter sequence. An extended 3′ promoter region can include the polynucleotide sequence CTACGACAT (SEQ ID NO: 27997). An extended 3′ promoter region can include the polynucleotide sequence CTACGACAT (SEQ ID NO: 27997) and additional extended 3′ promoter region polynucleotides derived from an alphavirus, e.g., the same alphavirus used to derive the core conserved promoter sequence. An extended 3′ promoter region can include the polynucleotide sequence AGTCTAGTCCGCCAAG (SEQ ID NO: 27982). An extended 3′ promoter region can include the polynucleotide sequence CTACGACATAGTCTAGTCCGCCAAG (SEQ ID NO: 27975). An extended 3′ promoter region can include the polynucleotide sequence CTACGACAT (SEQ ID NO: 27997) and be encoded immediately 3′ of the core conserved promoter sequence (i.e., no interspersing nucleotides are included between the core conserved promoter and the extended 3′ promoter region) resulting in a subgenomic promoter including the polynucleotide sequence CTACGGCTAACCTGAATGGACTACGACAT (SEQ ID NO: 27983) or CTCTCTACGGCTAACCTGAATGGACTACGACAT (SEQ ID NO: 27984). An extended 3′ promoter region can include the polynucleotide sequence CTACGACATAGTCTAGTCCGCCAAG (SEQ ID NO: 27975) and be encoded immediately 3′ of the core conserved promoter sequence resulting in a subgenomic promoter including the polynucleotide sequence CTACGGCTAACCTGAATGGACTACGACATAGTCTAGTCCGCCAAG (SEQ ID NO: 27985) or CTCTCTACGGCTAACCTGAATGGACTACGACATAGTCTAGTCCGCCAAG (SEQ ID NO: 27986).

[0095] One of the subgenomic promoters (i.e., either SGP1 or SGP2, but not both) can include an extended 3′ promoter region. One of the subgenomic promoters can include an extended 3′ promoter region that is different than the other extended 3′ promoter region (e.g., SGP1 and SGP2 have different extended 3′ promoter regions). For example, and without wishing to be bound by theory, an extended 3′ promoter region can improve vector stability, such as by reducing vector recombination events (e.g., intra-vector promoter recombination between alphavirus subgenomic promoters) through including an extended 3′ promoter region in only one of the subgenomic promoters (SGP1 or SGP2, but not both).

[0096] In another example, and without wishing to be bound by theory, an extended 3′ promoter region can improve control of expression, such as controlling the relative strength of expression of a cassette from various subgenomic promoters through including an extended 3′ promoter region in only one of the subgenomic promoters (SGP1 or SGP2, but not both).

[0097] Only one of the subgenomic promoters (i.e., either SGP1 or SGP2, but not both) can include an extended 3′ promoter region including the polynucleotide sequence CTACGACAT (SEQ ID NO: 27997). Only one of the subgenomic promoters (i.e., either SGP1 or SGP2, but not both) can include an extended 3′ promoter region including the polynucleotide sequence CTACGACAT (SEQ ID NO: 27997) and additional polynucleotides derived from an alphavirus, e.g., the same alphavirus used to derive the core conserved promoter sequence. Only one of the subgenomic promoters (i.e., either SGP1 or SGP2, but not both) can include an extended 3′ promoter region sequence including the polynucleotide sequence AGTCTAGTCCGCCAAG (SEQ ID NO: 27982).

[0098] One or all of the subgenomic promoters can include an extended 3′ promoter region including the polynucleotide sequence CTACGACAT (SEQ ID NO: 27997) but only one of the subgenomic promoters (i.e., either SGP1 or SGP2, but not both) can include additional extended 3′ promoter region polynucleotides derived from an alphavirus, e.g., the same alphavirus used to derive the core conserved promoter sequence. One or all of the subgenomic promoters can include an extended 3′ promoter region including the polynucleotide sequence CTACGACAT (SEQ ID NO: 27997) but only one of the subgenomic promoters (i.e., either SGP1 or SGP2, but not both) can include an extended 3′ promoter region sequence including the polynucleotide sequence AGTCTAGTCCGCCAAG (SEQ ID NO: 27982).

[0099] Only one of the subgenomic promoters (i.e., either SGP1 or SGP2, but not both) can include an extended 3′ promoter region including the polynucleotide sequence CTACGACATAGTCTAGTCCGCCAAG (SEQ ID NO: 27975). One or all of the subgenomic promoters can include an extended 3′ promoter region including the polynucleotide sequence CTACGACAT (SEQ ID NO: 27997) but only one of the subgenomic promoters (i.e., either SGP1 or SGP2, but not both) can include an extended 3′ promoter region including the polynucleotide sequence CTACGACATAGTCTAGTCCGCCAAG (SEQ ID NO: 27975).

[0100] Only one of the subgenomic promoters (i.e., either SGP1 or SGP2, but not both) can include an extended 3′ promoter region including the polynucleotide sequence CTACGACAT (SEQ ID NO: 27997) and be encoded immediately 3′ of the core conserved promoter sequence resulting in a subgenomic promoter including the polynucleotide sequence CTACGGCTAACCTGAATGGACTACGACAT (SEQ ID NO: 27983) or CTCTCTACGGCTAACCTGAATGGACTACGACAT (SEQ ID NO: 27984).

[0101] Only one of the subgenomic promoters (i.e., either SGP1 or SGP2, but not both) can include an extended 3′ promoter region including the polynucleotide sequence CTACGACATAGTCTAGTCCGCCAAG (SEQ ID NO: 27975) and be encoded immediately 3′ of the core conserved promoter sequence resulting in a subgenomic promoter including the polynucleotide sequence CTACGGCTAACCTGAATGGACTACGACATAGTCTAGTCCGCCAAG (SEQ ID NO: 27985) or CTCTCTACGGCTAACCTGAATGGACTACGACATAGTCTAGTCCGCCAAG (SEQ ID NO: 27986).

[0102] One or all of the subgenomic promoters can include an extended 3′ promoter region including the polynucleotide sequence CTACGACAT (SEQ ID NO: 27997) encoded immediately 3′ of the core conserved promoter sequence but only one of the subgenomic promoters (i.e., either SGP1 or SGP2, but not both) can include an extended 3′ promoter region including the polynucleotide sequence CTACGACATAGTCTAGTCCGCCAAG (SEQ ID NO: 27975) and be encoded immediately 3′ of the core conserved promoter sequence.

[0103] In some instances, the paired subgenomic promoter sequences (i.e., SGP1 and SGP2) include either CTACGGCTAACCTGAATGGACTACGACATAGTCTAGTCCGCCAAG (SEQ ID NO: 27985) or CTCTCTACGGCTAACCTGAATGGACTACGACATAGTCTAGTCCGCCAAG (SEQ ID NO: 27986) paired with either CTACGGCTAACCTGAATGGACTACGAC (SEQ ID NO: 27987) that does not include an additional extended 3′ promoter region or CTCTCTACGGCTAACCTGAATGGACTACGAC (SEQ ID NO: 27988) that does not include an additional extended 3′ promoter region. In some instances, the paired subgenomic promoter sequences (i.e., SGP1 and SGP2) include either CTACGGCTAACCTGAATGGACTACGACATAGTCTAGTCCGCCAAG (SEQ ID NO: 27985) or CTCTCTACGGCTAACCTGAATGGACTACGACATAGTCTAGTCCGCCAAG (SEQ ID NO: 27986) paired with either CTACGGCTAACCTGAATGGA (SEQ ID NO: 27974) that does not include an additional extended 3′ promoter region or CTCTCTACGGCTAACCTGAATGGA (SEQ ID NO: 27989) that does not include an additional extended 3′ promoter region.

[0104] In some instances, the paired subgenomic promoter sequences (i.e., SGP1 and SGP2) include CTCTCTACGGCTAACCTGAATGGACTACGACATAGTCTAGTCCGCCAAG (SEQ ID NO: 27986) paired with either CTCTCTACGGCTAACCTGAATGGACTACGAC (SEQ ID NO: 27988) that does not include an additional extended 3′ promoter region. In some instances, the paired subgenomic promoter sequences (i.e., SGP1 and SGP2) include CTACGGCTAACCTGAATGGACTACGACATAGTCTAGTCCGCCAAG (SEQ ID NO: 27985) paired with CTCTCTACGGCTAACCTGAATGGACTACGAC (SEQ ID NO: 27988) that does not include an additional extended 3′ promoter region.

[0105] In some instances, the paired subgenomic promoter sequences (i.e., SGP1 and SGP2) include CTCTCTACGGCTAACCTGAATGGACTACGACATAGTCTAGTCCGCCAAG (SEQ ID NO: 27986) paired with either CTCTCTACGGCTAACCT (SEQ ID NO: 27990) that does not include an additional extended 3′ promoter region. In some instances, the paired subgenomic promoter sequences (i.e., SGP1 and SGP2) include CTACGGCTAACCTGAATGGACTACGACATAGTCTAGTCCGCCAAG (SEQ ID NO: 27985) paired with CTCTCTACGGCTAACCTGAATGGA (SEQ ID NO: 27989) that does not include an additional extended 3′ promoter region.

[0106] In some instances, the paired subgenomic promoter sequences (i.e., SGP1 and SGP2) include CTCTCTACGGCTAACCTGAATGGACTACGACATAGTCTAGTCCGCCAAG (SEQ ID NO: 27986) paired with CTACGGCTAACCTGAATGGACTACGAC (SEQ ID NO: 27987) that does not include an additional extended 3′ promoter region. In some instances, the paired subgenomic promoter sequences (i.e., SGP1 and SGP2) include CTACGGCTAACCTGAATGGACTACGACATAGTCTAGTCCGCCAAG (SEQ ID NO: 27985) paired with CTACGGCTAACCTGAATGGACTACGAC (SEQ ID NO: 27987) that does not include an additional extended 3′ promoter region.

[0107] In some instances, the paired subgenomic promoter sequences (i.e., SGP1 and SGP2) include CTCTCTACGGCTAACCTGAATGGACTACGACATAGTCTAGTCCGCCAAG (SEQ ID NO: 27986) paired with CTACGGCTAACCTGAATGGA (SEQ ID NO: 27974) that does not include an additional extended 3′ promoter region. In some instances, the paired subgenomic promoter sequences (i.e., SGP1 and SGP2) include CTACGGCTAACCTGAATGGACTACGACATAGTCTAGTCCGCCAAG (SEQ ID NO: 27985) paired with CTACGGCTAACCTGAATGGA (SEQ ID NO: 27974) that does not include an additional extended 3′ promoter region.

[0108] A subgenomic promoter (SGP1, SGP2, or both) can include an extended 5′ promoter region. Without wishing to be bound by theory, an extended 5′ promoter region can improve control of expression, such as controlling the relative strength of expression of a cassette from various subgenomic promoters through including an extended 5′ promoter region. An extended 5′ promoter region can be derived from the same alphavirus as the alphavirus used to derive the core conserved promoter sequence. An extended 5′ promoter region can be derived from a different alphavirus as the alphavirus used to derive the core conserved promoter sequence. An extended 5′ promoter region include the polynucleotide sequence ctct encoded immediately 5′ of the core conserved promoter sequence (i.e., no interspersing nucleotides are included between the core conserved promoter and the extended 5′ promoter region). In one embodiment, each of the one or more of the subgenomic promoters includes the minimum sequence ctctctacggcTAAcctgaa(+1)tgga (SEQ ID NO: 27989).

[0109] An extended 5′ promoter region can include a polynucleotide sequence derived from the polynucleotide sequence acttccatcatagttatggccatgactactctagctagcagtgttaaatcattcagctacctgagaggggcccctataactct (SEQ ID NO: 27977). An extended 5′ promoter region can include the polynucleotide sequence acttccatcatagttatggccatgactactctagctagcagtgttaaatcattcagctacctgagaggggcccctataactct (SEQ ID NO: 27977). An extended 5′ promoter region can include the polynucleotide sequence acttccatcatagttatggccatgactactctagctagcagtgttaaatcattcagctacctgagaggggcccctataactct (SEQ ID NO: 27977) encoded immediately 5′ of the core conserved promoter sequence. An extended 5′ promoter region can include the polynucleotide sequence the polynucleotide sequence acctgagaggggcccctataactct (SEQ ID NO: 27978). An extended 5′ promoter region can include the polynucleotide sequence acctgagaggggcccctataactct (SEQ ID NO: 27978) encoded immediately 5′ of the core conserved promoter sequence. An extended 5′ promoter region can include the polynucleotide sequence gggcccctataactct (SEQ ID NO: 27979). An extended 5′ promoter region can include the polynucleotide sequence gggcccctataactct (SEQ ID NO: 27979) encoded immediately 5′ of the core conserved promoter sequence. An extended 5′ promoter region can include the polynucleotide sequence ggggcccctataactct (SEQ ID NO: 27991). An extended 5′ promoter region can include the polynucleotide sequence ggggcccctataactct (SEQ ID NO: 27991) encoded immediately 5′ of the core conserved promoter sequence.

[0110] An extended 5′ promoter region can consist of the polynucleotide sequence gggcccctataactct (SEQ ID NO: 27979). An extended 5′ promoter region can consist of the polynucleotide sequence gggcccctataactct (SEQ ID NO: 27979) encoded immediately 5′ of the core conserved promoter sequence. An extended 5′ promoter region can consist of the polynucleotide sequence ggggcccctataactct (SEQ ID NO: 27991). An extended 5′ promoter region can consist of the polynucleotide sequence ggggcccctataactct (SEQ ID NO: 27991) encoded immediately 5′ of the core conserved promoter sequence.

[0111] An extended 5′ promoter region of an SGP2 subgenomic promoter can include a polynucleotide sequence derived from the polynucleotide sequence acttccatcatagttatggccatgactactctagctagcagtgttaaatcattcagctacctgagaggggcccctataactct (SEQ ID NO: 27977). An extended 5′ promoter region of an SGP2 subgenomic promoter can include the polynucleotide sequence acttccatcatagttatggccatgactactctagctagcagtgttaaatcattcagctacctgagaggggcccctataactct (SEQ ID NO: 27977). An extended 5′ promoter region of an SGP2 subgenomic promoter can include the polynucleotide sequence acttccatcatagttatggccatgactactctagctagcagtgttaaatcattcagctacctgagaggggcccctataactct (SEQ ID NO: 27977) encoded immediately 5′ of the core conserved promoter sequence. An extended 5′ promoter region of an SGP2 subgenomic promoter can include the polynucleotide sequence the polynucleotide sequence acctgagaggggcccctataactct (SEQ ID NO: 27978). An extended 5′ promoter region of an SGP2 subgenomic promoter can include the polynucleotide sequence acctgagaggggcccctataactct (SEQ ID NO: 27978) encoded immediately 5′ of the core conserved promoter sequence. An extended 5′ promoter region of an SGP2 subgenomic promoter can include the polynucleotide sequence gggcccctataactct (SEQ ID NO: 27979). An extended 5′ promoter region of an SGP2 subgenomic promoter can include the polynucleotide sequence gggcccctataactct (SEQ ID NO: 27979) encoded immediately 5′ of the core conserved promoter sequence. An extended 5′ promoter region of an SGP2 subgenomic promoter can consist of the polynucleotide sequence gggcccctataactct (SEQ ID NO: 27979). An extended 5′ promoter region of an SGP2 subgenomic promoter can consist of the polynucleotide sequence gggcccctataactct (SEQ ID NO: 27979) encoded immediately 5′ of the core conserved promoter sequence. An extended 5′ promoter region of an SGP2 subgenomic promoter can consist of the polynucleotide sequence ggggcccctataactct (SEQ ID NO: 27991). An extended 5′ promoter region of an SGP2 subgenomic promoter can consist of the polynucleotide sequence ggggcccctataactct (SEQ ID NO: 27991) encoded immediately 5′ of the core conserved promoter sequence.

[0112] An extended promoter region can include one or more transcriptional enhancer elements. Enhancer elements can be encoded 3′ or 5′ of the core promoter sequence(s). Either SGP1, SGP2, or both can include enhancer elements. An enhancer element can be derived from the same alphavirus as the alphavirus used to derive the core conserved promoter sequence. An enhancer element can be derived from a different alphavirus as the alphavirus used to derive the core conserved promoter sequence. In particular, a polynucleotide encoding the C-terminal portion of a nsp4 gene in a native alphavirus overlaps with the core conserved promoter sequence of alphavirus subgenomic promoter in the context of a native 26S subgenomic transcriptional promoter. Accordingly, either SGP1, SGP2, or both can include enhancer elements that include a polynucleotide sequence derived from an alphavirus nonstructural protein 4 (nsp4), which is generally encoded 5′ of the core conserved promoter sequence, e.g., encoded immediately 5′ of the core conserved promoter sequence. A polynucleotide encoding the C-terminal portion of a nsp4 can include an additional sequence GGGCCCCTATAA (SEQ ID NO: 27992) resulting in a subgenomic promoter can include the sequence GGGCCCCTATAACTCTCTACGGCTAACCTGAATGGACTACGAC (SEQ ID NO: 27981). Either SGP1, SGP2, or both can include the sequence GGGCCCCTATAACTCTCTACGGCTAACCTGAATGGACTACGAC (SEQ ID NO: 27981). Inclusion of a polynucleotide encoding the C-terminal portion of a nsp4 5′ of the core conserved promoter sequence and an extended 3′ promoter region of CTACGACATAGTCTAGTCCGCCAAG (SEQ ID NO: 27975) 3′ of the core conserved promoter sequence can result in subgenomic promoter including the sequence GGGCCCCTATAACTCTCTACGGCTAACCTGAATGGACTACGACATAGTCTAGTCCGC CAAG (SEQ ID NO: 27980) (which is generally limited to either SGP1 or SGP2, but not both). A polynucleotide encoding the C-terminal portion of a nsp4 can include an additional sequence GGGGCCCCTATAA (SEQ ID NO: 27993) resulting in a subgenomic promoter can include the sequence GGGGCCCCTATAACTCTCTACGGCTAACCTGAATGGACTACGAC (SEQ ID NO: 27994). Either SGP1, SGP2, or both can include the sequence GGGGCCCCTATAACTCTCTACGGCTAACCTGAATGGACTACGAC (SEQ ID NO: 27994). Inclusion of a polynucleotide encoding the C-terminal portion of a nsp4 5′ of the core conserved promoter sequence and an extended promoter region of CTACGACATAGTCTAGTCCGCCAAG (SEQ ID NO: 27975) 3′ of the core conserved promoter sequence can result in subgenomic promoter including the sequence GGGGCCCCTATAACTCTCTACGGCTAACCTGAATGGACTACGACATAGTCTAGTCCG CCAAG (SEQ ID NO: 27995) (which is generally limited to either SGP1 or SGP2, but not both).

[0113] Inclusion of a polynucleotide encoding the C-terminal portion of a nsp4 5′ of the core conserved promoter sequence and an extended promoter region of CTACGACATAGTCTAGTCCGCCAAG (SEQ ID NO: 27975) 3′ of the core conserved promoter sequence can result subgenomic promoters including the following pairs of sequences:

(1) SGP1 including
(SEQ ID NO: 27981)
GGGCCCCTATAACTCTCTACGGCTAACCTGAATGGACTACGAC
and
SGP2 including
(SEQ ID NO: 27980)
GGGCCCCTATAACTCTCTACGGCTAACCTGAATGGACTACGACATAGTCTAGTCCGC
CAAG;
(2) SGP2 including
(SEQ ID NO: 27981)
GGGCCCCTATAACTCTCTACGGCTAACCTGAATGGACTACGAC
and
SGP1 including
(SEQ ID NO: 27980)
GGGCCCCTATAACTCTCTACGGCTAACCTGAATGGACTACGACATAGTCTAGTCCGC
CAAG;
(3) SGP1 including
(SEQ ID NO: 27988)
CTCTCTACGGCTAACCTGAATGGACTACGAC
and
SGP2 including
(SEQ ID NO: 27980)
GGGCCCCTATAACTCTCTACGGCTAACCTGAATGGACTACGACATAGTCTAGTCCGC
CAAG;
(4) SGP2 including
(SEQ ID NO: 27988)
CTCTCTACGGCTAACCTGAATGGACTACGAC
and
SGP1 including
(SEQ ID NO: 27980)
GGGCCCCTATAACTCTCTACGGCTAACCTGAATGGACTACGACATAGTCTAGTCCGC
CAAG;
(5) SGP1 including
(SEQ ID NO: 27981)
GGGCCCCTATAACTCTCTACGGCTAACCTGAATGGACTACGAC
and
SGP2 including
(SEQ ID NO: 27986)
CTCTCTACGGCTAACCTGAATGGACTACGACATAGTCTAGTCCGCCAAG;
(6) SGP2 including
(SEQ ID NO: 27981)
GGGCCCCTATAACTCTCTACGGCTAACCTGAATGGACTACGAC
and
SGP1 including
(SEQ ID NO: 27986)
CTCTCTACGGCTAACCTGAATGGACTACGACATAGTCTAGTCCGCCAAG.

[0114] Inclusion of a polynucleotide encoding the C-terminal portion of a nsp4 5′ of the core conserved promoter sequence and an extended promoter region of atagtctagtccgccaag (SEQ ID NO: 27976) 3′ of the core conserved promoter sequence can result subgenomic promoters consisting of the following pairs of sequences:

(1) SGP1 including
(SEQ ID NO: 27981)
GGGCCCCTATAACTCTCTACGGCTAACCTGAATGGACTACGAC
and
SGP2 including
(SEQ ID NO: 27980)
GGGCCCCTATAACTCTCTACGGCTAACCTGAATGGACTACGACATAGTCTAGTCCGC
CAAG;
(2) SGP2 including
(SEQ ID NO: 27981)
GGGCCCCTATAACTCTCTACGGCTAACCTGAATGGACTACGAC
and
SGP1 including
(SEQ ID NO: 27980)
GGGCCCCTATAACTCTCTACGGCTAACCTGAATGGACTACGACATAGTCTAGTCCGC
CAAG;
(3) SGP1 including
(SEQ ID NO: 27988)
CTCTCTACGGCTAACCTGAATGGACTACGAC
and
SGP2 including
(SEQ ID NO: 27980)
GGGCCCCTATAACTCTCTACGGCTAACCTGAATGGACTACGACATAGTCTAGTCCGC
CAAG;
(4) SGP2 including
(SEQ ID NO: 27988)
CTCTCTACGGCTAACCTGAATGGACTACGAC
and
SGP1 including
(SEQ ID NO: 27980)
GGGCCCCTATAACTCTCTACGGCTAACCTGAATGGACTACGACATAGTCTAGTCCGC
CAAG;
(5) SGP1 including
(SEQ ID NO: 27981)
GGGCCCCTATAACTCTCTACGGCTAACCTGAATGGACTACGAC
and
SGP2 including
(SEQ ID NO: 27986)
CTCTCTACGGCTAACCTGAATGGACTACGACATAGTCTAGTCCGCCAAG;
(6) SGP2 including
(SEQ ID NO: 27981)
GGGCCCCTATAACTCTCTACGGCTAACCTGAATGGACTACGAC
and
SGP1 including
(SEQ ID NO: 27986)
CTCTCTACGGCTAACCTGAATGGACTACGACATAGTCTAGTCCGCCAAG.

[0115] The at least one promoter nucleotide sequence of the RNA alphavirus backbone can include the SGP1 subgenomic promoter. For example, SGP1 can refer to the “native” subgenomic promoter provided by the alphavirus backbone.

[0116] Cassettes can be ordered to provide control of expression levels. For example, without wishing to be bound by theory and as FIG. 2 illustrates, SAM system featuring multiple expression cassettes driven by separate SGPs can drive higher expression of a gene under control of the second SGP (SGP2) given both SGP1 and SGP2 will produce transcripts encoding the second gene. Accordingly, multicistronic SAM vectors can have an SGP2 subgenomic promoter that is capable of promoting expression of a cassette at least 2-fold greater relative to the same cassette operably linked to the SGP1 subgenomic promoter. In some embodiments, an extended promoter region (e.g., the 5′ nsp4 polynucleotide and/or atagtctagtccgccaag (SEQ ID NO: 27976) described above) is included in SGP2 that is capable of promoting expression of a cassette at least 2-fold greater relative to the same cassette operably linked to the SGP1 subgenomic promoter.

[0117] A cassette can be configured so the cassette is operably linked to a subgenomic promoter capable of driving expression of a payload from the cassette. For example, a subgenomic promoter can be immediately 5′ of a cassette, including immediately 5′ of a Kozak sequence of a cassette.

### I. Definitions

[0118] In general, terms used in the claims and the specification are intended to be construed as having the plain meaning understood by a person of ordinary skill in the art. Certain terms are defined below to provide additional clarity. In case of conflict between the plain meaning and the provided definitions, the provided definitions are to be used.

[0119] As used herein the term “antigen” is a substance that stimulates an immune response. An antigen can be a neoantigen. An antigen can be a “shared antigen” that is an antigen found among a specific population, e.g., a specific population of cancer patients.

[0120] As used herein the term “neoantigen” is an antigen that has at least one alteration that makes it distinct from the corresponding wild-type antigen, e.g., via mutation in a tumor cell or post-translational modification specific to a tumor cell. A neoantigen can include a polypeptide sequence or a nucleotide sequence. A mutation can include a frameshift or non-frameshift indel, missense or nonsense substitution, splice site alteration, genomic rearrangement or gene fusion, or any genomic or expression alteration giving rise to a neoORF. A mutations can also include a splice variant. Post-translational modifications specific to a tumor cell can include aberrant phosphorylation. Post-translational modifications specific to a tumor cell can also include a proteasome-generated spliced antigen. See Liepe et al., A large fraction of HLA class I ligands are proteasome-generated spliced peptides; Science. 2016 Oct. 21; 354(6310):354-358. The subject can be identified for administration through the use of various diagnostic methods, e.g., patient selection methods described further below.

[0121] As used herein the term “tumor antigen” is an antigen present in a subject's tumor cell or tissue but not in the subject's corresponding normal cell or tissue, or derived from a polypeptide known to or have been found to have altered expression in a tumor cell or cancerous tissue in comparison to a normal cell or tissue.

[0122] As used herein the term “antigen-based vaccine” is a vaccine composition based on one or more antigens, e.g., a plurality of antigens. The vaccines can be nucleotide-based (e.g., virally based, RNA based, or DNA based), protein-based (e.g., peptide based), or a combination thereof.

[0123] As used herein the term “candidate antigen” is a mutation or other aberration giving rise to a sequence that may represent an antigen.

[0124] As used herein the term “coding region” is the portion(s) of a gene that encode protein.

[0125] As used herein the term “coding mutation” is a mutation occurring in a coding region.

[0126] As used herein the term “ORF” means open reading frame.

[0127] As used herein the term “NEO-ORF” is a tumor-specific ORF arising from a mutation or other aberration such as splicing.

[0128] As used herein the term “missense mutation” is a mutation causing a substitution from one amino acid to another.

[0129] As used herein the term “nonsense mutation” is a mutation causing a substitution from an amino acid to a stop codon or causing removal of a canonical start codon.

[0130] As used herein the term “frameshift mutation” is a mutation causing a change in the frame of the protein.

[0131] As used herein the term “indel” is an insertion or deletion of one or more nucleic acids.

[0132] As used herein, the term percent “identity,” in the context of two or more nucleic acid or polypeptide sequences, refer to two or more sequences or subsequences that have a specified percentage of nucleotides or amino acid residues that are the same, when compared and aligned for maximum correspondence, as measured using one of the sequence comparison algorithms described below (e.g., BLASTP and BLASTN or other algorithms available to persons of skill) or by visual inspection. Depending on the application, the percent “identity” can exist over a region of the sequence being compared, e.g., over a functional domain, or, alternatively, exist over the full length of the two sequences to be compared.

[0133] For sequence comparison, typically one sequence acts as a reference sequence to which test sequences are compared. When using a sequence comparison algorithm, test and reference sequences are input into a computer, subsequence coordinates are designated, if necessary, and sequence algorithm program parameters are designated. The sequence comparison algorithm then calculates the percent sequence identity for the test sequence(s) relative to the reference sequence, based on the designated program parameters. Alternatively, sequence similarity or dissimilarity can be established by the combined presence or absence of particular nucleotides, or, for translated sequences, amino acids at selected sequence positions (e.g., sequence motifs).

[0134] Optimal alignment of sequences for comparison can be conducted, e.g., by the local homology algorithm of Smith & Waterman, Adv. Appl. Math. 2:482 (1981), by the homology alignment algorithm of Needleman & Wunsch, J. Mol. Biol. 48:443 (1970), by the search for similarity method of Pearson & Lipman, Proc. Nat'l. Acad. Sci. USA 85:2444 (1988), by computerized implementations of these algorithms (GAP, BESTFIT, FASTA, and TFASTA in the Wisconsin Genetics Software Package, Genetics Computer Group, 575 Science Dr., Madison, Wis.), or by visual inspection (see generally Ausubel et al., infra).

[0135] One example of an algorithm that is suitable for determining percent sequence identity and sequence similarity is the BLAST algorithm, which is described in Altschul et al., J. Mol. Biol. 215:403-410 (1990). Software for performing BLAST analyses is publicly available through the National Center for Biotechnology Information.

[0136] As used herein the term “non-stop or read-through” is a mutation causing the removal of the natural stop codon.

[0137] As used herein the term “epitope” is the specific portion of an antigen typically bound by an antibody or T cell receptor.

[0138] As used herein the term “immunogenic” is the ability to stimulate an immune response, e.g., via T cells, B cells, or both.

[0139] As used herein the term “HLA binding affinity” “MHC binding affinity” means affinity of binding between a specific antigen and a specific MHC allele.

[0140] As used herein the term “bait” is a nucleic acid probe used to enrich a specific sequence of DNA or RNA from a sample.

[0141] As used herein the term “variant” is a difference between a subject's nucleic acids and the reference human genome used as a control.

[0142] As used herein the term “variant call” is an algorithmic determination of the presence of a variant, typically from sequencing.

[0143] As used herein the term “polymorphism” is a germline variant, i.e., a variant found in all DNA-bearing cells of an individual.

[0144] As used herein the term “somatic variant” is a variant arising in non-germline cells of an individual.

[0145] As used herein the term “allele” is a version of a gene or a version of a genetic sequence or a version of a protein.

[0146] As used herein the term “HLA type” is the complement of HLA gene alleles.

[0147] As used herein the term “nonsense-mediated decay” or “NMD” is a degradation of an mRNA by a cell due to a premature stop codon.

[0148] As used herein the term “truncal mutation” is a mutation originating early in the development of a tumor and present in a substantial portion of the tumor's cells.

[0149] As used herein the term “subclonal mutation” is a mutation originating later in the development of a tumor and present in only a subset of the tumor's cells.

[0150] As used herein the term “exome” is a subset of the genome that codes for proteins. An exome can be the collective exons of a genome.

[0151] As used herein the term “logistic regression” is a regression model for binary data from statistics where the logit of the probability that the dependent variable is equal to one is modeled as a linear function of the dependent variables.

[0152] As used herein the term “neural network” is a machine learning model for classification or regression consisting of multiple layers of linear transformations followed by element-wise nonlinearities typically trained via stochastic gradient descent and back-propagation.

[0153] As used herein the term “proteome” is the set of all proteins expressed and/or translated by a cell, group of cells, or individual.

[0154] As used herein the term “peptidome” is the set of all peptides presented by MHC-I or MHC-II on the cell surface. The peptidome may refer to a property of a cell or a collection of cells (e.g., the tumor peptidome, meaning the union of the peptidomes of all cells that comprise the tumor, or the infectious disease peptidome, meaning the union of the peptidomes of all cells that are infected by the infectious disease).

[0155] As used herein the term “ELISPOT” means Enzyme-linked immunosorbent spot assay—which is a common method for monitoring immune responses in humans and animals.

[0156] As used herein the term “dextramers” is a dextran-based peptide-MHC multimers used for antigen-specific T-cell staining in flow cytometry.

[0157] As used herein the term “tolerance or immune tolerance” is a state of immune non-responsiveness to one or more antigens, e.g. self-antigens.

[0158] As used herein the term “central tolerance” is a tolerance affected in the thymus, either by deleting self-reactive T-cell clones or by promoting self-reactive T-cell clones to differentiate into immunosuppressive regulatory T-cells (Tregs).

[0159] As used herein the term “peripheral tolerance” is a tolerance affected in the periphery by downregulating or anergizing self-reactive T-cells that survive central tolerance or promoting these T cells to differentiate into Tregs.

[0160] The term “sample” can include a single cell or multiple cells or fragments of cells or an aliquot of body fluid, taken from a subject, by means including venipuncture, excretion, ejaculation, massage, biopsy, needle aspirate, lavage sample, scraping, surgical incision, or intervention or other means known in the art.

[0161] The term “subject” encompasses a cell, tissue, or organism, human or non-human, whether in vivo, ex vivo, or in vitro, male or female. The term subject is inclusive of mammals including humans.

[0162] The term “mammal” encompasses both humans and non-humans and includes but is not limited to humans, non-human primates, canines, felines, murines, bovines, equines, and porcines.

[0163] The term “clinical factor” refers to a measure of a condition of a subject, e.g., disease activity or severity. “Clinical factor” encompasses all markers of a subject's health status, including non-sample markers, and/or other characteristics of a subject, such as, without limitation, age and gender. A clinical factor can be a score, a value, or a set of values that can be obtained from evaluation of a sample (or population of samples) from a subject or a subject under a determined condition. A clinical factor can also be predicted by markers and/or other parameters such as gene expression surrogates. Clinical factors can include tumor type, tumor sub-type, infection type, infection sub-type, and smoking history.

[0164] The term “antigen-encoding nucleic acid sequences derived from a tumor” refers to nucleic acid sequences obtained from the tumor, e.g. via RT-PCR; or sequence data obtained by sequencing the tumor and then synthesizing the nucleic acid sequences using the sequencing data, e.g., via various synthetic or PCR-based methods known in the art. Derived sequences can include nucleic acid sequence variants, such as sequence-optimized nucleic acid sequence variants (e.g., codon-optimized and/or otherwise optimized for expression), that encode the same polypeptide sequence as the corresponding native nucleic acid sequence obtained from a tumor.

[0165] The term “antigen-encoding nucleic acid sequences derived from an infection” refers to nucleic acid sequences obtained from infected cells or an infectious disease organism, e.g. via RT-PCR; or sequence data obtained by sequencing the infected cell or infectious disease organism and then synthesizing the nucleic acid sequences using the sequencing data, e.g., via various synthetic or PCR-based methods known in the art. Derived sequences can include nucleic acid sequence variants, such as sequence-optimized nucleic acid sequence variants (e.g., codon-optimized and/or otherwise optimized for expression), that encode the same polypeptide sequence as the corresponding native infectious disease organism nucleic acid sequence. Derived sequences can include nucleic acid sequence variants that encode a modified infectious disease organism polypeptide sequence having one or more (e.g., 1, 2, 3, 4, or 5) mutations relative to a native infectious disease organism polypeptide sequence. For example, a modified polypeptide sequence can have one or more missense mutations relative to the native polypeptide sequence of an infectious disease organism protein.

[0166] The term “alphavirus” refers to members of the family Togaviridae, and are positive-sense single-stranded RNA viruses. Alphaviruses are typically classified as either Old World, such as Sindbis, Ross River, Mayaro, Chikungunya, and Semliki Forest viruses, or New World, such as eastern equine encephalitis, Aura, Fort Morgan, or Venezuelan equine encephalitis and its derivative strain TC-83. Alphaviruses are typically self-replicating RNA viruses.

[0167] The term “alphavirus backbone” refers to minimal sequence(s) of an alphavirus that allow for self-replication of the viral genome. Minimal sequences can include conserved sequences for nonstructural protein-mediated amplification, a nonstructural protein 1 (nsP1) gene, a nsP2 gene, a nsP3 gene, a nsP4 gene, and a polyA sequence, as well as sequences for expression of subgenomic viral RNA including a subgenomic (e.g., a 26S) promoter element.

[0168] The term “sequences for nonstructural protein-mediated amplification” includes alphavirus conserved sequence elements (CSE) well known to those in the art. CSEs include, but are not limited to, an alphavirus 5′ UTR, a 51-nt CSE, a 24-nt CSE, a subgenomic promoter sequence (e.g., a 26S subgenomic promoter sequence), a 19-nt CSE, and an alphavirus 3′ UTR.

[0169] The term “RNA polymerase” includes polymerases that catalyze the production of RNA polynucleotides from a DNA template. RNA polymerases include, but are not limited to, bacteriophage derived polymerases including T3, T7, and SP6.

[0170] The term “lipid” includes hydrophobic and/or amphiphilic molecules. Lipids can be cationic, anionic, or neutral. Lipids can be synthetic or naturally derived, and in some instances biodegradable. Lipids can include cholesterol, phospholipids, lipid conjugates including, but not limited to, polyethyleneglycol (PEG) conjugates (PEGylated lipids), waxes, oils, glycerides, fats, and fat-soluble vitamins Lipids can also include dilinoleylmethyl-4-dimethylaminobutyrate (MC3) and MC3-like molecules.

[0171] The term “lipid nanoparticle” or “LNP” includes vesicle like structures formed using a lipid containing membrane surrounding an aqueous interior, also referred to as liposomes. Lipid nanoparticles includes lipid-based compositions with a solid lipid core stabilized by a surfactant. The core lipids can be fatty acids, acylglycerols, waxes, and mixtures of these surfactants. Biological membrane lipids such as phospholipids, sphingomyelins, bile salts (sodium taurocholate), and sterols (cholesterol) can be utilized as stabilizers. Lipid nanoparticles can be formed using defined ratios of different lipid molecules, including, but not limited to, defined ratios of one or more cationic, anionic, or neutral lipids. Lipid nanoparticles can encapsulate molecules within an outer-membrane shell and subsequently can be contacted with target cells to deliver the encapsulated molecules to the host cell cytosol. Lipid nanoparticles can be modified or functionalized with non-lipid molecules, including on their surface. Lipid nanoparticles can be single-layered (unilamellar) or multi-layered (multilamellar). Lipid nanoparticles can be complexed with nucleic acid. Unilamellar lipid nanoparticles can be complexed with nucleic acid, wherein the nucleic acid is in the aqueous interior. Multilamellar lipid nanoparticles can be complexed with nucleic acid, wherein the nucleic acid is in the aqueous interior, or to form or sandwiched between

[0172] Abbreviations: MHC: major histocompatibility complex; HLA: human leukocyte antigen, or the human MHC gene locus; NGS: next-generation sequencing; PPV: positive predictive value; TSNA: tumor-specific neoantigen; FFPE: formalin-fixed, paraffin-embedded; NMD: nonsense-mediated decay; NSCLC: non-small-cell lung cancer; DC: dendritic cell.

[0173] It should be noted that, as used in the specification and the appended claims, the singular forms “a,” “an,” and “the” include plural referents unless the context clearly dictates otherwise.

[0174] Unless specifically stated or otherwise apparent from context, as used herein the term “about” is understood as within a range of normal tolerance in the art, for example within 2 standard deviations of the mean. About can be understood as within 10%, 9%, 8%, 7%, 6%, 5%, 4%, 3%, 2%, 1%, 0.5%, 0.1%, 0.05%, or 0.01% of the stated value. Unless otherwise clear from context, all numerical values provided herein are modified by the term about.

[0175] Any terms not directly defined herein shall be understood to have the meanings commonly associated with them as understood within the art of the invention. Certain terms are discussed herein to provide additional guidance to the practitioner in describing the compositions, devices, methods and the like of aspects of the invention, and how to make or use them. It will be appreciated that the same thing may be said in more than one way. Consequently, alternative language and synonyms may be used for any one or more of the terms discussed herein. No significance is to be placed upon whether or not a term is elaborated or discussed herein. Some synonyms or substitutable methods, materials and the like are provided. Recital of one or a few synonyms or equivalents does not exclude use of other synonyms or equivalents, unless it is explicitly stated. Use of examples, including examples of terms, is for illustrative purposes only and does not limit the scope and meaning of the aspects of the invention herein.

[0176] All references, issued patents and patent applications cited within the body of the specification are hereby incorporated by reference in their entirety, for all purposes.

### II. Antigen Identification

[0177] Research methods for NGS analysis of tumor and normal exome and transcriptomes have been described and applied in the antigen identification space.^{6,14,15} Certain optimizations for greater sensitivity and specificity for antigen identification in the clinical setting can be considered. These optimizations can be grouped into two areas, those related to laboratory processes and those related to the NGS data analysis. The research methods described can also be applied to identification of antigens in other settings, such as identification of identifying antigens from an infectious disease organism, an infection in a subject, or an infected cell of a subject. Examples of optimizations are known to those skilled in the art, for example the methods described in more detail in U.S. Pat. No. 10,055,540, US Application Pub. No. US20200010849A1, U.S. application Ser. No. 16/606,577, and international patent application publications WO2020181240A1, WO/2018/195357 and WO/2018/208856, each herein incorporated by reference, in their entirety, for all purposes.

[0178] Methods for identifying antigens (e.g., antigens derived from a tumor or an infectious disease organism) include identifying antigens that are likely to be presented on a cell surface (e.g., presented by MHC on a tumor cell, an infected cell, or an immune cell, including professional antigen presenting cells such as dendritic cells), and/or are likely to be immunogenic. As an example, one such method may comprise the steps of: obtaining at least one of exome, transcriptome or whole genome nucleotide sequencing and/or expression data from a tumor, an infected cell, or an infectious disease organism, wherein the nucleotide sequencing data and/or expression data is used to obtain data representing peptide sequences of each of a set of antigens (e.g., antigens derived from a tumor or an infectious disease organism); inputting the peptide sequence of each antigen into one or more presentation models to generate a set of numerical likelihoods that each of the antigens is presented by one or more MHC alleles on a cell surface, such as a tumor cell or an infected cell of the subject, the set of numerical likelihoods having been identified at least based on received mass spectrometry data; and selecting a subset of the set of antigens based on the set of numerical likelihoods to generate a set of selected antigens.

[0179] II.B. Identification of Tumor Specific Mutations in Neoantigens

[0180] Also disclosed herein are methods for the identification of certain mutations (e.g., the variants or alleles that are present in cancer cells). In particular, these mutations can be present in the genome, transcriptome, proteome, or exome of cancer cells of a subject having cancer but not in normal tissue from the subject. Specific methods for identifying neoantigens, including shared neoantigens, that are specific to tumors are known to those skilled in the art, for example the methods described in more detail in U.S. Pat. No. 10,055,540, US Application Pub. No. US20200010849A1, and international patent application publications WO/2018/195357 and WO/2018/208856, each herein incorporated by reference, in their entirety, for all purposes. Examples of shared neoantigens that are specific to tumors are described in more detail in international patent application publication WO2019226941A1, herein incorporated by reference in its entirety, for all purposes. Shared neoantigens include, but are not limited to, KRAS-associated mutations (e.g., KRAS G12C, KRAS G12V, KRAS G12D, and/or KRAS Q61H mutations). For example, KRAS-associated MHC class I neoepitope can include those mutations with reference to wild-type (WT) human KRAS, such as with reference to the following exemplary amino acid sequence:

(SEQ ID NO: 27996)
[sequence omitted]

[0181] Genetic mutations in tumors can be considered useful for the immunological targeting of tumors if they lead to changes in the amino acid sequence of a protein exclusively in the tumor. Useful mutations include: (1) non-synonymous mutations leading to different amino acids in the protein; (2) read-through mutations in which a stop codon is modified or deleted, leading to translation of a longer protein with a novel tumor-specific sequence at the C-terminus; (3) splice site mutations that lead to the inclusion of an intron in the mature mRNA and thus a unique tumor-specific protein sequence; (4) chromosomal rearrangements that give rise to a chimeric protein with tumor-specific sequences at the junction of 2 proteins (i.e., gene fusion); (5) frameshift mutations or deletions that lead to a new open reading frame with a novel tumor-specific protein sequence. Mutations can also include one or more of non-frameshift indel, missense or nonsense substitution, splice site alteration, genomic rearrangement or gene fusion, or any genomic or expression alteration giving rise to a neoORF.

[0182] Peptides with mutations or mutated polypeptides arising from for example, splice-site, frameshift, readthrough, or gene fusion mutations in tumor cells can be identified by sequencing DNA, RNA or protein in tumor versus normal cells.

[0183] Also mutations can include previously identified tumor specific mutations. Known tumor mutations can be found at the Catalogue of Somatic Mutations in Cancer (COSMIC) database.

[0184] A variety of methods are available for detecting the presence of a particular mutation or allele in an individual's DNA or RNA. Advancements in this field have provided accurate, easy, and inexpensive large-scale SNP genotyping. For example, several techniques have been described including dynamic allele-specific hybridization (DASH), microplate array diagonal gel electrophoresis (MADGE), pyrosequencing, oligonucleotide-specific ligation, the TaqMan system as well as various DNA “chip” technologies such as the Affymetrix SNP chips. These methods utilize amplification of a target genetic region, typically by PCR. Still other methods, based on the generation of small signal molecules by invasive cleavage followed by mass spectrometry or immobilized padlock probes and rolling-circle amplification. Several of the methods known in the art for detecting specific mutations are summarized below.

[0185] PCR based detection means can include multiplex amplification of a plurality of markers simultaneously. For example, it is well known in the art to select PCR primers to generate PCR products that do not overlap in size and can be analyzed simultaneously. Alternatively, it is possible to amplify different markers with primers that are differentially labeled and thus can each be differentially detected. Of course, hybridization based detection means allow the differential detection of multiple PCR products in a sample. Other techniques are known in the art to allow multiplex analyses of a plurality of markers.

[0186] Several methods have been developed to facilitate analysis of single nucleotide polymorphisms in genomic DNA or cellular RNA. For example, a single base polymorphism can be detected by using a specialized exonuclease-resistant nucleotide, as disclosed, e.g., in Mundy, C. R. (U.S. Pat. No. 4,656,127). According to the method, a primer complementary to the allelic sequence immediately 3′ to the polymorphic site is permitted to hybridize to a target molecule obtained from a particular animal or human. If the polymorphic site on the target molecule contains a nucleotide that is complementary to the particular exonuclease-resistant nucleotide derivative present, then that derivative will be incorporated onto the end of the hybridized primer. Such incorporation renders the primer resistant to exonuclease, and thereby permits its detection. Since the identity of the exonuclease-resistant derivative of the sample is known, a finding that the primer has become resistant to exonucleases reveals that the nucleotide(s) present in the polymorphic site of the target molecule is complementary to that of the nucleotide derivative used in the reaction. This method has the advantage that it does not require the determination of large amounts of extraneous sequence data.

[0187] A solution-based method can be used for determining the identity of a nucleotide of a polymorphic site. Cohen, D. et al. (French Patent 2,650,840; PCT Appln. No. WO91/02087). As in the Mundy method of U.S. Pat. No. 4,656,127, a primer is employed that is complementary to allelic sequences immediately 3′ to a polymorphic site. The method determines the identity of the nucleotide of that site using labeled dideoxynucleotide derivatives, which, if complementary to the nucleotide of the polymorphic site will become incorporated onto the terminus of the primer.

[0188] An alternative method, known as Genetic Bit Analysis or GBA is described by Goelet, P. et al. (PCT Appln. No. 92/15712). The method of Goelet, P. et al. uses mixtures of labeled terminators and a primer that is complementary to the sequence 3′ to a polymorphic site. The labeled terminator that is incorporated is thus determined by, and complementary to, the nucleotide present in the polymorphic site of the target molecule being evaluated. In contrast to the method of Cohen et al. (French Patent 2,650,840; PCT Appln. No. WO91/02087) the method of Goelet, P. et al. can be a heterogeneous phase assay, in which the primer or the target molecule is immobilized to a solid phase.

[0189] Several primer-guided nucleotide incorporation procedures for assaying polymorphic sites in DNA have been described (Komher, J. S. et al., Nucl. Acids. Res. 17:7779-7784 (1989); Sokolov, B. P., Nucl. Acids Res. 18:3671 (1990); Syvanen, A.-C., et al., Genomics 8:684-692 (1990); Kuppuswamy, M. N. et al., Proc. Natl. Acad. Sci. (U.S.A.) 88:1143-1147 (1991); Prezant, T. R. et al., Hum. Mutat. 1:159-164 (1992); Ugozzoli, L. et al., GATA 9:107-112 (1992); Nyren, P. et al., Anal. Biochem. 208:171-175 (1993)). These methods differ from GBA in that they utilize incorporation of labeled deoxynucleotides to discriminate between bases at a polymorphic site. In such a format, since the signal is proportional to the number of deoxynucleotides incorporated, polymorphisms that occur in runs of the same nucleotide can result in signals that are proportional to the length of the run (Syvanen, A.-C., et al., Amer. J. Hum. Genet. 52:46-59 (1993)).

[0190] A number of initiatives obtain sequence information directly from millions of individual molecules of DNA or RNA in parallel. Real-time single molecule sequencing-by-synthesis technologies rely on the detection of fluorescent nucleotides as they are incorporated into a nascent strand of DNA that is complementary to the template being sequenced. In one method, oligonucleotides 30-50 bases in length are covalently anchored at the 5′ end to glass cover slips. These anchored strands perform two functions. First, they act as capture sites for the target template strands if the templates are configured with capture tails complementary to the surface-bound oligonucleotides. They also act as primers for the template directed primer extension that forms the basis of the sequence reading. The capture primers function as a fixed position site for sequence determination using multiple cycles of synthesis, detection, and chemical cleavage of the dye-linker to remove the dye. Each cycle includes adding the polymerase/labeled nucleotide mixture, rinsing, imaging and cleavage of dye. In an alternative method, polymerase is modified with a fluorescent donor molecule and immobilized on a glass slide, while each nucleotide is color-coded with an acceptor fluorescent moiety attached to a gamma-phosphate. The system detects the interaction between a fluorescently-tagged polymerase and a fluorescently modified nucleotide as the nucleotide becomes incorporated into the de novo chain. Other sequencing-by-synthesis technologies also exist.

[0191] Any suitable sequencing-by-synthesis platform can be used to identify mutations. As described above, four major sequencing-by-synthesis platforms are currently available: the Genome Sequencers from Roche/454 Life Sciences, the 1G Analyzer from Illumina/Solexa, the SOLiD system from Applied BioSystems, and the Heliscope system from Helicos Biosciences. Sequencing-by-synthesis platforms have also been described by Pacific BioSciences and VisiGen Biotechnologies. In some embodiments, a plurality of nucleic acid molecules being sequenced is bound to a support (e.g., solid support). To immobilize the nucleic acid on a support, a capture sequence/universal priming site can be added at the 3′ and/or 5′ end of the template. The nucleic acids can be bound to the support by hybridizing the capture sequence to a complementary sequence covalently attached to the support. The capture sequence (also referred to as a universal capture sequence) is a nucleic acid sequence complementary to a sequence attached to a support that may dually serve as a universal primer.

[0192] As an alternative to a capture sequence, a member of a coupling pair (such as, e.g., antibody/antigen, receptor/ligand, or the avidin-biotin pair as described in, e.g., US Patent Application No. 2006/0252077) can be linked to each fragment to be captured on a surface coated with a respective second member of that coupling pair.

[0193] Subsequent to the capture, the sequence can be analyzed, for example, by single molecule detection/sequencing, e.g., as described in the Examples and in U.S. Pat. No. 7,283,337, including template-dependent sequencing-by-synthesis. In sequencing-by-synthesis, the surface-bound molecule is exposed to a plurality of labeled nucleotide triphosphates in the presence of polymerase. The sequence of the template is determined by the order of labeled nucleotides incorporated into the 3′ end of the growing chain. This can be done in real time or can be done in a step-and-repeat mode. For real-time analysis, different optical labels to each nucleotide can be incorporated and multiple lasers can be utilized for stimulation of incorporated nucleotides.

[0194] Sequencing can also include other massively parallel sequencing or next generation sequencing (NGS) techniques and platforms. Additional examples of massively parallel sequencing techniques and platforms are the Illumina HiSeq or MiSeq, Thermo PGM or Proton, the Pac Bio RS II or Sequel, Qiagen's Gene Reader, and the Oxford Nanopore MinION. Additional similar current massively parallel sequencing technologies can be used, as well as future generations of these technologies.

[0195] Any cell type or tissue can be utilized to obtain nucleic acid samples for use in methods described herein. For example, a DNA or RNA sample can be obtained from a tumor or a bodily fluid, e.g., blood, obtained by known techniques (e.g. venipuncture) or saliva. Alternatively, nucleic acid tests can be performed on dry samples (e.g. hair or skin). In addition, a sample can be obtained for sequencing from a tumor and another sample can be obtained from normal tissue for sequencing where the normal tissue is of the same tissue type as the tumor. A sample can be obtained for sequencing from a tumor and another sample can be obtained from normal tissue for sequencing where the normal tissue is of a distinct tissue type relative to the tumor.

[0196] Tumors can include one or more of lung cancer, melanoma, breast cancer, ovarian cancer, prostate cancer, kidney cancer, gastric cancer, colon cancer, testicular cancer, head and neck cancer, pancreatic cancer, brain cancer, B-cell lymphoma, acute myelogenous leukemia, chronic myelogenous leukemia, chronic lymphocytic leukemia, and T cell lymphocytic leukemia, non-small cell lung cancer, and small cell lung cancer.

[0197] Alternatively, protein mass spectrometry can be used to identify or validate the presence of mutated peptides bound to MHC proteins on tumor cells. Peptides can be acid-eluted from tumor cells or from HLA molecules that are immunoprecipitated from tumor, and then identified using mass spectrometry.

### III. Immune Modulators

[0198] Vectors described herein, such as ChAdV vectors described herein or alphavirus vectors described herein, can comprise a nucleic acid which encodes at least one antigen and the same or a separate vector can comprise a nucleic acid which encodes at least one immune modulator. An immune modulator can include a binding molecule (e.g., an antibody such as an scFv) which binds to and blocks the activity of an immune checkpoint molecule. An immune modulator can include a cytokine, such as IL-2, IL-7, IL-12 (including IL-12 p35, p40, p70, and/or p70-fusion constructs), IL-15, or IL-21. An immune modulator can include a modified cytokine (e.g., pegIL-2). Vectors can comprise an antigen cassette and one or more nucleic acid molecules encoding an immune modulator.

[0199] Illustrative immune checkpoint molecules that can be targeted for blocking or inhibition include, but are not limited to, CTLA-4, 4-1BB (CD137), 4-1BBL (CD137L), PDL1, PDL2, PD1, B7-H3, B7-H4, BTLA, HVEM, TIM3, GAL9, LAG3, TIM3, B7H3, B7H4, VISTA, KIR, 2B4 (belongs to the CD2 family of molecules and is expressed on all NK, γδ, and memory CD8+(4) T cells), CD160 (also referred to as BY55), and CGEN-15049 Immune checkpoint inhibitors include antibodies, or antigen binding fragments thereof, or other binding proteins, that bind to and block or inhibit the activity of one or more of CTLA-4, PDL1, PDL2, PD1, B7-H3, B7-H4, BTLA, HVEM, TIM3, GAL9, LAG3, TIM3, B7H3, B7H4, VISTA, KIR, 2B4, CD160, and CGEN-15049. Illustrative immune checkpoint inhibitors include Tremelimumab (CTLA-4 blocking antibody), anti-OX40, PD-L1 monoclonal Antibody (Anti-B7-H1; MEDI4736), ipilimumab, MK-3475 (PD-1 blocker), Nivolumab (anti-PD1 antibody), CT-011 (anti-PD1 antibody), BY55 monoclonal antibody, AMP224 (anti-PDL1 antibody), BMS-936559 (anti-PDL1 antibody), MPLDL3280A (anti-PDL1 antibody), MSB0010718C (anti-PDL1 antibody) and Yervoy/ipilimumab (anti-CTLA-4 checkpoint inhibitor). Antibody-encoding sequences can be engineered into vectors such as C68 using ordinary skill in the art. An exemplary method is described in Fang et al., Stable antibody expression at therapeutic levels using the 2A peptide. Nat Biotechnol. 2005 May; 23(5):584-90. Epub 2005 Apr. 17; herein incorporated by reference for all purposes.

### IV. Payloads and Antigens

[0200] A payload nucleic acid sequence can be any nucleic acid sequence desired to be delivered to a cell of interest. In general, the payload is a nucleic acid sequence linked to a promoter to drive expression of the nucleic acid sequence. The payload nucleic acid sequence can encode a polypeptide (i.e., a nucleic acid sequence capable of being transcribed and translated into a protein). In general, a payload nucleic acid sequence encoding a peptide can encode any protein desired to be expressed in a cell. Examples of proteins include, but are not limited to, an antigen (e.g., a MHC class I epitope, a MHC class II epitope, or an epitope capable of stimulating a B cell response), an antibody, a cytokine, a chimeric antigen receptor (CAR), a T-cell receptor, or a genome-editing system component (e.g., a nuclease used in a genome-editing system). Genome-editing systems include, but are not limited to, a CRISPR system, a zinc-finger system, a meganuclease system, or a TALEN system. The payload nucleic acid sequence can be non-coding (i.e., a nucleic acid sequence capable of being transcribed but is not translated into a protein). In general, a non-coding payload nucleic acid sequence can be any non-coding polynucleotide desired to be expressed in a cell. Examples of non-coding polynucleotides include, but are not limited to, RNA interference (RNAi) polynucleotides (e.g., antisense oligonucleotides, shRNAs, siRNAs, miRNAs etc.) or genome-editing system polynucleotide (e.g., a guide RNA [gRNA], a single-guide RNA [sgRNA], a trans-activating CRISPR [tracrRNA], and/or a CRISPR RNA [crRNA]). A payload nucleic acid sequence can encode two or more (e.g., 2, 3, 4, 5 or more) distinct polypeptides (e.g., two or more distinct epitope sequences linked together) or contain two or more distinct non-coding nucleic acid sequences (e.g., two or more distinct RNAi polynucleotides). A payload nucleic acid sequence can have a combination of polypeptide-encoding nucleic acid sequences and non-coding nucleic acid sequences.

[0201] A vector can contain between 1 and 30 payload-encoding nucleic acid sequences, 2, 3, 4, 5, 6, 7, 8, 9, 10, 11, 12, 13, 14, 15, 16, 17, 18, 19, 20, 21, 22, 23, 24, 25, 26, 27, 28, 29, 30, 31, 32, 33, 34, 35, 36, 37, 38, 39, 40, 41, 42, 43, 44, 45, 46, 47, 48, 49, 50, 51, 52, 53, 54, 55, 56, 57, 58, 59, 60, 61, 62, 63, 64, 65, 66, 67, 68, 69, 70, 71, 72, 73, 74, 75, 76, 77, 78, 79, 80, 81, 82, 83, 84, 85, 86, 87, 88, 89, 90, 91, 92, 93, 94, 95, 96, 97, 98, 99, 100 or more different payload-encoding nucleic acid sequences, 6, 7, 8, 9, 10 11, 12, 13, or 14 different payload-encoding nucleic acid sequences, or 12, 13 or 14 different payload-encoding nucleic acid sequences. Payload-encoding nucleic acid sequences can refer to the payload encoding portion of a “cassette.” Features of a cassette are described in greater detail herein. A cassette can contain two or more payload-encoding nucleic acid sequences linked together in a cassette (e.g., as an illustrative non-limiting example, concatenated antigen-encoding nucleic acid sequence encoding concatenated T cell epitopes)

[0202] A vector can contain between 1 and 30 distinct payload-encoding nucleic acid sequences, 2, 3, 4, 5, 6, 7, 8, 9, 10, 11, 12, 13, 14, 15, 16, 17, 18, 19, 20, 21, 22, 23, 24, 25, 26, 27, 28, 29, 30, 31, 32, 33, 34, 35, 36, 37, 38, 39, 40, 41, 42, 43, 44, 45, 46, 47, 48, 49, 50, 51, 52, 53, 54, 55, 56, 57, 58, 59, 60, 61, 62, 63, 64, 65, 66, 67, 68, 69, 70, 71, 72, 73, 74, 75, 76, 77, 78, 79, 80, 81, 82, 83, 84, 85, 86, 87, 88, 89, 90, 91, 92, 93, 94, 95, 96, 97, 98, 99, 100 or more distinct payload-encoding nucleic acid sequences, 6, 7, 8, 9, 10 11, 12, 13, or 14 distinct payload-encoding nucleic acid sequences, or 12, 13 or 14 distinct payload-encoding nucleic acid sequences. Payload-encoding nucleic acid sequences can refer to sequences for individual payload sequences, e.g., as an illustrative non-limiting example, each of the concatenated T cell epitopes of two or more payload-encoding nucleic acid sequences linked together in a cassette.

[0203] Antigens can include nucleotides or polypeptides. For example, an antigen can be an RNA sequence that encodes for a polypeptide sequence. Antigens useful in vaccines can therefore include nucleotide sequences or polypeptide sequences. Antigens that can be used for cancer vaccines are described in international patent application publication WO/2019/226941, which is herein incorporated by reference, in its entirety, for all purposes.

[0204] Disclosed herein are isolated peptides that comprise tumor specific mutations identified by the methods disclosed herein, peptides that comprise known tumor specific mutations, and mutant polypeptides or fragments thereof identified by methods disclosed herein. Neoantigen peptides can be described in the context of their coding sequence where a neoantigen includes the nucleotide sequence (e.g., DNA or RNA) that codes for the related polypeptide sequence.

[0205] Also disclosed herein are peptides derived from any polypeptide known to or have been found to have altered expression in a tumor cell or cancerous tissue in comparison to a normal cell or tissue, for example any polypeptide known to or have been found to be aberrantly expressed in a tumor cell or cancerous tissue in comparison to a normal cell or tissue. Suitable polypeptides from which the antigenic peptides can be derived can be found for example in the COSMIC database. COSMIC curates comprehensive information on somatic mutations in human cancer. The peptide contains the tumor specific mutation. Tumor antigens (e.g., shared tumor antigens and tumor neoantigens) can include, but are not limited to, those described in U.S. application Ser. No. 17/058,128, herein incorporated by reference for all purposes. Antigen peptides can be described in the context of their coding sequence where an antigen includes the nucleotide sequence (e.g., DNA or RNA) that codes for the related polypeptide sequence.

[0206] One or more polypeptides encoded by an antigen nucleotide sequence can comprise at least one of: a binding affinity with MHC with an IC50 value of less than 1000 nM, for MHC Class I peptides a length of 8-15, 8, 9, 10, 11, 12, 13, 14, or 15 amino acids, presence of sequence motifs within or near the peptide promoting proteasome cleavage, and presence or sequence motifs promoting TAP transport. For MHC Class II peptides a length 6-30, 6, 7, 8, 9, 10, 11, 12, 13, 14, 15, 16, 17, 18, 19, 20, 21, 22, 23, 24, 25, 26, 27, 28, 29, or 30 amino acids, presence of sequence motifs within or near the peptide promoting cleavage by extracellular or lysosomal proteases (e.g., cathepsins) or HLA-DM catalyzed HLA binding.

[0207] One or more antigens can be presented on the surface of a tumor.

[0208] One or more antigens can be is immunogenic in a subject having a tumor, e.g., capable of eliciting a T cell response or a B cell response in the subject.

[0209] One or more antigens that induce an autoimmune response in a subject can be excluded from consideration in the context of vaccine generation for a subject having a tumor.

[0210] The size of at least one antigenic peptide molecule can comprise, but is not limited to, about 5, about 6, about 7, about 8, about 9, about 10, about 11, about 12, about 13, about 14, about 15, about 16, about 17, about 18, about 19, about 20, about 21, about 22, about 23, about 24, about 25, about 26, about 27, about 28, about 29, about 30, about 31, about 32, about 33, about 34, about 35, about 36, about 37, about 38, about 39, about 40, about 41, about 42, about 43, about 44, about 45, about 46, about 47, about 48, about 49, about 50, about 60, about 70, about 80, about 90, about 100, about 110, about 120 or greater amino molecule residues, and any range derivable therein. In specific embodiments the antigenic peptide molecules are equal to or less than 50 amino acids.

[0211] Antigenic peptides and polypeptides can be: for MHC Class I 15 residues or less in length and usually consist of between about 8 and about 11 residues, particularly 9 or 10 residues; for MHC Class II, 6-30 residues, inclusive.

[0212] Antigenic peptides and polypeptides can be presented on an HLA protein. In some aspects antigenic peptides and polypeptides are presented on an HLA protein with greater affinity than a wild-type peptide. In some aspects, an antigenic peptide or polypeptide can have an IC50 of at least less than 5000 nM, at least less than 1000 nM, at least less than 500 nM, at least less than 250 nM, at least less than 200 nM, at least less than 150 nM, at least less than 100 nM, at least less than 50 nM or less.

[0213] In some aspects, antigenic peptides and polypeptides do not induce an autoimmune response and/or invoke immunological tolerance when administered to a subject.

[0214] Also provided are compositions comprising at least two or more antigenic peptides. In some embodiments the composition contains at least two distinct peptides. At least two distinct peptides can be derived from the same polypeptide. By distinct polypeptides is meant that the peptide vary by length, amino acid sequence, or both. The peptides are derived from any polypeptide known to or have been found to contain a tumor specific mutation or peptides derived from any polypeptide known to or have been found to have altered expression in a tumor cell or cancerous tissue in comparison to a normal cell or tissue, for example any polypeptide known to or have been found to be aberrantly expressed in a tumor cell or cancerous tissue in comparison to a normal cell or tissue. Suitable polypeptides from which the antigenic peptides can be derived can be found for example in the COSMIC database or the AACR Genomics Evidence Neoplasia Information Exchange (GENIE) database. COSMIC curates comprehensive information on somatic mutations in human cancer. AACR GENIE aggregates and links clinical-grade cancer genomic data with clinical outcomes from tens of thousands of cancer patients. The peptide contains the tumor specific mutation. In some aspects the tumor specific mutation is a driver mutation for a particular cancer type.

[0215] Also disclosed herein are peptides derived from any polypeptide associated with an infectious disease organism, an infection in a subject, or an infected cell of a subject. Antigens can be derived from nucleotide sequences or polypeptide sequences of an infectious disease organism. Polypeptide sequences of an infectious disease organism include, but are not limited to, a pathogen-derived peptide, a virus-derived peptide, a bacteria-derived peptide, a fungus-derived peptide, and/or a parasite-derived peptide. Infectious disease organism include, but are not limited to, Severe acute respiratory syndrome-related coronavirus (SARS), severe acute respiratory syndrome coronavirus 2 (SARS-CoV-2), Ebola, HIV, Hepatitis B virus (HBV), influenza, Hepatitis C virus (HCV), Human papillomavirus (HPV), Cytomegalovirus (CMV), Chikungunya virus, Respiratory syncytial virus (RSV), Dengue virus, an orthymyxoviridae family virus, and tuberculosis.

[0216] Disclosed herein are isolated peptides that comprise infectious disease organism specific antigens or epitopes identified by the methods disclosed herein, peptides that comprise known infectious disease organism specific antigens or epitopes, and mutant polypeptides or fragments thereof identified by methods disclosed herein. Antigen peptides can be described in the context of their coding sequence where an antigen includes the nucleotide sequence (e.g., DNA or RNA) that codes for the related polypeptide sequence.

[0217] Vectors and associated compositions described herein can be used to deliver antigens from any organism, including their toxins or other by-products, to prevent and/or treat infection or other adverse reactions associated with the organism or its by-product.

[0218] Antigens that can be incorporated into a vaccine (e.g., encoded in a cassette) include immunogens which are useful to immunize a human or non-human animal against viruses, such as pathogenic viruses which infect human and non-human vertebrates. Antigens may be selected from a variety of viral families Example of desirable viral families against which an immune response would be desirable include, the picornavirus family, which includes the genera rhinoviruses, which are responsible for about 50% of cases of the common cold; the genera enteroviruses, which include polioviruses, coxsackieviruses, echoviruses, and human enteroviruses such as hepatitis A virus; and the genera apthoviruses, which are responsible for foot and mouth diseases, primarily in non-human animals. Within the picornavirus family of viruses, target antigens include the VP1, VP2, VP3, VP4, and VPG. Another viral family includes the calicivirus family, which encompasses the Norwalk group of viruses, which are an important causative agent of epidemic gastroenteritis. Still another viral family desirable for use in targeting antigens for stimulating immune responses in humans and non-human animals is the togavirus family, which includes the genera alphavirus, which include Sindbis viruses, RossRiver virus, and Venezuelan, Eastern & Western Equine encephalitis, and rubivirus, including Rubella virus. The Flaviviridae family includes dengue, yellow fever, Japanese encephalitis, St. Louis encephalitis and tick borne encephalitis viruses. Other target antigens may be generated from the Hepatitis C or the coronavirus family, which includes a number of non-human viruses such as infectious bronchitis virus (poultry), porcine transmissible gastroenteric virus (pig), porcine hemagglutinating encephalomyelitis virus (pig), feline infectious peritonitis virus (cats), feline enteric coronavirus (cat), canine coronavirus (dog), and human respiratory coronaviruses, which may cause the common cold and/or non-A, B or C hepatitis. Within the coronavirus family, target antigens include the E1 (also called M or matrix protein), E2 (also called S or Spike protein), E3 (also called HE or hemagglutin-elterose) glycoprotein (not present in all coronaviruses), or N (nucleocapsid). Still other antigens may be targeted against the rhabdovirus family, which includes the genera vesiculovirus (e.g., Vesicular Stomatitis Virus), and the general lyssavirus (e.g., rabies). Within the rhabdovirus family, suitable antigens may be derived from the G protein or the N protein. The family filoviridae, which includes hemorrhagic fever viruses such as Marburg and Ebola virus, may be a suitable source of antigens. The paramyxovirus family includes parainfluenza Virus Type 1, parainfluenza Virus Type 3, bovine parainfluenza Virus Type 3, rubulavirus (mumps virus), parainfluenza Virus Type 2, parainfluenza virus Type 4, Newcastle disease virus (chickens), rinderpest, morbillivirus, which includes measles and canine distemper, and pneumovirus, which includes respiratory syncytial virus (e.g., the glyco-(G) protein and the fusion (F) protein, for which sequences are available from GenBank). Influenza virus is classified within the family orthomyxovirus and can be suitable source of antigens (e.g., the HA protein, the N1 protein). The bunyavirus family includes the genera bunyavirus (California encephalitis, La Crosse), phlebovirus (Rift Valley Fever), hantavirus (puremala is a hemahagin fever virus), nairovirus (Nairobi sheep disease) and various unassigned bungaviruses. The arenavirus family provides a source of antigens against LCM and Lassa fever virus. The reovirus family includes the genera reovirus, rotavirus (which causes acute gastroenteritis in children), orbiviruses, and cultivirus (Colorado Tick fever, Lebombo (humans), equine encephalosis, blue tongue). The retrovirus family includes the sub-family oncorivirinal which encompasses such human and veterinary diseases as feline leukemia virus, HTLVI and HTLVII, lentivirinal (which includes human immunodeficiency virus (HIV), simian immunodeficiency virus (SIV), feline immunodeficiency virus (FIV), equine infectious anemia virus, and spumavirinal). Among the lentiviruses, many suitable antigens have been described and can readily be selected. Examples of suitable HIV and SIV antigens include, without limitation the gag, pol, Vif, Vpx, VPR, Env, Tat, Nef, and Rev proteins, as well as various fragments thereof. For example, suitable fragments of the Env protein may include any of its subunits such as the gp120, gp160, gp41, or smaller fragments thereof, e.g., of at least about 8 amino acids in length. Similarly, fragments of the tat protein may be selected. [See, U.S. Pat. Nos. 5,891,994 and 6,193,981.] See, also, the HIV and SIV proteins described in D. H. Barouch et al, J. Virol., 75(5):2462-2467 (March 2001), and R. R Amara, et al, Science, 292:69-74 (6 Apr. 2001). In another example, the HIV and/or SIV immunogenic proteins or peptides may be used to form fusion proteins or other immunogenic molecules. See, e.g., the HIV-1 Tat and/or Nef fusion proteins and immunization regimens described in WO 01/54719, published Aug. 2, 2001, and WO 99/16884, published Apr. 8, 1999. The invention is not limited to the HIV and/or SIV immunogenic proteins or peptides described herein. In addition, a variety of modifications to these proteins have been described or could readily be made by one of skill in the art. See, e.g., the modified gag protein that is described in U.S. Pat. No. 5,972,596. Further, any desired HIV and/or SIV immunogens may be delivered alone or in combination. Such combinations may include expression from a single vector or from multiple vectors. The papovavirus family includes the sub-family polyomaviruses (BKU and JCU viruses) and the sub-family papillomavirus (associated with cancers or malignant progression of papilloma). The adenovirus family includes viruses (EX, AD7, ARD, O.B.) which cause respiratory disease and/or enteritis. The parvovirus family feline parvovirus (feline enteritis), feline panleucopeniavirus, canine parvovirus, and porcine parvovirus. The herpesvirus family includes the sub-family alphaherpesvirinae, which encompasses the genera simplexvirus (HSVI, HSVII), varicellovirus (pseudorabies, varicella zoster) and the sub-family betaherpesvirinae, which includes the genera cytomegalovirus (Human CMV), muromegalovirus) and the sub-family gammaherpesvirinae, which includes the genera lymphocryptovirus, EBV (Burkitts lymphoma), infectious rhinotracheitis, Marek's disease virus, and rhadinovirus. The poxvirus family includes the sub-family chordopoxyirinae, which encompasses the genera orthopoxvirus (Variola (Smallpox) and Vaccinia (Cowpox)), parapoxvirus, avipoxvirus, capripoxvirus, leporipoxvirus, suipoxvirus, and the sub-family entomopoxyirinae. The hepadnavirus family includes the Hepatitis B virus. One unclassified virus which may be suitable source of antigens is the Hepatitis delta virus. Still other viral sources may include avian infectious bursal disease virus and porcine respiratory and reproductive syndrome virus. The alphavirus family includes equine arteritis virus and various Encephalitis viruses.

[0219] Antigens that can be incorporated into a vaccine (e.g., encoded in a cassette) also include immunogens which are useful to immunize a human or non-human animal against pathogens including bacteria, fungi, parasitic microorganisms or multicellular parasites which infect human and non-human vertebrates. Examples of bacterial pathogens include pathogenic gram-positive cocci include pneumococci; staphylococci; and streptococci. Pathogenic gram-negative cocci include meningococcus; gonococcus. Pathogenic enteric gram-negative bacilli include enterobacteriaceae; Pseudomonas, acinetobacteria and Eikenella; melioidosis; Salmonella; Shigella; haemophilus (Haemophilus influenzae, Haemophilus somnus); moraxella; H. ducreyi (which causes chancroid); brucella; Franisella tularensis (which causes tularemia); yersinia (pasteurella); streptobacillus moniliformis and spirillum. Gram-positive bacilli include Listeria monocytogenes; erysipelothrix rhusiopathiae; Corynebacterium diphtheria (diphtheria); cholera; B. anthracis (anthrax); donovanosis (granuloma inguinale); and bartonellosis. Diseases caused by pathogenic anaerobic bacteria include tetanus; botulism; other clostridia; tuberculosis; leprosy; and other mycobacteria. Examples of specific bacterium species are, without limitation, Streptococcus pneumoniae, Streptococcus pyogenes, Streptococcus agalactiae, Streptococcus faecalis, Moraxella catarrhalis, Helicobacter pylori, Neisseria meningitidis, Neisseria gonorrhoeae, Chlamydia trachomatis, Chlamydia pneumoniae, Chlamydia psittaci, Bordetella pertussis, Salmonella typhi, Salmonella typhimurium, Salmonella choleraesuis, Escherichia coli, Shigella, Vibrio cholerae, Corynebacterium diphtheriae, Mycobacterium tuberculosis, Mycobacterium avium, Mycobacterium intracellulare complex, Proteus mirabilis, Proteus vulgaris, Staphylococcus aureus, Clostridium tetani, Leptospira interrogans, Borrelia burgdorferi, Pasteurella haemolytica, Pasteurella multocida, Actinobacillus pleuropneumoniae and Mycoplasma gallisepticum. Pathogenic spirochetal diseases include syphilis; treponematoses: yaws, pinta and endemic syphilis; and leptospirosis. Other infections caused by higher pathogen bacteria and pathogenic fungi include actinomycosis; nocardiosis; cryptococcosis (Cryptococcus), blastomycosis (Blastomyces), histoplasmosis (Histoplasma) and coccidioidomycosis (Coccidiodes); candidiasis (Candida), aspergillosis (Aspergillis), and mucormycosis; sporotrichosis; paracoccidiodomycosis, petriellidiosis, torulopsosis, mycetoma and chromomycosis; and dermatophytosis. Rickettsial infections include Typhus fever, Rocky Mountain spotted fever, Q fever, and Rickettsialpox. Examples of mycoplasma and chlamydial infections include: Mycoplasma pneumoniae; lymphogranuloma venereum; psittacosis; and perinatal chlamydial infections. Pathogenic eukaryotes encompass pathogenic protozoans and helminths and infections produced thereby include: amebiasis; malaria; leishmaniasis (e.g., caused by Leishmania major); trypanosomiasis; toxoplasmosis (e.g., caused by Toxoplasma gondii); Pneumocystis carinii; Trichans; Toxoplasma gondii; babesiosis; giardiasis (e.g., caused by Giardia); trichinosis (e.g., caused by Trichomonas); filariasis; schistosomiasis (e.g., caused by Schistosoma); nematodes; trematodes or flukes; and cestode (tapeworm) infections. Other parasitic infections may be caused by Ascaris, Trichuris, Cryptosporidium, and Pneumocystis carinii, among others.

[0220] Also disclosed herein are peptides derived from any polypeptide associated with an infectious disease organism, an infection in a subject, or an infected cell of a subject. Antigens can be derived from nucleic acid sequences or polypeptide sequences of an infectious disease organism. Polypeptide sequences of an infectious disease organism include, but are not limited to, a pathogen-derived peptide, a virus-derived peptide, a bacteria-derived peptide, a fungus-derived peptide, and/or a parasite-derived peptide. Infectious disease organism include, but are not limited to, Severe acute respiratory syndrome-related coronavirus (SARS), severe acute respiratory syndrome coronavirus 2 (SARS-CoV-2), Ebola, HIV, Hepatitis B virus (HBV), influenza, Hepatitis C virus (HCV), Human papillomavirus (HPV), Cytomegalovirus (CMV), Chikungunya virus, Respiratory syncytial virus (RSV), Dengue virus, an orthymyxoviridae family virus, and tuberculosis.

[0221] Antigens can be selected that are predicted to be presented on the cell surface of a cell, such as a tumor cell, an infected cell, or an immune cell, including professional antigen presenting cells such as dendritic cells. Antigens can be selected that are predicted to be immunogenic.

[0222] One or more polypeptides encoded by an antigen nucleotide sequence can comprise at least one of: a binding affinity with MHC with an IC50 value of less than 1000 nM, for MHC Class I peptides a length of 8-15, 8, 9, 10, 11, 12, 13, 14, or 15 amino acids, presence of sequence motifs within or near the peptide promoting proteasome cleavage, and presence or sequence motifs promoting TAP transport. For MHC Class II peptides a length 6-30, 6, 7, 8, 9, 10, 11, 12, 13, 14, 15, 16, 17, 18, 19, 20, 21, 22, 23, 24, 25, 26, 27, 28, 29, or 30 amino acids, presence of sequence motifs within or near the peptide promoting cleavage by extracellular or lysosomal proteases (e.g., cathepsins) or HLA-DM catalyzed HLA binding.

[0223] One or more antigens can be presented on the surface of a tumor. One or more antigens can be presented on the surface of an infected cell.

[0224] One or more antigens can be immunogenic in a subject having a tumor, e.g., capable of stimulating a T cell response and/or a B cell response in the subject. One or more antigens can be immunogenic in a subject having or suspected to have an infection, e.g., capable of stimulating a T cell response and/or a B cell response in the subject. One or more antigens can be immunogenic in a subject at risk of an infection, e.g., capable of stimulating a T cell response and/or a B cell response in the subject that provides immunological protection (i.e., immunity) against the infection, e.g., such as stimulating the production of memory T cells, memory B cells, or antibodies specific to the infection.

[0225] One or more antigens can be capable of stimulating a B cell response, such as the production of antibodies that recognize the one or more antigens (e.g., antibodies that recognize a tumor or an infectious disease antigen). Antibodies can recognize linear polypeptide sequences or recognize secondary and tertiary structures. Accordingly, B cell antigens can include linear polypeptide sequences or polypeptides having secondary and tertiary structures, including, but not limited to, full-length proteins, protein subunits, protein domains, or any polypeptide sequence known or predicted to have secondary and tertiary structures. Antigens capable of stimulating a B cell response to a tumor or an infectious disease antigen can be an antigen found on the surface of tumor cell or an infectious disease organism, respectively. Antigens capable of eliciting a B cell response to a tumor or an infectious disease antigen can be an intracellular neoantigen expressed in a tumor or an infectious disease organism, respectively.

[0226] One or more antigens can include a combination of antigens capable of stimulating a T cell response (e.g., peptides including predicted T cell epitope sequences) and distinct antigens capable of stimulating a B cell response (e.g., full-length proteins, protein subunits, protein domains).

[0227] One or more antigens that stimulate an autoimmune response in a subject can be excluded from consideration in the context of vaccine generation for a subject.

[0228] The size of at least one antigenic peptide molecule (e.g., an epitope sequence) can comprise, but is not limited to, about 5, about 6, about 7, about 8, about 9, about 10, about 11, about 12, about 13, about 14, about 15, about 16, about 17, about 18, about 19, about 20, about 21, about 22, about 23, about 24, about 25, about 26, about 27, about 28, about 29, about 30, about 31, about 32, about 33, about 34, about 35, about 36, about 37, about 38, about 39, about 40, about 41, about 42, about 43, about 44, about 45, about 46, about 47, about 48, about 49, about 50, about 60, about 70, about 80, about 90, about 100, about 110, about 120 or greater amino molecule residues, and any range derivable therein. In specific embodiments the antigenic peptide molecules are equal to or less than 50 amino acids.

[0229] Antigenic peptides and polypeptides can be: for MHC Class I 15 residues or less in length and usually include between about 8 and about 11 residues, particularly 9 or 10 residues; for MHC Class II, 6-30 residues, inclusive.

[0230] If desirable, a longer peptide can be designed in several ways. In one case, when presentation likelihoods of peptides on HLA alleles are predicted or known, a longer peptide could include either: (1) individual presented peptides with an extensions of 2-5 amino acids toward the N- and C-terminus of each corresponding gene product; (2) a concatenation of some or all of the presented peptides with extended sequences for each. In another case, when sequencing reveals a long (>10 residues) neoepitope sequence present in the tumor (e.g. due to a frameshift, read-through or intron inclusion that leads to a novel peptide sequence), a longer peptide would include: (3) the entire stretch of novel tumor-specific or infectious disease-specific amino acids—thus bypassing the need for computational or in vitro test-based selection of the strongest HLA-presented shorter peptide. In both cases, use of a longer peptide allows endogenous processing by patient cells and may lead to more effective antigen presentation and stimulation of T cell responses. Longer peptides can also include a full-length protein, a protein subunit, a protein domain, and combinations thereof of a peptide, such as those expressed in a tumor or an infectious disease organism, respectively. Longer peptides (e.g., full-length protein, protein subunit, or protein domain) and combinations thereof can be included to stimulate a B cell response.

[0231] Antigenic peptides and polypeptides can be presented on an HLA protein. In some aspects antigenic peptides and polypeptides are presented on an HLA protein with greater affinity than a wild-type peptide. In some aspects, an antigenic peptide or polypeptide can have an IC50 of at least less than 5000 nM, at least less than 1000 nM, at least less than 500 nM, at least less than 250 nM, at least less than 200 nM, at least less than 150 nM, at least less than 100 nM, at least less than 50 nM or less.

[0232] In some aspects, antigenic peptides and polypeptides do not induce an autoimmune response and/or invoke immunological tolerance when administered to a subject.

[0233] Also provided are compositions comprising at least two or more antigenic peptides. In some embodiments the composition contains at least two distinct peptides. At least two distinct peptides can be derived from the same polypeptide. By distinct polypeptides is meant that the peptide vary by length, amino acid sequence, or both. A peptide can include a tumor-specific mutation. Tumor-specific peptides can be derived from any polypeptide known to or have been found to contain a tumor specific mutation or peptides derived from any polypeptide known to or have been found to have altered expression in a tumor cell or cancerous tissue in comparison to a normal cell or tissue, for example any polypeptide known to or have been found to be aberrantly expressed in a tumor cell or cancerous tissue in comparison to a normal cell or tissue. The peptides can be derived from any polypeptide known to or suspected to be associated with an infectious disease organism, or peptides derived from any polypeptide known to or have been found to have altered expression in an infected cell in comparison to a normal cell or tissue (e.g., an infectious disease polynucleotide or polypeptide, including infectious disease polynucleotides or polypeptides with expression restricted to a host cell). Suitable polypeptides from which the antigenic peptides can be derived can be found for example in the COSMIC database or the AACR Genomics Evidence Neoplasia Information Exchange (GENIE) database. COSMIC curates comprehensive information on somatic mutations in human cancer. AACR GENIE aggregates and links clinical-grade cancer genomic data with clinical outcomes from tens of thousands of cancer patients. In some aspects the tumor specific mutation is a driver mutation for a particular cancer type.

[0234] Antigenic peptides and polypeptides having a desired activity or property can be modified to provide certain desired attributes, e.g., improved pharmacological characteristics, while increasing or at least retaining substantially all of the biological activity of the unmodified peptide to bind the desired MHC molecule and activate the appropriate T cell. For instance, antigenic peptide and polypeptides can be subject to various changes, such as substitutions, either conservative or non-conservative, where such changes might provide for certain advantages in their use, such as improved MHC binding, stability or presentation. By conservative substitutions is meant replacing an amino acid residue with another which is biologically and/or chemically similar, e.g., one hydrophobic residue for another, or one polar residue for another. The substitutions include combinations such as Gly, Ala; Val, Ile, Leu, Met; Asp, Glu; Asn, Gln; Ser, Thr; Lys, Arg; and Phe, Tyr. The effect of single amino acid substitutions may also be probed using D-amino acids. Such modifications can be made using well known peptide synthesis procedures, as described in e.g., Merrifield, Science 232:341-347 (1986), Barany & Merrifield, The Peptides, Gross & Meienhofer, eds. (N.Y., Academic Press), pp. 1-284 (1979); and Stewart & Young, Solid Phase Peptide Synthesis, (Rockford, Ill., Pierce), 2d Ed. (1984).

[0235] Modifications of peptides and polypeptides with various amino acid mimetics or unnatural amino acids can be particularly useful in increasing the stability of the peptide and polypeptide in vivo. Stability can be assayed in a number of ways. For instance, peptidases and various biological media, such as human plasma and serum, have been used to test stability. See, e.g., Verhoef et al., Eur. J. Drug Metab Pharmacokin. 11:291-302 (1986). Half-life of the peptides can be conveniently determined using a 25% human serum (v/v) assay. The protocol is generally as follows. Pooled human serum (Type AB, non-heat inactivated) is delipidated by centrifugation before use. The serum is then diluted to 25% with RPMI tissue culture media and used to test peptide stability. At predetermined time intervals a small amount of reaction solution is removed and added to either 6% aqueous trichloracetic acid or ethanol. The cloudy reaction sample is cooled (4 degrees C.) for 15 minutes and then spun to pellet the precipitated serum proteins. The presence of the peptides is then determined by reversed-phase HPLC using stability-specific chromatography conditions.

[0236] The peptides and polypeptides can be modified to provide desired attributes other than improved serum half-life. For instance, the ability of the peptides to stimulate CTL activity can be enhanced by linkage to a sequence which contains at least one epitope that is capable of stimulating a T helper cell response Immunogenic peptides/T helper conjugates can be linked by a spacer molecule. The spacer is typically comprised of relatively small, neutral molecules, such as amino acids or amino acid mimetics, which are substantially uncharged under physiological conditions. The spacers are typically selected from, e.g., Ala, Gly, or other neutral spacers of nonpolar amino acids or neutral polar amino acids. It will be understood that the optionally present spacer need not be comprised of the same residues and thus can be a hetero- or homo-oligomer. When present, the spacer will usually be at least one or two residues, more usually three to six residues. Alternatively, the peptide can be linked to the T helper peptide without a spacer.

[0237] An antigenic peptide can be linked to the T helper peptide either directly or via a spacer either at the amino or carboxy terminus of the peptide. The amino terminus of either the antigenic peptide or the T helper peptide can be acylated. Exemplary T helper peptides include tetanus toxoid 830-843, influenza 307-319, malaria circumsporozoite 382-398 and 378-389.

[0238] Proteins or peptides can be made by any technique known to those of skill in the art, including the expression of proteins, polypeptides or peptides through standard molecular biological techniques, the isolation of proteins or peptides from natural sources, or the chemical synthesis of proteins or peptides. The nucleotide and protein, polypeptide and peptide sequences corresponding to various genes have been previously disclosed, and can be found at computerized databases known to those of ordinary skill in the art. One such database is the National Center for Biotechnology Information's Genbank and GenPept databases located at the National Institutes of Health website. The coding regions for known genes can be amplified and/or expressed using the techniques disclosed herein or as would be known to those of ordinary skill in the art. Alternatively, various commercial preparations of proteins, polypeptides and peptides are known to those of skill in the art.

[0239] In a further aspect an antigen includes a nucleic acid (e.g. polynucleotide) that encodes an antigenic peptide or portion thereof. The polynucleotide can be, e.g., DNA, cDNA, PNA, CNA, RNA (e.g., mRNA), either single- and/or double-stranded, or native or stabilized forms of polynucleotides, such as, e.g., polynucleotides with a phosphorothioate backbone, or combinations thereof and it may or may not contain introns. A polynucleotide sequence encoding an antigen can be sequence-optimized to improve expression, such as through improving transcription, translation, post-transcriptional processing, and/or RNA stability. For example, polynucleotide sequence encoding an antigen can be codon-optimized. “Codon-optimization” herein refers to replacing infrequently used codons, with respect to codon bias of a given organism, with frequently used synonymous codons. Polynucleotide sequences can be optimized to improve post-transcriptional processing, for example optimized to reduce unintended splicing, such as through removal of splicing motifs (e.g., canonical and/or cryptic/non-canonical splice donor, branch, and/or acceptor sequences) and/or introduction of exogenous splicing motifs (e.g., splice donor, branch, and/or acceptor sequences) to bias favored splicing events. Exogenous intron sequences include, but are not limited to, those derived from SV40 (e.g., an SV40 mini-intron) and derived from immunoglobulins (e.g., human (3-globin gene). Exogenous intron sequences can be incorporated between a promoter/enhancer sequence and the antigen(s) sequence. Exogenous intron sequences for use in expression vectors are described in more detail in Callendret et al. (Virology. 2007 Jul. 5; 363(2): 288-302), herein incorporated by reference for all purposes. Polynucleotide sequences can be optimized to improve transcript stability, for example through removal of RNA instability motifs (e.g., AU-rich elements and 3′ UTR motifs) and/or repetitive nucleotide sequences. Polynucleotide sequences can be optimized to improve accurate transcription, for example through removal of cryptic transcriptional initiators and/or terminators. Polynucleotide sequences can be optimized to improve translation and translational accuracy, for example through removal of cryptic AUG start codons, premature polyA sequences, and/or secondary structure motifs. Polynucleotide sequences can be optimized to improve nuclear export of transcripts, such as through addition of a Constitutive Transport Element (CTE), RNA Transport Element (RTE), or Woodchuck Posttranscriptional Regulatory Element (WPRE). Nuclear export signals for use in expression vectors are described in more detail in Callendret et al. (Virology. 2007 Jul. 5; 363(2): 288-302), herein incorporated by reference for all purposes. Polynucleotide sequences can be optimized with respect to GC content, for example to reflect the average GC content of a given organism. Sequence optimization can balance one or more sequence properties, such as transcription, translation, post-transcriptional processing, and/or RNA stability. Sequence optimization can generate an optimal sequence balancing each of transcription, translation, post-transcriptional processing, and RNA stability. Sequence optimization algorithms are known to those of skill in the art, such as GeneArt (Thermo Fisher), Codon Optimization Tool (IDT), Cool Tool (University of Singapore), SGI-DNA (La Jolla California). One or more regions of an antigen-encoding protein can be sequence-optimized separately.

[0240] A still further aspect provides an expression vector capable of expressing a polypeptide or portion thereof. Expression vectors for different cell types are well known in the art and can be selected without undue experimentation. Generally, DNA is inserted into an expression vector, such as a plasmid, in proper orientation and correct reading frame for expression. If necessary, DNA can be linked to the appropriate transcriptional and translational regulatory control nucleotide sequences recognized by the desired host, although such controls are generally available in the expression vector. The vector is then introduced into the host through standard techniques. Guidance can be found e.g. in Sambrook et al. (1989) Molecular Cloning, A Laboratory Manual, Cold Spring Harbor Laboratory, Cold Spring Harbor, N.Y.

[0241] IV.A. Cassette

[0242] The methods employed for the selection of one or more payloads, the cloning and construction of a “cassette” and its insertion into a viral vector are within the skill in the art given the teachings provided herein. By “payload cassette” or “cassette” or “antigen cassette” is meant the combination of a selected payload or plurality of payloads (e.g., payload-encoding nucleic acid sequences, such as antigen-encoding nucleic acid sequences) and the other regulatory elements necessary to transcribe the payload(s) and express the transcribed product. The selected payload or plurality of payloads can refer to distinct payload sequences, e.g., a payload-encoding nucleic acid sequence in the cassette can encode a payload-encoding nucleic acid sequence (or plurality of payload-encoding nucleic acid sequences) such that the payloads are transcribed and expressed. A payload or plurality of payloads can be operatively linked to regulatory components in a manner which permits transcription. Such components include conventional regulatory elements that can drive expression of the payload(s) in a cell transfected with the viral vector. Thus the payload cassette can also contain a selected promoter which is linked to the payload(s) and located, with other, optional regulatory elements, within the selected viral sequences of the recombinant vector. A cassette can include one or more payloads, such as one or more sequences encoding any of the payloads described herein. A cassette can have one or more payload-encoding nucleic acid sequences, such as a cassette containing multiple payload-encoding nucleic acid sequences each independently operably linked to separate promoters and/or linked together using other multicistonic systems, such as 2A ribosome skipping sequence elements (e.g., E2A, P2A, F2A, or T2A sequences) or Internal Ribosome Entry Site (IRES) sequence elements. A linker can also have a cleavage site, such as a TEV or furin cleavage site. Linkers with cleavage sites can be used in combination with other elements, such as those in a multicistronic system. In a non-limiting illustrative example, a furin protease cleavage site can be used in conjunction with a 2A ribosome skipping sequence element such that the furin protease cleavage site is configured to facilitate removal of the 2A sequence following translation.

[0243] In a cassette containing more than one payload-encoding nucleic acid sequences, each payload-encoding nucleic acid sequence can be concatenated (e.g., in an illustrative non-limiting example, concatenated payload-encoding nucleic acid sequences encoding concatenated T cell epitopes). In illustrative examples of multicistronic formats, cassettes encoding payloads are configured as follows: (1) endogenous 26S promoter-payload 1-T2A-payload 2 protein, or (2) endogenous 26S promoter-payload 1-26S promoter-payload 2. In further illustrative examples of multicistronic formats, cassettes encoding SARS-CoV-2 payloads are configured as follows: (1) endogenous 26S promoter-Spike protein-T2A-Membrane protein, or (2) endogenous 26S promoter-Spike protein-26S promoter-concatenated T cell epitopes.

[0244] In addition to the subgenomic alphavirus-derived promoter described herein, additional promoter or promoter elements can be employed. Useful promoters can be constitutive promoters or regulated (inducible) promoters, which will enable control of the amount of payload(s) to be expressed. For example, a desirable promoter is that of the cytomegalovirus immediate early promoter/enhancer [see, e.g., Boshart et al, Cell, 41:521-530 (1985)]. Another desirable promoter includes the Rous sarcoma virus LTR promoter/enhancer. Still another promoter/enhancer sequence is the chicken cytoplasmic beta-actin promoter [T. A. Kost et al, Nucl. Acids Res., 11(23):8287 (1983)]. Other suitable or desirable promoters can be selected by one of skill in the art.

[0245] A cassette can also include nucleic acid sequences heterologous to the viral vector sequences including sequences providing signals for efficient polyadenylation of the transcript (poly(A), poly-A or pA) and introns with functional splice donor and acceptor sites. A common poly-A sequence which is employed in the exemplary vectors of this invention is that derived from the papovavirus SV-40. A poly-A sequence (e.g., a non-native poly-A) generally can be inserted in the cassette following the payload-based sequences and before the viral vector sequences. A common intron sequence can also be derived from SV-40, and is referred to as the SV-40 T intron sequence. An cassette can also contain such an intron, located between the promoter/enhancer sequence and the payload(s). Selection of these and other common vector elements are conventional [see, e.g., Sambrook et al, “Molecular Cloning. A Laboratory Manual.”, 2d edit, Cold Spring Harbor Laboratory, New York (1989) and references cited therein] and many such sequences are available from commercial and industrial sources as well as from Genbank.

[0246] A cassette can have one or more payloads (e.g., one or more payload-encoding nucleic acid sequences). For example, a given cassette can include 1-10, 1-20, 1-30, 10-20, 15-25, 15-20, 1, 2, 3, 4, 5, 6, 7, 8, 9, 10, 11, 12, 13, 14, 15, 16, 17, 18, 19, 20, or more payloads. Payloads can be linked directly to one another. Payloads can also be linked to one another with linkers. Payloads can be in any orientation relative to one another including N to C or C to N.

[0247] As described elsewhere herein, a cassette can be located in the site of any selected deletion in a viral vector, such as the deleted structural proteins of a VEE backbone or the site of the E1 gene region deletion or E3 gene region deletion of a ChAd-based vector, among others which may be selected.

[0248] The multicistronic SAM vectors can be described using the following formula to describe the ordered sequence of each element, from 5′ to 3′:
[0249] P1-(L⁵b-Nc-L³d)X-P2-(L⁵b-Nc-L³d)X-Pa-(L⁵b-Nc-L³d)X-(G5e-UDY-G3g wherein P1 comprises the SGP1 subgenomic promoter, P2 comprises the SGP2 subgenomic promoter where for Pa a=0 or 1 for additional cassettes, N comprises a payload-encoding nucleic acid sequences, where c=1, L⁵ comprises the 5′ linker sequence, where b=0 or 1, L³ comprises the 3′ linker sequence, where d=0 or 1, G5 comprises one of the at least one nucleic acid sequences encoding a GPGPG amino acid linker (SEQ ID NO: 56), where e=0 or 1, G3 comprises one of the at least one nucleic acid sequences encoding a GPGPG amino acid linker (SEQ ID NO: 56), where g=0 or 1, U comprises one of the at least one MHC class II epitope-encoding nucleic acid sequence, where f=1, X=1 to 400, where for each X the corresponding Nc is a corresponding payload-encoding nucleic acid sequence, and Y=0, 1, or 2, where for each Y the corresponding Uf is a universal MHC class II epitope-encoding nucleic acid sequence, optionally wherein the at least one universal sequence comprises at least one of Tetanus toxoid and PADRE.

[0250] A payload encoding sequence (e.g., cassette or one or more of the nucleic acid sequences encoding a payload in the cassette) can be described using the following formula to describe the ordered sequence of each element, from 5′ to 3′:

Pₐ-(L5_{b}-N_{c}-L3_{d})_{X}-(G5^{e}-U^{f})^{Y}-G3_{g}

wherein P comprises the second promoter nucleotide sequence, where a=0 or 1, where c=1, N comprises one of the payload-derived nucleic acid sequences described herein (e.g., any of the antigen-encoding nucleic acid sequences described herein), L5 comprises the 5′ linker sequence, where b=0 or 1, L3 comprises the 3′ linker sequence, where d=0 or 1, G5 comprises one of the at least one nucleic acid sequences encoding a GPGPG amino acid linker (SEQ ID NO: 56), where e=0 or 1, G3 comprises one of the at least one nucleic acid sequences encoding a GPGPG amino acid linker (SEQ ID NO: 56), where g=0 or 1, U comprises one of the at least one MHC class II epitope-encoding nucleic acid sequence, where f=1, X=1 to 400, where for each X the corresponding N_{c} is a payload-encoding nucleic acid sequence, and Y=0, 1, or 2, where for each Y the corresponding U_{f} is a (1) universal MHC class II epitope-encoding nucleic acid sequence, optionally wherein the at least one universal sequence comprises at least one of Tetanus toxoid and PADRE, or (2) a MHC class II epitope-encoding nucleic acid sequence. In some aspects, for each X the corresponding N_{c} is a distinct payload-encoding nucleic nucleic acid sequence. In some aspects, for each Y the corresponding U_{f} is a distinct universal MHC class II epitope-encoding nucleic acid sequence or a distinct MHC class II antigen-encoding nucleic nucleic acid sequence. The above payload encoding sequence formula in some instances only describes the portion of an cassette encoding concatenated payload sequences, such as concatenated T cell epitopes. For example, as an illustrative non-limiting example, in cassettes encoding concatenated T cell epitopes and one or more full-length SARS-CoV-2 proteins, the above payload encoding sequence formula describes the concatenated T cell epitopes and separately the cassette encodes one or more full-length SARS-CoV-2 proteins that are linked optionally using a multicistonic system, such as 2A ribosome skipping sequence elements (e.g., E2A, P2A, F2A, or T2A sequences) and/or a Internal Ribosome Entry Site (IRES) sequence elements.

[0251] In one example, elements present include where b=1, d=1, e=1, g=1, h=1, X=18, Y=2, and the vector backbone comprises a ChAdV68 vector, a=1, P is a CMV promoter, the at least one second poly(A) sequence is present, wherein the second poly(A) sequence is an exogenous poly(A) sequence to the vector backbone, and optionally wherein the exogenous poly(A) sequence comprises an SV40 poly(A) signal sequence or a BGH poly(A) signal sequence, and each N encodes a MHC class I epitope 7-15 amino acids in length, a MHC class II epitope, an epitope capable of stimulating a B cell response, or combinations thereof, L5 is a native 5′ linker sequence that encodes a native N-terminal amino acid sequence of the epitope, and wherein the 5′ linker sequence encodes a peptide that is at least 3 amino acids in length, L3 is a native 3′ linker sequence that encodes a native C-terminal amino acid sequence of the epitope, and wherein the 3′ linker sequence encodes a peptide that is at least 3 amino acids in length, and U is each of a PADRE class II sequence and a Tetanus toxoid MHC class II sequence. The above payload encoding sequence formula in some instances only describes the portion of a payload cassette encoding concatenated epitope sequences, such as concatenated T cell epitopes.

[0252] In one example, elements present include where b=1, d=1, e=1, g=1, h=1, X=18, Y=2, and the vector backbone comprises a Venezuelan equine encephalitis virus vector, a=0, and the payload cassette is operably linked to an endogenous 26S promoter, and the at least one polyadenylation poly(A) sequence is a poly(A) sequence of at least 80 consecutive A nucleotides (SEQ ID NO: 27940) provided by the backbone, and each N encodes a MHC class I epitope 7-15 amino acids in length, a MHC class II epitope, an epitope capable of stimulating a B cell response, or combinations thereof, L5 is a native 5′ linker sequence that encodes a native N-terminal amino acid sequence of the epitope, and wherein the 5′ linker sequence encodes a peptide that is at least 3 amino acids in length, L3 is a native 3′ linker sequence that encodes a native C-terminal amino acid sequence of the epitope, and wherein the 3′ linker sequence encodes a peptide that is at least 3 amino acids in length, and U is each of a PADRE class II sequence and a Tetanus toxoid MHC class II sequence.

[0253] The payload cassette can be described using the following formula to describe the ordered sequence of each element, from 5′ to 3′:

(Pₐ-(L5_{b}-N_{c}-L3_{d})^{X})^{Z}-(P2^{h}-(G5^{e}-U_{f})_{Y})_{W}-G3_{g}

wherein P and P2 comprise promoter nucleotide sequences, N comprises an MHC class I epitope-encoding nucleic acid sequence, L5 comprises a 5′ linker sequence, L3 comprises a 3′ linker sequence, G5 comprises a nucleic acid sequences encoding an amino acid linker, G3 comprises one of the at least one nucleic acid sequences encoding an amino acid linker, U comprises an MHC class II antigen-encoding nucleic acid sequence, where for each X the corresponding Nc is an epitope encoding nucleic acid sequence, where for each Y the corresponding Uf is a MHC class II epitope-encoding nucleic acid sequence (e.g., universal MHC class II epitope-encoding nucleic acid sequence). A universal sequence can comprise at least one of Tetanus toxoid and PADRE. A universal sequence can comprise a Tetanus toxoid peptide. A universal sequence can comprise a PADRE peptide. A universal sequence can comprise a Tetanus toxoid and PADRE peptides. The composition and ordered sequence can be further defined by selecting the number of elements present, for example where a=0 or 1, where b=0 or 1, where c=1, where d=0 or 1, where e=0 or 1, where f=1, where g=0 or 1, where h=0 or 1, X=1 to 400, Y=0, 1, 2, 3, 4 or 5, Z=1 to 400, and W=0, 1, 2, 3, 4 or 5

[0254] In one example, elements present include where a=0, b=1, d=1, e=1, g=1, h=0, X=10, Y=2, Z=1, and W=1, describing where no additional promoter is present (e.g., only the promoter nucleotide sequence provided by a vector backbone, such as an RNA alphavirus or ChAdV backbone is present), 10 MHC class I epitopes are present, a 5′ linker is present for each N, a 3′ linker is present for each N, 2 MHC class II epitopes are present, a linker is present linking the two MHC class II epitopes, a linker is present linking the 5′ end of the two MHC class II epitopes to the 3′ linker of the final MHC class I epitope, and a linker is present linking the 3′ end of the two MHC class II epitopes to a vector backbone (e.g., a ChAdV or RNA alphavirus backbone).

[0255] Examples of linking the 3′ end of the cassette to a vector backbone (e.g., an RNA alphavirus backbone) include linking directly to the 3′ UTR elements provided by the vector backbone, such as a 3′ 19-nt CSE. Examples of linking the 5′ end of the cassette to a vector backbone (e.g., an RNA alphavirus backbone) include linking directly to a promoter or 5′ UTR element of the vector backbone, such as a subgenomic promoter sequence (e.g., a 26S subgenomic promoter sequence), an alphavirus 5′ UTR, a 51-nt CSE, or a 24-nt CSE.

[0256] Other examples include: where a=1 describing where a promoter other than the promoter nucleotide sequence provided by a vector backbone (e.g., a ChAdV or RNA alphavirus backbone) is present; where a=1 and Z is greater than 1 where multiple promoters other than the promoter nucleotide sequence provided by the vector backbone are present each driving expression of 1 or more distinct MHC class I epitope encoding nucleic acid sequences; where h=1 describing where a separate promoter is present to drive expression of the MHC class II epitope-encoding nucleic acid sequences; and where g=0 describing the MHC class II epitope-encoding nucleic acid sequence, if present, is directly linked to a vector backbone (e.g., a ChAdV or RNA alphavirus backbone). For example, a ChAdV vector backbone can have the cassette placed under the control of a CMV promoter/enhancer.

[0257] Other examples include where each MHC class I epitope that is present can have a 5′ linker, a 3′ linker, neither, or both. In examples where more than one MHC class I epitope is present in the same antigen cassette, some MHC class I epitopes may have both a 5′ linker and a 3′ linker, while other MHC class I epitopes may have either a 5′ linker, a 3′ linker, or neither. In other examples where more than one MHC class I epitope is present in the same antigen cassette, some MHC class I epitopes may have either a 5′ linker or a 3′ linker, while other MHC class I epitopes may have either a 5′ linker, a 3′ linker, or neither.

[0258] In examples where more than one MHC class II epitope is present in the same antigen cassette, some MHC class II epitopes may have both a 5′ linker and a 3′ linker, while other MHC class II epitopes may have either a 5′ linker, a 3′ linker, or neither. In other examples where more than one MHC class II epitope is present in the same antigen cassette, some MHC class II epitopes may have either a 5′ linker or a 3′ linker, while other MHC class II epitopes may have either a 5′ linker, a 3′ linker, or neither.

[0259] Other examples include where each payload that is present can have a 5′ linker, a 3′ linker, neither, or both. In examples where more than one payload is present in the same payload cassette, some payloads may have both a 5′ linker and a 3′ linker, while other payloads may have either a 5′ linker, a 3′ linker, or neither. In other examples where more than one payload is present in the same payload cassette, some payloads may have either a 5′ linker or a 3′ linker, while other payloads may have either a 5′ linker, a 3′ linker, or neither.

[0260] The promoter nucleotide sequences P and/or P2 can be the same as a promoter nucleotide sequence provided by a vector backbone, such as an RNA alphavirus backbone. For example, the promoter sequence provided by the RNA alphavirus backbone, Pn and P2, can each comprise a subgenomic promoter sequence (e.g., a 26S subgenomic promoter sequence) or a CMV promoter. The promoter nucleotide sequences P and/or P2 can be different from the promoter nucleotide sequence provided by a vector backbone (e.g., a ChAdV or RNA alphavirus backbone), as well as can be different from each other.

[0261] The 5′ linker L5 can be a native sequence or a non-natural sequence. Non-natural sequence include, but are not limited to, AAY, RR, and DPP. The 3′ linker L3 can also be a native sequence or a non-natural sequence. Additionally, L5 and L3 can both be native sequences, both be non-natural sequences, or one can be native and the other non-natural. For each X, the amino acid linkers can be 2, 3, 4, 5, 6, 7, 8, 9, 10, 11, 12, 13, 14, 15, 16, 17, 18, 19, 20, 21, 22, 23, 24, 25, 26, 27, 28, 29, 30, 31, 32, 33, 34, 35, 36, 37, 38, 39, 40, 41, 42, 43, 44, 45, 46, 47, 48, 49, 50, 51, 52, 53, 54, 55, 56, 57, 58, 59, 60, 61, 62, 63, 64, 65, 66, 67, 68, 69, 70, 71, 72, 73, 74, 75, 76, 77, 78, 79, 80, 81, 82, 83, 84, 85, 86, 87, 88, 89, 90, 91, 92, 93, 94, 95, 96, 97, 98, 99, 100 or more amino acids in length. For each X, the amino acid linkers can also be at least 3, at least 4, at least 5, at least 6, at least 7, at least 8, at least 9, at least 10, at least 11, at least 12, at least 13, at least 14, at least 15, at least 16, at least 17, at least 18, at least 19, at least 20, at least 21, at least 22, at least 23, at least 24, at least 25, at least 26, at least 27, at least 28, at least 29, or at least 30 amino acids in length. For each X, the amino acid linkers can also be between 2-10, 2-15, 2-20, 2-25, 2-30, 2-40, 2-50, 3-10, 3-15, 3-20, 3-25, 3-30, 3-40, 3-50, 4-10, 4-15, 4-20, 4-25, 4-30, 4-40, 4-50, 5-10, 5-15, 5-20, 5-25, 5-30, 5-40, 5-50, 6-10, 6-15, 6-20, 6-25, 6-30, 6-40, 6-50, 7-10, 7-15, 7-20, 7-25, 7-30, 7-40, 7-50, 8-10, 8-15, 8-20, 8-25, 8-30, 8-40, or 8-50 amino acids in length.

[0262] The amino acid linker G5, for each Y, can be 2, 3, 4, 5, 6, 7, 8, 9, 10, 11, 12, 13, 14, 15, 16, 17, 18, 19, 20, 21, 22, 23, 24, 25, 26, 27, 28, 29, 30, 31, 32, 33, 34, 35, 36, 37, 38, 39, 40, 41, 42, 43, 44, 45, 46, 47, 48, 49, 50, 51, 52, 53, 54, 55, 56, 57, 58, 59, 60, 61, 62, 63, 64, 65, 66, 67, 68, 69, 70, 71, 72, 73, 74, 75, 76, 77, 78, 79, 80, 81, 82, 83, 84, 85, 86, 87, 88, 89, 90, 91, 92, 93, 94, 95, 96, 97, 98, 99, 100 or more amino acids in length. For each Y, the amino acid linkers can be also be at least 3, at least 4, at least 5, at least 6, at least 7, at least 8, at least 9, at least 10, at least 11, at least 12, at least 13, at least 14, at least 15, at least 16, at least 17, at least 18, at least 19, at least 20, at least 21, at least 22, at least 23, at least 24, at least 25, at least 26, at least 27, at least 28, at least 29, or at least 30 amino acids in length. G5 can also be between 2-10, 2-15, 2-20, 2-25, 2-30, 2-40, 2-50, 3-10, 3-15, 3-20, 3-25, 3-30, 3-40, 3-50, 4-10, 4-15, 4-20, 4-25, 4-30, 4-40, 4-50, 5-10, 5-15, 5-20, 5-25, 5-30, 5-40, 5-50, 6-10, 6-15, 6-20, 6-25, 6-30, 6-40, 6-50, 7-10, 7-15, 7-20, 7-25, 7-30, 7-40, 7-50, 8-10, 8-15, 8-20, 8-25, 8-30, 8-40, or 8-50 amino acids in length.

[0263] The amino acid linker G3 can be 2, 3, 4, 5, 6, 7, 8, 9, 10, 11, 12, 13, 14, 15, 16, 17, 18, 19, 20, 21, 22, 23, 24, 25, 26, 27, 28, 29, 30, 31, 32, 33, 34, 35, 36, 37, 38, 39, 40, 41, 42, 43, 44, 45, 46, 47, 48, 49, 50, 51, 52, 53, 54, 55, 56, 57, 58, 59, 60, 61, 62, 63, 64, 65, 66, 67, 68, 69, 70, 71, 72, 73, 74, 75, 76, 77, 78, 79, 80, 81, 82, 83, 84, 85, 86, 87, 88, 89, 90, 91, 92, 93, 94, 95, 96, 97, 98, 99, 100 or more amino acids in length. G3 can be also be at least 3, at least 4, at least 5, at least 6, at least 7, at least 8, at least 9, at least 10, at least 11, at least 12, at least 13, at least 14, at least 15, at least 16, at least 17, at least 18, at least 19, at least 20, at least 21, at least 22, at least 23, at least 24, at least 25, at least 26, at least 27, at least 28, at least 29, or at least 30 amino acids in length. G3 can also be between 2-10, 2-15, 2-20, 2-25, 2-30, 2-40, 2-50, 3-10, 3-15, 3-20, 3-25, 3-30, 3-40, 3-50, 4-10, 4-15, 4-20, 4-25, 4-30, 4-40, 4-50, 5-10, 5-15, 5-20, 5-25, 5-30, 5-40, 5-50, 6-10, 6-15, 6-20, 6-25, 6-30, 6-40, 6-50, 7-10, 7-15, 7-20, 7-25, 7-30, 7-40, 7-50, 8-10, 8-15, 8-20, 8-25, 8-30, 8-40, or 8-50 amino acids in length.

[0264] For each X, each N can encode a MHC class I epitope, a MHC class II epitope, an epitope/antigen capable of stimulating a B cell response, or a combination thereof. For each X, each N can encode a combination of a MHC class I epitope, a MHC class II epitope, and an epitope/antigen capable of stimulating a B cell response. For each X, each N can encode a combination of a MHC class I epitope and a MHC class II epitope. For each X, each N can encode a combination of a MHC class I epitope and an epitope/antigen capable of stimulating a B cell response. For each X, each N can encode a combination of a MHC class II epitope and an epitope/antigen capable of stimulating a B cell response. For each X, each N can encode a MHC class II epitope. For each X, each N can encode an epitope/antigen capable of stimulating a B cell response. For each X, each N can encode a MHC class I epitope 7-15 amino acids in length. For each X, each N can also encodes a MHC class I epitope 5, 6, 7, 8, 9, 10, 11, 12, 13, 14, 15, 16, 17, 18, 19, 20, 21, 22, 23, 24, 25, 26, 27, 28, 29, or 30 amino acids in length. For each X, each N can also encodes a MHC class I epitope at least 5, at least 6, at least 7, at least 8, at least 9, at least 10, at least 11, at least 12, at least 13, at least 14, at least 15, at least 16, at least 17, at least 18, at least 19, at least 20, at least 21, at least 22, at least 23, at least 24, at least 25, at least 26, at least 27, at least 28, at least 29, or at least 30 amino acids in length. For each X, each N can encode a MHC class II epitope. For each X, each N can encode an epitope capable of stimulating a B cell response.

[0265] A cassette, including each cassette respectively in a multicistronic system, can be at least 100, 200, 300, 400, 500, 600, 700, 800, or 900 nucleotides in length. A cassette can be at least 1000, 2000, 3000, 4000, 5000, 6000, 7000, 8000, 9000, or 10000 nucleotides in length. A cassette can be at least 1000 nucleotides in length. A cassette can be at least 2000 nucleotides in length. A cassette can be at least 3000 nucleotides in length. A cassette can be at least 4000 nucleotides in length. A cassette can be at least 5000 nucleotides in length. A cassette can be at least 6000 nucleotides in length. A cassette can be at least 7000 nucleotides in length. A cassette can be at least 8000 nucleotides in length. A cassette can be at least 9000 nucleotides in length. A cassette can be between 100-1000, 100-2000, 100-3000, 100-4000, 100-5000, 100-6000, 100-7000, 100-8000, 100-9000, or 100-10000 nucleotides in length. A cassette can be between 500-1000, 500-2000, 500-3000, 500-4000, 500-5000, 500-6000, 500-7000, 500-8000, 500-9000, or 500-10000 nucleotides in length. A cassette can be between 1000-2000, 1000-3000, 1000-4000, 1000-5000, 1000-6000, 1000-7000, 1000-8000, 1000-9000, or 1000-10000 nucleotides in length. A cassette can be about the length deleted from an alphavirus (e.g., the length of deleted structural proteins in a VEE backbone). A cassette can be less than the length deleted from an alphavirus. A cassette can be more than the length deleted from an alphavirus.

[0266] For vectors including multiple cassettes, the total length of all cassettes combined can be at least 100, 200, 300, 400, 500, 600, 700, 800, or 900 nucleotides in length. For vectors including multiple cassettes, the total length of all cassettes combined can be at least 1000, 2000, 3000, 4000, 5000, 6000, 7000, 8000, 9000, or 10000 nucleotides in length For vectors including multiple cassettes, the total length of all cassettes combined can be between 100-1000, 100-2000, 100-3000, 100-4000, 100-5000, 100-6000, 100-7000, 100-8000, 100-9000, or 100-10000 nucleotides in length. For vectors including multiple cassettes, the total length of all cassettes combined can be between 500-1000, 500-2000, 500-3000, 500-4000, 500-5000, 500-6000, 500-7000, 500-8000, 500-9000, or 500-10000 nucleotides in length. For vectors including multiple cassettes, the total length of all cassettes combined can be between 1000-2000, 1000-3000, 1000-4000, 1000-5000, 1000-6000, 1000-7000, 1000-8000, 1000-9000, or 1000-10000 nucleotides in length.

[0267] A cassette can be 700 nucleotides or less. A cassette can be 700 nucleotides or less and encode 2 distinct epitope-encoding nucleic acid sequences (e.g., encode 2 distinct infectious disease or tumor derived nucleic acid sequences encoding an immunogenic polypeptide). A cassette can be 700 nucleotides or less and encode at least 2 distinct epitope-encoding nucleic acid sequences. A cassette can be 700 nucleotides or less and encode 3 distinct epitope-encoding nucleic acid sequences. A cassette can be 700 nucleotides or less and encode at least 3 distinct epitope-encoding nucleic acid sequences. A cassette can be 700 nucleotides or less and include 1-10, 1-5, 1, 2, 3, 4, 5, 6, 7, 8, 9, 10, or more payloads.

[0268] A cassette can be between 375-700 nucleotides in length. A cassette can be between 375-700 nucleotides in length and encode 2 distinct epitope-encoding nucleic acid sequences (e.g., encode 2 distinct infectious disease or tumor derived nucleic acid sequences encoding an immunogenic polypeptide). A cassette can be between 375-700 nucleotides in length and encode at least 2 distinct epitope-encoding nucleic acid sequences. A cassette can be between 375-700 nucleotides in length and encode 3 distinct epitope-encoding nucleic acid sequences. A cassette be between 375-700 nucleotides in length and encode at least 3 distinct epitope-encoding nucleic acid sequences. A cassette can be between 375-700 nucleotides in length and include 1-10, 1-5, 1, 2, 3, 4, 5, 6, 7, 8, 9, 10, or more payloads.

[0269] A cassette can be 600, 500, 400, 300, 200, or 100 nucleotides in length or less. A cassette can be 600, 500, 400, 300, 200, or 100 nucleotides in length or less and encode 2 distinct epitope-encoding nucleic acid sequences. A cassette can be 600, 500, 400, 300, 200, or 100 nucleotides in length or less and encode at least 2 distinct epitope-encoding nucleic acid sequences. A cassette can be 600, 500, 400, 300, 200, or 100 nucleotides in length or less and encode 3 distinct epitope-encoding nucleic acid sequences. A cassette can be 600, 500, 400, 300, 200, or 100 nucleotides in length or less and encode at least 3 distinct epitope-encoding nucleic acid sequences. A cassette can be 600, 500, 400, 300, 200, or 100 nucleotides in length or less and include 1-10, 1-5, 1, 2, 3, 4, 5, 6, 7, 8, 9, 10, or more payloads.

[0270] A cassette can be between 375-600, between 375-500, or between 375-400 nucleotides in length. A cassette can be between 375-600, between 375-500, or between 375-400 nucleotides in length and encode 2 distinct epitope-encoding nucleic acid sequences. A cassette can be between 375-600, between 375-500, or between 375-400 nucleotides in length and encode at least 2 distinct epitope-encoding nucleic acid sequences. A cassette can be between 375-600, between 375-500, or between 375-400 nucleotides in length and encode 3 distinct epitope-encoding nucleic acid sequences. A cassette can be between 375-600, between 375-500, or between 375-400 nucleotides in length and encode at least 3 distinct epitope-encoding nucleic acid sequences. A cassette can be between 375-600, between 375-500, or between 375-400 nucleotides in length and include 1-10, 1-5, 1, 2, 3, 4, 5, 6, 7, 8, 9, 10, or more payloads.

### V. Vaccine Compositions

[0271] Also disclosed herein is an immunogenic composition, e.g., a vaccine composition, capable of raising a specific immune response, e.g., a tumor-specific immune response or an infectious disease organism-specific immune response. Vaccine compositions typically comprise one or a plurality of antigens, e.g., selected using a method described herein, or selected from a pathogen-derived peptide, a virus-derived peptide, a bacteria-derived peptide, a fungus-derived peptide, and/or a parasite-derived peptide. Vaccine compositions can also be referred to as vaccines.

[0272] A vaccine can contain between 1 and 30 peptides, 2, 3, 4, 5, 6, 7, 8, 9, 10, 11, 12, 13, 14, 15, 16, 17, 18, 19, 20, 21, 22, 23, 24, 25, 26, 27, 28, 29, or 30 different peptides, 6, 7, 8, 9, 10 11, 12, 13, or 14 different peptides, or 12, 13 or 14 different peptides. Peptides can include post-translational modifications. A vaccine can contain between 1 and 100 or more nucleotide sequences, 2, 3, 4, 5, 6, 7, 8, 9, 10, 11, 12, 13, 14, 15, 16, 17, 18, 19, 20, 21, 22, 23, 24, 25, 26, 27, 28, 29, 30, 31, 32, 33, 34, 35, 36, 37, 38, 39, 40, 41, 42, 43, 44, 45, 46, 47, 48, 49, 50, 51, 52, 53, 54, 55, 56, 57, 58, 59, 60, 61, 62, 63, 64, 65, 66, 67, 68, 69, 70, 71, 72, 73, 74, 75, 76, 77, 78, 79, 80, 81, 82, 83, 84, 85, 86, 87, 88, 89, 90, 91, 92, 93, 94, 95, 96, 97, 98, 99, 100 or more different nucleotide sequences, 6, 7, 8, 9, 10 11, 12, 13, or 14 different nucleotide sequences, or 12, 13 or 14 different nucleotide sequences. A vaccine can contain between 1 and 30 antigen sequences, 2, 3, 4, 5, 6, 7, 8, 9, 10, 11, 12, 13, 14, 15, 16, 17, 18, 19, 20, 21, 22, 23, 24, 25, 26, 27, 28, 29, 30, 31, 32, 33, 34, 35, 36, 37, 38, 39, 40, 41, 42, 43, 44, 45, 46, 47, 48, 49, 50, 51, 52, 53, 54, 55, 56, 57, 58, 59, 60, 61, 62, 63, 64, 65, 66, 67, 68, 69, 70, 71, 72, 73, 74, 75, 76, 77, 78, 79, 80, 81, 82, 83, 84, 85, 86, 87, 88, 89, 90, 91, 92, 93, 94, 95, 96, 97, 98, 99, 100 or more different antigen sequences, 6, 7, 8, 9, 10 11, 12, 13, or 14 different antigen sequences, or 12, 13 or 14 different antigen sequences.

[0273] A vaccine can contain between 1 and 30 antigen-encoding nucleic acid sequences, 2, 3, 4, 5, 6, 7, 8, 9, 10, 11, 12, 13, 14, 15, 16, 17, 18, 19, 20, 21, 22, 23, 24, 25, 26, 27, 28, 29, 30, 31, 32, 33, 34, 35, 36, 37, 38, 39, 40, 41, 42, 43, 44, 45, 46, 47, 48, 49, 50, 51, 52, 53, 54, 55, 56, 57, 58, 59, 60, 61, 62, 63, 64, 65, 66, 67, 68, 69, 70, 71, 72, 73, 74, 75, 76, 77, 78, 79, 80, 81, 82, 83, 84, 85, 86, 87, 88, 89, 90, 91, 92, 93, 94, 95, 96, 97, 98, 99, 100 or more different antigen-encoding nucleic acid sequences, 6, 7, 8, 9, 10 11, 12, 13, or 14 different antigen-encoding nucleic acid sequences, or 12, 13 or 14 different antigen-encoding nucleic acid sequences. Antigen-encoding nucleic acid sequences can refer to the antigen encoding portion of an antigen “cassette.” Features of an antigen cassette are described in greater detail herein. A cassette can contain two or more antigen-encoding nucleic acid sequences linked together in a cassette (e.g., concatenated antigen-encoding nucleic acid sequence encoding concatenated T cell epitopes).

[0274] A vaccine can contain between 1 and 30 distinct epitope-encoding nucleic acid sequences, 2, 3, 4, 5, 6, 7, 8, 9, 10, 11, 12, 13, 14, 15, 16, 17, 18, 19, 20, 21, 22, 23, 24, 25, 26, 27, 28, 29, 30, 31, 32, 33, 34, 35, 36, 37, 38, 39, 40, 41, 42, 43, 44, 45, 46, 47, 48, 49, 50, 51, 52, 53, 54, 55, 56, 57, 58, 59, 60, 61, 62, 63, 64, 65, 66, 67, 68, 69, 70, 71, 72, 73, 74, 75, 76, 77, 78, 79, 80, 81, 82, 83, 84, 85, 86, 87, 88, 89, 90, 91, 92, 93, 94, 95, 96, 97, 98, 99, 100 or more distinct epitope-encoding nucleic acid sequences, 6, 7, 8, 9, 10 11, 12, 13, or 14 distinct epitope-encoding nucleic acid sequences, or 12, 13 or 14 distinct epitope-encoding nucleic acid sequences. Epitope-encoding nucleic acid sequences can refer to sequences for individual epitope sequences, such as each of the concatenated T cell epitopes of two or more antigen-encoding nucleic acid sequences linked together in a cassette.

[0275] A vaccine can contain at least two repeats of an epitope-encoding nucleic acid sequence. A used herein, an “iteration” (or interchangeably a “repeat”) refers to two or more iterations of an identical nucleic acid epitope-encoding nucleic acid sequences (inclusive of the optional 5′ linker sequence and/or the optional 3′ linker sequences described herein) within an antigen-encoding nucleic acid sequence. In one example, the antigen-encoding nucleic acid sequence portion of a cassette encodes at least two iterations of an epitope-encoding nucleic acid sequence. In further non-limiting examples, the antigen-encoding nucleic acid sequence portion of a cassette encodes more than one distinct epitope, and at least one of the distinct epitopes is encoded by at least two iterations of the nucleic acid sequence encoding the distinct epitope (i.e., at least two distinct epitope-encoding nucleic acid sequences). In illustrative non-limiting examples, an antigen-encoding nucleic acid sequence encodes epitopes A, B, and C encoded by epitope-encoding nucleic acid sequences epitope-encoding sequence A (E_{A}), epitope-encoding sequence B (E_{B}), and epitope-encoding sequence C (E_{C}), and exemplary antigen-encoding nucleic acid sequences having iterations of at least one of the distinct epitopes are illustrated by, but is not limited to, the formulas below:
[0276] Iteration of one distinct epitope (iteration of epitope A):

E_{A}-E_{B}-E_{C}-E_{A}; or

E_{A}-E_{A}-E_{B}-E_{C}
[0277] Iteration of multiple distinct epitopes (iterations of epitopes A, B, and C):

E_{A}-E_{B}-E_{C}-E_{A}-E_{B}-E_{C}; or

E_{A}-E_{A}-E_{B}-E_{B}-E_{C}-E_{C}
[0278] Multiple iterations of multiple distinct epitopes (iterations of epitopes A, B, and C):

E_{A}-E_{B}-E_{C}-E_{A}-E_{B}-E_{C}-E_{A}-E_{B}-E_{C}; or

E_{A}-E_{A}-E_{A}-E_{B}-E_{B}-E_{B}-E_{C}-E_{C}-E_{C}

[0279] The above examples are not limiting and the antigen-encoding nucleic acid sequences having iterations of at least one of the distinct epitopes can encode each of the distinct epitopes in any order or frequency. For example, the order and frequency can be a random arrangement of the distinct epitopes, e.g., in an example with epitopes A, B, and C, by the formula E_{A}-E_{B}-E_{C}-E_{C}-E_{A}-E_{B}-E_{A}-E_{C}-E_{A}-E_{C}-E_{C}-E_{B}.

[0280] Also provided for herein is an antigen-encoding cassette, the antigen-encoding cassette having at least one antigen-encoding nucleic acid sequence described, from 5′ to 3′, by the formula:

(Eₓ−(Eₙ^{N})_{y})_{z}
[0281] where E represents a nucleotide sequence including a distinct epitope-encoding nucleic acid sequences,
[0282] n represents the number of separate distinct epitope-encoding nucleic acid sequences and is any integer including 0,
[0283] E^{N} represents a nucleotide sequence comprising the separate distinct epitope-encoding nucleic acid sequence for each corresponding n,
[0284] for each iteration of z: x=0 or 1, y=0 or 1 for each n, and at least one of x or y=1, and
[0285] z=2 or greater, wherein the antigen-encoding nucleic acid sequence comprises at least two iterations of E, a given E^{N}, or a combination thereof.

[0286] Each E or E^{N} can independently comprise any epitope-encoding nucleic acid sequence described herein (e.g., a peptide encoding an infectious disease T cell epitope and/or a neoantigen epitope). For example, Each E or E^{N} can independently comprises a nucleotide sequence described, from 5′ to 3′, by the formula (L5_{b}-N_{c}-L3_{d}), where N comprises the distinct epitope-encoding nucleic acid sequence associated with each E or E^{N}, where c=1, L5 comprises a 5′ linker sequence, where b=0 or 1, and L3 comprises a 3′ linker sequence, where d=0 or 1. Epitopes and linkers that can be used are further described herein, e.g., see IV.A. Cassette.

[0287] Iterations of an epitope-encoding nucleic acid sequences (inclusive of optional 5′ linker sequence and/or the optional 3′ linker sequences) can be linearly linked directly to one another (e.g., E_{A}-E_{A}- . . . as illustrated above). Iterations of an epitope-encoding nucleic acid sequences can be separated by one or more additional nucleotides sequences. In general, iterations of an epitope-encoding nucleic acid sequences can be separated by any size nucleotide sequence applicable for the compositions described herein. In one example, iterations of an epitope-encoding nucleic acid sequences can be separated by a separate distinct epitope-encoding nucleic acid sequence (e.g., E_{A}-E_{B}-E_{C}-E_{A} . . . , as illustrated above). In examples where iterations are separated by a single separate distinct epitope-encoding nucleic acid sequence, and each epitope-encoding nucleic acid sequences (inclusive of optional 5′ linker sequence and/or the optional 3′ linker sequences) encodes a peptide 25 amino acids in length, the iterations can be separated by 75 nucleotides, such as in antigen-encoding nucleic acid represented by E_{A}-E_{B}-E_{A} . . . , E_{A} is separated by 75 nucleotides. In an illustrative example, an antigen-encoding nucleic acid having the sequence VTNTEMFVTAPDNLGYMYEVQWPGQTQPQIANCSVYDFFVWLHYYSVRDTVTNTEMF VTAPDNLGYMYEVQWPGQTQPQIANCSVYDFFVWLHYYSVRDT (SEQ ID NO: 115) encoding iterations of 25mer antigens Trp1 (VTNTEMFVTAPDNLGYMYEVQWPGQ (SEQ ID NO: 116)) and Trp2 (TQPQIANCSVYDFFVWLHYYSVRDT (SEQ ID NO: 117)), the iterations of Trp1 are separated by the 25mer Trp2 and thus the iterations of the Trp1 epitope-encoding nucleic acid sequences are separated the 75 nucleotide Trp2 epitope-encoding nucleic acid sequence. In examples where iterations are separated by 2, 3, 4, 5, 6, 7, 8, or 9 separate distinct epitope-encoding nucleic acid sequence, and each epitope-encoding nucleic acid sequences (inclusive of optional 5′ linker sequence and/or the optional 3′ linker sequences) encodes a peptide 25 amino acids in length, the iterations can be separated by 150, 225, 300, 375, 450, 525, 600, or 675 nucleotides, respectively.

[0288] In one embodiment, different peptides and/or polypeptides or nucleotide sequences encoding them are selected so that the peptides and/or polypeptides capable of associating with different MHC molecules, such as different MHC class I molecules and/or different MHC class II molecules. In some aspects, one vaccine composition comprises coding sequence for peptides and/or polypeptides capable of associating with the most frequently occurring MHC class I molecules and/or different MHC class II molecules. Hence, vaccine compositions can comprise different fragments capable of associating with at least 2 preferred, at least 3 preferred, or at least 4 preferred MHC class I molecules and/or different MHC class II molecules.

[0289] The vaccine composition can be capable of stimulating a specific cytotoxic T-cell response and/or a specific helper T-cell response. The vaccine composition can be capable of stimulating a specific cytotoxic T-cell response and a specific helper T-cell response.

[0290] The vaccine composition can be capable of stimulating a specific B-cell response (e.g., an antibody response).

[0291] The vaccine composition can be capable of stimulating a specific cytotoxic T-cell response, a specific helper T-cell response, and/or a specific B-cell response. The vaccine composition can be capable of stimulating a specific cytotoxic T-cell response and a specific B-cell response. The vaccine composition can be capable of stimulating a specific helper T-cell response and a specific B-cell response. The vaccine composition can be capable of stimulating a specific cytotoxic T-cell response, a specific helper T-cell response, and a specific B-cell response.

[0292] A vaccine composition can further comprise an adjuvant and/or a carrier. Examples of useful adjuvants and carriers are given herein below. A composition can be associated with a carrier such as e.g. a protein or an antigen-presenting cell such as, e.g., a dendritic cell (DC) capable of presenting the peptide to a T-cell.

[0293] Adjuvants are any substance whose admixture into a vaccine composition increases or otherwise modifies the immune response to an antigen. Carriers can be scaffold structures, for example a polypeptide or a polysaccharide, to which an antigen, is capable of being associated. Optionally, adjuvants are conjugated covalently or non-covalently.

[0294] The ability of an adjuvant to increase an immune response to an antigen is typically manifested by a significant or substantial increase in an immune-mediated reaction, or reduction in disease symptoms. For example, an increase in humoral immunity is typically manifested by a significant increase in the titer of antibodies raised to the antigen, and an increase in T-cell activity is typically manifested in increased cell proliferation, or cellular cytotoxicity, or cytokine secretion. An adjuvant may also alter an immune response, for example, by changing a primarily humoral or Th response into a primarily cellular, or Th response.

[0295] Suitable adjuvants include, but are not limited to 1018 ISS, alum, aluminium salts, Amplivax, AS15, BCG, CP-870,893, CpG7909, CyaA, dSLIM, GM-CSF, IC30, IC31, Imiquimod, ImuFact IMP321, IS Patch, ISS, ISCOMATRIX, JuvImmune, LipoVac, MF59, monophosphoryl lipid A, Montanide IMS 1312, Montanide ISA 206, Montanide ISA 50V, Montanide ISA-51, OK-432, OM-174, OM-197-MP-EC, ONTAK, PepTel vector system, PLG microparticles, resiquimod, SRL172, Virosomes and other Virus-like particles, YF-17D, VEGF trap, R848, beta-glucan, Pam3Cys, Aquila's QS21 stimulon (Aquila Biotech, Worcester, Mass., USA) which is derived from saponin, mycobacterial extracts and synthetic bacterial cell wall mimics, and other proprietary adjuvants such as Ribi's Detox. Quil or Superfos. Adjuvants such as incomplete Freund's or GM-CSF are useful. Several immunological adjuvants (e.g., MF59) specific for dendritic cells and their preparation have been described previously (Dupuis M, et al., Cell Immunol. 1998; 186(1):18-27; Allison A C; Dev Biol Stand. 1998; 92:3-11). Also cytokines can be used. Several cytokines have been directly linked to influencing dendritic cell migration to lymphoid tissues (e.g., TNF-alpha), accelerating the maturation of dendritic cells into efficient antigen-presenting cells for T-lymphocytes (e.g., GM-CSF, IL-1 and IL-4) (U.S. Pat. No. 5,849,589, specifically incorporated herein by reference in its entirety) and acting as immunoadjuvants (e.g., IL-12) (Gabrilovich D I, et al., J Immunother Emphasis Tumor Immunol. 1996 (6):414-418).

[0296] CpG immunostimulatory oligonucleotides have also been reported to enhance the effects of adjuvants in a vaccine setting. Other TLR binding molecules such as RNA binding TLR7, TLR8 and/or TLR9 may also be used.

[0297] Other examples of useful adjuvants include, but are not limited to, chemically modified CpGs (e.g. CpR, Idera), Poly(I:C)(e.g. polyi:CI2U), non-CpG bacterial DNA or RNA as well as immunoactive small molecules and antibodies such as cyclophosphamide, sunitinib, bevacizumab, celebrex, NCX-4016, sildenafil, tadalafil, vardenafil, sorafinib, XL-999, CP-547632, pazopanib, ZD2171, AZD2171, ipilimumab, tremelimumab, and SC58175, which may act therapeutically and/or as an adjuvant. The amounts and concentrations of adjuvants and additives can readily be determined by the skilled artisan without undue experimentation. Additional adjuvants include colony-stimulating factors, such as Granulocyte Macrophage Colony Stimulating Factor (GM-CSF, sargramostim).

[0298] A vaccine composition can comprise more than one different adjuvant. Furthermore, a therapeutic composition can comprise any adjuvant substance including any of the above or combinations thereof. It is also contemplated that a vaccine and an adjuvant can be administered together or separately in any appropriate sequence.

[0299] A carrier (or excipient) can be present independently of an adjuvant. The function of a carrier can for example be to increase the molecular weight of in particular mutant to increase activity or immunogenicity, to confer stability, to increase the biological activity, or to increase serum half-life. Furthermore, a carrier can aid presenting peptides to T-cells. A carrier can be any suitable carrier known to the person skilled in the art, for example a protein or an antigen presenting cell. A carrier protein could be but is not limited to keyhole limpet hemocyanin, serum proteins such as transferrin, bovine serum albumin, human serum albumin, thyroglobulin or ovalbumin, immunoglobulins, or hormones, such as insulin or palmitic acid. For immunization of humans, the carrier is generally a physiologically acceptable carrier acceptable to humans and safe. However, tetanus toxoid and/or diphtheria toxoid are suitable carriers. Alternatively, the carrier can be dextrans for example sepharose.

[0300] Cytotoxic T-cells (CTLs) recognize an antigen in the form of a peptide bound to an MHC molecule rather than the intact foreign antigen itself. The MHC molecule itself is located at the cell surface of an antigen presenting cell. Thus, an activation of CTLs is possible if a trimeric complex of peptide antigen, MHC molecule, and APC is present. Correspondingly, it may enhance the immune response if not only the peptide is used for activation of CTLs, but if additionally APCs with the respective MHC molecule are added. Therefore, in some embodiments a vaccine composition additionally contains at least one antigen presenting cell.

[0301] Antigens can also be included in viral vector-based vaccine platforms, such as vaccinia, fowlpox, self-replicating alphavirus, marabavirus, adenovirus (See, e.g., Tatsis et al., Adenoviruses, Molecular Therapy (2004) 10, 616-629), or lentivirus, including but not limited to second, third or hybrid second/third generation lentivirus and recombinant lentivirus of any generation designed to target specific cell types or receptors (See, e.g., Hu et al, Immunization Delivered by Lentiviral Vectors for Cancer and Infectious Diseases, Immunol Rev. (2011) 239(1): 45-61, Sakuma et al., Lentiviral vectors: basic to translational, Biochem J. (2012) 443(3):603-18, Cooper et al., Rescue of splicing-mediated intron loss maximizes expression in lentiviral vectors containing the human ubiquitin C promoter, Nucl. Acids Res. (2015) 43 (1): 682-690, Zufferey et al., Self-Inactivating Lentivirus Vector for Safe and Efficient In Vivo Gene Delivery, J. Virol. (1998) 72 (12): 9873-9880). Dependent on the packaging capacity of the above mentioned viral vector-based vaccine platforms, this approach can deliver one or more nucleotide sequences that encode one or more antigen peptides. The sequences may be flanked by non-mutated sequences, may be separated by linkers or may be preceded with one or more sequences targeting a subcellular compartment (See, e.g., Gros et al., Prospective identification of neoantigen-specific lymphocytes in the peripheral blood of melanoma patients, Nat Med. (2016) 22 (4):433-8, Stronen et al., Targeting of cancer neoantigens with donor-derived T cell receptor repertoires, Science. (2016) 352 (6291):1337-41, Lu et al., Efficient identification of mutated cancer antigens recognized by T cells associated with durable tumor regressions, Clin Cancer Res. (2014) 20(13):3401-10). Upon introduction into a host, infected cells express the antigens, and thereby stimulate a host immune (e.g., CTL) response against the peptide(s). Vaccinia vectors and methods useful in immunization protocols are described in, e.g., U.S. Pat. No. 4,722,848. Another vector is BCG (Bacille Calmette Guerin). BCG vectors are described in Stover et al. (Nature 351:456-460 (1991)). A wide variety of other vaccine vectors useful for therapeutic administration or immunization of antigens, e.g., Salmonella typhi vectors, and the like will be apparent to those skilled in the art from the description herein.

[0302] V.A. Additional Considerations for Vaccine Design and Manufacture

[0303] V.A.1. Determination of a Set of Peptides that Cover all Tumor Subclones

[0304] Truncal peptides, meaning those presented by all or most tumor subclones, can be prioritized for inclusion into a vaccine. Optionally, if there are no truncal peptides predicted to be presented and immunogenic with high probability, or if the number of truncal peptides predicted to be presented and immunogenic with high probability is small enough that additional non-truncal peptides can be included in the vaccine, then further peptides can be prioritized by estimating the number and identity of tumor subclones and choosing peptides so as to maximize the number of tumor subclones covered by a vaccine.

[0305] V.A.2. Antigen Prioritization

[0306] After all of the above antigen filters are applied, more candidate antigens may still be available for vaccine inclusion than the vaccine technology can support. Additionally, uncertainty about various aspects of the antigen analysis may remain and tradeoffs may exist between different properties of candidate vaccine antigens. Thus, in place of predetermined filters at each step of the selection process, an integrated multi-dimensional model can be considered that places candidate antigens in a space with at least the following axes and optimizes selection using an integrative approach.
[0307] 1. Risk of auto-immunity or tolerance (risk of germline) (lower risk of auto-immunity is typically preferred)
[0308] 2. Probability of sequencing artifact (lower probability of artifact is typically preferred)
[0309] 3. Probability of immunogenicity (higher probability of immunogenicity is typically preferred)
[0310] 4. Probability of presentation (higher probability of presentation is typically preferred)
[0311] 5. Gene expression (higher expression is typically preferred)
[0312] 6. Coverage of HLA genes (larger number of HLA molecules involved in the presentation of a set of antigens may lower the probability that a tumor, an infectious disease, and/or an infected cell will escape immune attack via downregulation or mutation of HLA molecules)
[0313] 7. Coverage of HLA classes (covering both HLA-I and HLA-II may increase the probability of therapeutic response and decrease the probability of tumor or infectious disease escape)

[0314] Additionally, optionally, antigens can be deprioritized (e.g., excluded) from the vaccination if they are predicted to be presented by HLA alleles lost or inactivated in either all or part of the patient's tumor or infected cell. HLA allele loss can occur by either somatic mutation, loss of heterozygosity, or homozygous deletion of the locus. Methods for detection of HLA allele somatic mutation are well known in the art, e.g. (Shukla et al., 2015). Methods for detection of somatic LOH and homozygous deletion (including for HLA locus) are likewise well described. (Carter et al., 2012; McGranahan et al., 2017; Van Loo et al., 2010). Antigens can also be deprioritized if mass-spectrometry data indicates a predicted antigen is not presented by a predicted HLA allele.

[0315] V.C. Self-Amplifying RNA Vectors

[0316] In general, all self-amplifying RNA (SAM) vectors contain a self-amplifying backbone derived from a self-replicating virus. The term “self-amplifying backbone” refers to minimal sequence(s) of a self-replicating virus that allows for self-replication of the viral genome. For example, minimal sequences that allow for self-replication of an alphavirus can include conserved sequences for nonstructural protein-mediated amplification (e.g., a nonstructural protein 1 (nsP1) gene, a nsP2 gene, a nsP3 gene, a nsP4 gene, and/or a polyA sequence). A self-amplifying backbone can also include sequences for expression of subgenomic viral RNA (e.g., a 26S promoter element for an alphavirus). SAM vectors can be positive-sense RNA polynucleotides or negative-sense RNA polynucleotides, such as vectors with backbones derived from positive-sense or negative-sense self-replicating viruses. Self-replicating viruses include, but are not limited to, alphaviruses, flaviviruses (e.g., Kunjin virus), measles viruses, and rhabdoviruses (e.g., rabies virus and vesicular stomatitis virus). Examples of SAM vector systems derived from self-replicating viruses are described in greater detail in Lundstrom (Molecules. 2018 Dec. 13; 23 (12). pii: E3310. doi: 10.3390/molecules23123310), herein incorporated by reference for all purposes.

[0317] V.C.1. Alphavirus Biology

[0318] Alphaviruses are members of the family Togaviridae, and are positive-sense single stranded RNA viruses. Members are typically classified as either Old World, such as Sindbis, Ross River, Mayaro, Chikungunya, and Semliki Forest viruses, or New World, such as eastern equine encephalitis, Aura, Fort Morgan, or Venezuelan equine encephalitis virus and its derivative strain TC-83 (Strauss Microbial Review 1994). A natural alphavirus genome is typically around 12 kb in length, the first two-thirds of which contain genes encoding non-structural proteins (nsPs) that form RNA replication complexes for self-replication of the viral genome, and the last third of which contains a subgenomic expression cassette encoding structural proteins for virion production (Frolov RNA 2001).

[0319] A model lifecycle of an alphavirus involves several distinct steps (Strauss Microbrial Review 1994, Jose Future Microbiol 2009). Following virus attachment to a host cell, the virion fuses with membranes within endocytic compartments resulting in the eventual release of genomic RNA into the cytosol. The genomic RNA, which is in a plus-strand orientation and comprises a 5′ methylguanylate cap and 3′ polyA tail, is translated to produce non-structural proteins nsP1-4 that form the replication complex. Early in infection, the plus-strand is then replicated by the complex into a minus-stand template. In the current model, the replication complex is further processed as infection progresses, with the resulting processed complex switching to transcription of the minus-strand into both full-length positive-strand genomic RNA, as well as the 26S subgenomic positive-strand RNA containing the structural genes. Several conserved sequence elements (CSEs) of alphavirus have been identified to potentially play a role in the various RNA replication steps including; a complement of the 5′ UTR in the replication of plus-strand RNAs from a minus-strand template, a 51-nt CSE in the replication of minus-strand synthesis from the genomic template, a 24-nt CSE in the junction region between the nsPs and the 26S RNA in the transcription of the subgenomic RNA from the minus-strand, and a 3′ 19-nt CSE in minus-strand synthesis from the plus-strand template.

[0320] Following the replication of the various RNA species, virus particles are then typically assembled in the natural lifecycle of the virus. The 26S RNA is translated and the resulting proteins further processed to produce the structural proteins including capsid protein, glycoproteins E1 and E2, and two small polypeptides E3 and 6K (Strauss 1994). Encapsidation of viral RNA occurs, with capsid proteins normally specific for only genomic RNA being packaged, followed by virion assembly and budding at the membrane surface.

[0321] V.C.2. Alphavirus as a Delivery Vector

[0322] Alphaviruses (including alphavirus sequences, features, and other elements) can be used to generate alphavirus-based delivery vectors (also be referred to as alphavirus vectors, alphavirus viral vectors, alphavirus vaccine vectors, self-replicating RNA (srRNA) vectors, or self-amplifying mRNA (SAM) vectors). Alphaviruses have previously been engineered for use as expression vector systems (Pushko 1997, Rheme 2004). Alphaviruses offer several advantages, particularly in a vaccine setting where heterologous antigen expression can be desired. Due to its ability to self-replicate in the host cytosol, alphavirus vectors are generally able to produce high copy numbers of the expression cassette within a cell resulting in a high level of heterologous antigen production. Additionally, the vectors are generally transient, resulting in improved biosafety as well as reduced induction of immunological tolerance to the vector. The public, in general, also lacks pre-existing immunity to alphavirus vectors as compared to other standard viral vectors, such as human adenovirus. Alphavirus based vectors also generally result in cytotoxic responses to infected cells. Cytotoxicity, to a certain degree, can be important in a vaccine setting to properly stimulate an immune response to the heterologous antigen expressed. However, the degree of desired cytotoxicity can be a balancing act, and thus several attenuated alphaviruses have been developed, including the TC-83 strain of VEE. Thus, an example of an antigen expression vector described herein can utilize an alphavirus backbone that allows for a high level of antigen expression, stimulates a robust immune response to antigen, does not stimulate an immune response to the vector itself, and can be used in a safe manner. Furthermore, the antigen expression cassette can be designed to stimulate different levels of an immune response through optimization of which alphavirus sequences the vector uses, including, but not limited to, sequences derived from VEE or its attenuated derivative TC-83.

[0323] Several expression vector design strategies have been engineered using alphavirus sequences (Pushko 1997). In one strategy, a alphavirus vector design includes inserting a second copy of the 26S promoter sequence elements downstream of the structural protein genes, followed by a heterologous gene (Frolov 1993). Thus, in addition to the natural non-structural and structural proteins, an additional subgenomic RNA is produced that expresses the heterologous protein. In this system, all the elements for production of infectious virions are present and, therefore, repeated rounds of infection of the expression vector in non-infected cells can occur.

[0324] Another expression vector design makes use of helper virus systems (Pushko 1997). In this strategy, the structural proteins are replaced by a heterologous gene. Thus, following self-replication of viral RNA mediated by still intact non-structural genes, the 26S subgenomic RNA provides for expression of the heterologous protein. Traditionally, additional vectors that expresses the structural proteins are then supplied in trans, such as by co-transfection of a cell line, to produce infectious virus. A system is described in detail in U.S. Pat. No. 8,093,021, which is herein incorporated by reference in its entirety, for all purposes. The helper vector system provides the benefit of limiting the possibility of forming infectious particles and, therefore, improves biosafety. In addition, the helper vector system reduces the total vector length, potentially improving the replication and expression efficiency. Thus, an example of an antigen expression vector described herein can utilize an alphavirus backbone wherein the structural proteins are replaced by an antigen cassette, the resulting vector both reducing biosafety concerns, while at the same time promoting efficient expression due to the reduction in overall expression vector size.

[0325] V.C.3. Self-Amplifying Virus Production In Vitro

[0326] A convenient technique well-known in the art for RNA production is in vitro transcription (IVT). In this technique, a DNA template of the desired vector is first produced by techniques well-known to those in the art, including standard molecular biology techniques such as cloning, restriction digestion, ligation, gene synthesis (e.g., chemical and/or enzymatic synthesis), and polymerase chain reaction (PCR).

[0327] The DNA template contains a RNA polymerase promoter at the 5′ end of the sequence desired to be transcribed into RNA (e.g., SAM). Promoters include, but are not limited to, bacteriophage polymerase promoters such as T3, T7, K11, or SP6. Depending on the specific RNA polymerase promoter sequence chosen, additional 5′ nucleotides can transcribed in addition to the desired sequence. For example, the canonical T7 promoter can be referred to by the sequence TAATACGACTCACTATAGG (SEQ ID NO: 118), in which an IVT reaction using the DNA template TAATACGACTCACTATAGGN (SEQ ID NO: 119) for the production of desired sequence N will result in the mRNA sequence GG-N. In general, and without wishing to be bound by theory, T7 polymerase more efficiently transcribes RNA transcripts beginning with guanosine. In instances where additional 5′ nucleotides are not desired (e.g., no additional GG), the RNA polymerase promoter contained in the DNA template can be a sequence the results in transcripts containing only the 5′ nucleotides of the desired sequence, e.g., a SAM having the native 5′ sequence of the self-replicating virus from which the SAM vector is derived. For example, a minimal T7 promoter can be referred to by the sequence TAATACGACTCACTATA (SEQ ID NO: 120), in which an IVT reaction using the DNA template TAATACGACTCACTATAN (SEQ ID NO: 121) for the production of desired sequence N will result in the mRNA sequence N. Likewise, a minimal SP6 promoter referred to by the sequence ATTTAGGTGACACTATA (SEQ ID NO: 122) can be used to generate transcripts without additional 5′ nucleotides. In a typical IVT reaction, the DNA template is incubated with the appropriate RNA polymerase enzyme, buffer agents, and nucleotides (NTPs).

[0328] The resulting RNA polynucleotide can optionally be further modified including, but limited to, addition of a 5′ cap structure such as 7-methylguanosine or a related structure, and optionally modifying the 3′ end to include a polyadenylate (polyA) tail. In a modified IVT reaction, RNA is capped with a 5′ cap structure co-transcriptionally through the addition of cap analogues during IVT. Cap analogues can include dinucleotide (m⁷G-ppp-N) cap analogues or trinucleotide (m⁷G-ppp-N-N) cap analogues, where N represents a nucleotide or modified nucleotide (e.g., ribonucleosides including, but not limited to, adenosine, guanosine, cytidine, and uradine). Exemplary cap analogues and their use in IVT reactions are also described in greater detail in U.S. Pat. No. 10,519,189, herein incorporated by reference for all purposes. As discussed, T7 polymerase more efficiently transcribes RNA transcripts beginning with guanosine. To improve transcription efficiency in templates that do not begin with guanosine, a trinucleotide cap analogue (m⁷G-ppp-N-N) can be used. The trinucleotide cap analogue can increase transcription efficiency 2, 3, 4, 5, 6, 7, 8, 9, 10, 11, 12, 13, 14, 15, 16, 17, 18, 19, 20-fold or more relative to an IVT reaction using a dinucleotide cap analogue (m⁷G-ppp-N).

[0329] A 5′ cap structure can also be added following transcription, such as using a vaccinia capping system (e.g., NEB Cat. No. M2080) containing mRNA 2′-O-methyltransferase and S-Adenosyl methionine.

[0330] The resulting RNA polynucleotide can optionally be further modified separately from or in addition to the capping techniques described including, but limited to, modifying the 3′ end to include a polyadenylate (polyA) tail.

[0331] The RNA can then be purified using techniques well-known in the field, such as phenol-chloroform extraction or column purification (e.g., chromatography-based purification).

[0332] V.C.4. Delivery Via Lipid Nanoparticle

[0333] An important aspect to consider in vaccine vector design is immunity against the vector itself (Riley 2017). This may be in the form of preexisting immunity to the vector itself, such as with certain human adenovirus systems, or in the form of developing immunity to the vector following administration of the vaccine. The latter is an important consideration if multiple administrations of the same vaccine are performed, such as separate priming and boosting doses, or if the same vaccine vector system is to be used to deliver different antigen cassettes.

[0334] In the case of alphavirus vectors, the standard delivery method is the previously discussed helper virus system that provides capsid, E1, and E2 proteins in trans to produce infectious viral particles. However, it is important to note that the E1 and E2 proteins are often major targets of neutralizing antibodies (Strauss 1994). Thus, the efficacy of using alphavirus vectors to deliver antigens of interest to target cells may be reduced if infectious particles are targeted by neutralizing antibodies.

[0335] An alternative to viral particle mediated gene delivery is the use of nanomaterials to deliver expression vectors (Riley 2017). Nanomaterial vehicles, importantly, can be made of non-immunogenic materials and generally avoid stimulating immunity to the delivery vector itself. These materials can include, but are not limited to, lipids, inorganic nanomaterials, and other polymeric materials. Lipids can be cationic, anionic, or neutral. The materials can be synthetic or naturally derived, and in some instances biodegradable. Lipids can include fats, cholesterol, phospholipids, lipid conjugates including, but not limited to, polyethyleneglycol (PEG) conjugates (PEGylated lipids), waxes, oils, glycerides, and fat soluble vitamins.

[0336] Lipid nanoparticles (LNPs) are an attractive delivery system due to the amphiphilic nature of lipids enabling formation of membranes and vesicle like structures (Riley 2017). In general, these vesicles deliver the expression vector by absorbing into the membrane of target cells and releasing nucleic acid into the cytosol. In addition, LNPs can be further modified or functionalized to facilitate targeting of specific cell types. Another consideration in LNP design is the balance between targeting efficiency and cytotoxicity. Lipid compositions generally include defined mixtures of cationic, neutral, anionic, and amphipathic lipids. In some instances, specific lipids are included to prevent LNP aggregation, prevent lipid oxidation, or provide functional chemical groups that facilitate attachment of additional moieties. Lipid composition can influence overall LNP size and stability. In an example, the lipid composition comprises dilinoleylmethyl-4-dimethylaminobutyrate (MC3) or MC3-like molecules. MC3 and MC3-like lipid compositions can be formulated to include one or more other lipids, such as a PEG or PEG-conjugated lipid, a sterol, or neutral lipids.

[0337] Nucleic-acid vectors, such as expression vectors, exposed directly to serum can have several undesirable consequences, including degradation of the nucleic acid by serum nucleases or off-target stimulation of the immune system by the free nucleic acids. Therefore, encapsulation of the alphavirus vector can be used to avoid degradation, while also avoiding potential off-target effects. In certain examples, an alphavirus vector is fully encapsulated within the delivery vehicle, such as within the aqueous interior of an LNP. Encapsulation of the alphavirus vector within an LNP can be carried out by techniques well-known to those skilled in the art, such as microfluidic mixing and droplet generation carried out on a microfluidic droplet generating device. Such devices include, but are not limited to, standard T-junction devices or flow-focusing devices. In an example, the desired lipid formulation, such as MC3 or MC3-like containing compositions, is provided to the droplet generating device in parallel with the alphavirus delivery vector and other desired agents, such that the delivery vector and desired agents are fully encapsulated within the interior of the MC3 or MC3-like based LNP. In an example, the droplet generating device can control the size range and size distribution of the LNPs produced. For example, the LNP can have a size ranging from 1 to 1000 nanometers in diameter, e.g., 1, 10, 50, 100, 500, or 1000 nanometers. Following droplet generation, the delivery vehicles encapsulating the expression vectors can be further treated or modified to prepare them for administration.

[0338] V.D. Chimpanzee Adenovirus (ChAd)

[0339] V.D.1. Viral Delivery with Chimpanzee Adenovirus

[0340] Vaccine compositions for delivery of one or more antigens (e.g., via an antigen cassette) can be created by providing adenovirus nucleotide sequences of chimpanzee origin, a variety of novel vectors, and cell lines expressing chimpanzee adenovirus genes. A nucleotide sequence of a chimpanzee C68 adenovirus (also referred to herein as ChAdV68) can be used in a vaccine composition for antigen delivery (See SEQ ID NO: 1). Use of C68 adenovirus derived vectors is described in further detail in U.S. Pat. No. 6,083,716, which is herein incorporated by reference in its entirety, for all purposes. ChAdV68-based vectors and delivery systems are described in detail in US App. Pub. No. US20200197500A1 and international patent application publication WO2020243719A1, each of which is herein incorporated by reference for all purposes.

[0341] In a further aspect, provided herein is a recombinant adenovirus comprising the DNA sequence of a chimpanzee adenovirus such as C68 and an antigen cassette operatively linked to regulatory sequences directing its expression. The recombinant virus is capable of infecting a mammalian, preferably a human, cell and capable of expressing the antigen cassette product in the cell. In this vector, the native chimpanzee E1 gene, and/or E3 gene, and/or E4 gene can be deleted. An antigen cassette can be inserted into any of these sites of gene deletion. The antigen cassette can include an antigen against which a primed immune response is desired.

[0342] In another aspect, provided herein is a mammalian cell infected with a chimpanzee adenovirus such as C68.

[0343] In still a further aspect, a novel mammalian cell line is provided which expresses a chimpanzee adenovirus gene (e.g., from C68) or functional fragment thereof.

[0344] In still a further aspect, provided herein is a method for delivering an antigen cassette into a mammalian cell comprising the step of introducing into the cell an effective amount of a chimpanzee adenovirus, such as C68, that has been engineered to express the antigen cassette.

[0345] Still another aspect provides a method for stimulating an immune response in a mammalian host to treat cancer. The method can comprise the step of administering to the host an effective amount of a recombinant chimpanzee adenovirus, such as C68, comprising an antigen cassette that encodes one or more antigens from the tumor against which the immune response is targeted.

[0346] Still another aspect provides a method for stimulating an immune response in a mammalian host to treat or prevent a disease in a subject, such as an infectious disease. The method can comprise the step of administering to the host an effective amount of a recombinant chimpanzee adenovirus, such as C68, comprising an antigen cassette that encodes one or more antigens, such as from the infectious disease against which the immune response is targeted.

[0347] Also disclosed is a non-simian mammalian cell that expresses a chimpanzee adenovirus gene obtained from the sequence of SEQ ID NO: 1. The gene can be selected from the group consisting of the adenovirus E1A, E1B, E2A, E2B, E3, E4, L1, L2, L3, L4 and L5 of SEQ ID NO: 1.

[0348] Also disclosed is a nucleic acid molecule comprising a chimpanzee adenovirus DNA sequence comprising a gene obtained from the sequence of SEQ ID NO: 1. The gene can be selected from the group consisting of said chimpanzee adenovirus E1A, E1B, E2A, E2B, E3, E4, L1, L2, L3, L4 and L5 genes of SEQ ID NO: 1. In some aspects the nucleic acid molecule comprises SEQ ID NO: 1. In some aspects the nucleic acid molecule comprises the sequence of SEQ ID NO: 1, lacking at least one gene selected from the group consisting of E1A, E1B, E2A, E2B, E3, E4, L1, L2, L3, L4 and L5 genes of SEQ ID NO: 1.

[0349] Also disclosed is a vector comprising a chimpanzee adenovirus DNA sequence obtained from SEQ ID NO: 1 and an antigen cassette operatively linked to one or more regulatory sequences which direct expression of the cassette in a heterologous host cell, optionally wherein the chimpanzee adenovirus DNA sequence comprises at least the cis-elements necessary for replication and virion encapsidation, the cis-elements flanking the antigen cassette and regulatory sequences. In some aspects, the chimpanzee adenovirus DNA sequence comprises a gene selected from the group consisting of E1A, E1B, E2A, E2B, E3, E4, L1, L2, L3, L4 and L5 gene sequences of SEQ ID NO: 1. In some aspects the vector can lack the E1A and/or E1B gene.

[0350] Also disclosed herein is a adenovirus vector comprising: a partially deleted E4 gene comprising a deleted or partially-deleted E4orf2 region and a deleted or partially-deleted E4orf3 region, and optionally a deleted or partially-deleted E4orf4 region. The partially deleted E4 can comprise an E4 deletion of at least nucleotides 34,916 to 35,642 of the sequence shown in SEQ ID NO:1, and wherein the vector comprises at least nucleotides 2 to 36,518 of the sequence set forth in SEQ ID NO:1. The partially deleted E4 can comprise an E4 deletion of at least a partial deletion of nucleotides 34,916 to 34,942 of the sequence shown in SEQ ID NO:1, at least a partial deletion of nucleotides 34,952 to 35,305 of the sequence shown in SEQ ID NO:1, and at least a partial deletion of nucleotides 35,302 to 35,642 of the sequence shown in SEQ ID NO:1, and wherein the vector comprises at least nucleotides 2 to 36,518 of the sequence set forth in SEQ ID NO:1 The partially deleted E4 can comprise an E4 deletion of at least nucleotides 34,980 to 36,516 of the sequence shown in SEQ ID NO:1, and wherein the vector comprises at least nucleotides 2 to 36,518 of the sequence set forth in SEQ ID NO:1. The partially deleted E4 can comprise an E4 deletion of at least nucleotides 34,979 to 35,642 of the sequence shown in SEQ ID NO:1, and wherein the vector comprises at least nucleotides 2 to 36,518 of the sequence set forth in SEQ ID NO:1. The partially deleted E4 can comprise an E4 deletion of at least a partial deletion of E4Orf2, a fully deleted E4Orf3, and at least a partial deletion of E4Orf4. The partially deleted E4 can comprise an E4 deletion of at least a partial deletion of E4Orf2, at least a partial deletion of E4Orf3, and at least a partial deletion of E4Orf4. The partially deleted E4 can comprise an E4 deletion of at least a partial deletion of E4Orf1, a fully deleted E4Orf2, and at least a partial deletion of E4Orf3. The partially deleted E4 can comprise an E4 deletion of at least a partial deletion of E4Orf2 and at least a partial deletion of E4Orf3. The partially deleted E4 can comprise an E4 deletion between the start site of E4Orf1 to the start site of E4Orf5. The partially deleted E4 can be an E4 deletion adjacent to the start site of E4Orf1. The partially deleted E4 can be an E4 deletion adjacent to the start site of E4Orf2. The partially deleted E4 can be an E4 deletion adjacent to the start site of E4Orf3. The partially deleted E4 can be an E4 deletion adjacent to the start site of E4Orf4. The E4 deletion can be at least 50, at least 100, at least 200, at least 300, at least 400, at least 500, at least 600, at least 700, at least 800, at least 900, at least 1000, at least 1100, at least 1200, at least 1300, at least 1400, at least 1500, at least 1600, at least 1700, at least 1800, at least 1900, or at least 2000 nucleotides. The E4 deletion can be at least 700 nucleotides. The E4 deletion can be at least 1500 nucleotides. The E4 deletion can be 50 or less, 100 or less, 200 or less, 300 or less, 400 or less, 500 or less, 600 or less, 700 or less, 800 or less, 900 or less, 1000 or less, 1100 or less, 1200 or less, 1300 or less, 1400 or less, 1500 or less, 1600 or less, 1700 or less, 1800 or less, 1900 or less, or 2000 or less nucleotides. The E4 deletion can be 750 nucleotides or less. The E4 deletion can be at least 1550 nucleotides or less.

[0351] The partially deleted E4 gene can be the E4 gene sequence shown in SEQ ID NO:1 that lacks at least nucleotides 34,916 to 35,642 of the sequence shown in SEQ ID NO:1. The partially deleted E4 gene can be the E4 gene sequence shown in SEQ ID NO:1 that lacks the E4 gene sequence shown in SEQ ID NO:1 and that lacks at least nucleotides 34,916 to 34,942, nucleotides 34,952 to 35,305 of the sequence shown in SEQ ID NO:1, and nucleotides 35,302 to 35,642 of the sequence shown in SEQ ID NO:1. The partially deleted E4 gene can be the E4 gene sequence shown in SEQ ID NO:1 and that lacks at least nucleotides 34,980 to 36,516 of the sequence shown in SEQ ID NO:1. The partially deleted E4 gene can be the E4 gene sequence shown in SEQ ID NO:1 and that lacks at least nucleotides 34,979 to 35,642 of the sequence shown in SEQ ID NO:1. The adenovirus vector having the partially deleted E4 gene can have a cassette, wherein the cassette comprises at least one payload nucleic acid sequence, and wherein the cassette comprises at least one promoter sequence operably linked to the at least one payload nucleic acid sequence. The adenovirus vector having the partially deleted E4 gene can have one or more genes or regulatory sequences of the ChAdV68 sequence shown in SEQ ID NO: 1, optionally wherein the one or more genes or regulatory sequences comprise at least one of the chimpanzee adenovirus inverted terminal repeat (ITR), E1A, E1B, E2A, E2B, E3, E4, L1, L2, L3, L4, and L5 genes of the sequence shown in SEQ ID NO: 1. The adenovirus vector having the partially deleted E4 gene can have nucleotides 2 to 34,916 of the sequence shown in SEQ ID NO:1, wherein the partially deleted E4 gene is 3′ of the nucleotides 2 to 34,916, and optionally the nucleotides 2 to 34,916 additionally lack nucleotides 577 to 3403 of the sequence shown in SEQ ID NO:1 corresponding to an E1 deletion and/or lack nucleotides 27,125 to 31,825 of the sequence shown in SEQ ID NO:1 corresponding to an E3 deletion. The adenovirus vector having the partially deleted E4 gene can have nucleotides 35,643 to 36,518 of the sequence shown in SEQ ID NO:1, and wherein the partially deleted E4 gene is 5′ of the nucleotides 35,643 to 36,518. The adenovirus vector having the partially deleted E4 gene can have nucleotides 2 to 34,916 of the sequence shown in SEQ ID NO:1, wherein the partially deleted E4 gene is 3′ of the nucleotides 2 to 34,916, the nucleotides 2 to 34,916 additionally lack nucleotides 577 to 3403 of the sequence shown in SEQ ID NO:1 corresponding to an E1 deletion and lack nucleotides 27,125 to 31,825 of the sequence shown in SEQ ID NO:1 corresponding to an E3 deletion. The adenovirus vector having the partially deleted E4 gene can have nucleotides 2 to 34,916 of the sequence shown in SEQ ID NO:1, wherein the partially deleted E4 gene is 3′ of the nucleotides 2 to 34,916, the nucleotides 2 to 34,916 additionally lack nucleotides 577 to 3403 of the sequence shown in SEQ ID NO:1 corresponding to an E1 deletion and lack nucleotides 27,125 to 31,825 of the sequence shown in SEQ ID NO:1 corresponding to an E3 deletion, and have nucleotides 35,643 to 36,518 of the sequence shown in SEQ ID NO:1, and wherein the partially deleted E4 gene is 5′ of the nucleotides 35,643 to 36,518.

[0352] The partially deleted E4 gene can be the E4 gene sequence shown in SEQ ID NO:1 that lacks at least nucleotides 34,916 to 35,642 of the sequence shown in SEQ ID NO:1, nucleotides 2 to 34,916 of the sequence shown in SEQ ID NO:1, wherein the partially deleted E4 gene is 3′ of the nucleotides 2 to 34,916, the nucleotides 2 to 34,916 additionally lack nucleotides 577 to 3403 of the sequence shown in SEQ ID NO:1 corresponding to an E1 deletion and lack nucleotides 27,125 to 31,825 of the sequence shown in SEQ ID NO:1 corresponding to an E3 deletion, and have nucleotides 35,643 to 36,518 of the sequence shown in SEQ ID NO:1, and wherein the partially deleted E4 gene is 5′ of the nucleotides 35,643 to 36,518.

[0353] Also disclosed herein is a host cell transfected with a vector disclosed herein such as a C68 vector engineered to expression an antigen cassette. Also disclosed herein is a human cell that expresses a selected gene introduced therein through introduction of a vector disclosed herein into the cell.

[0354] Also disclosed herein is a method for delivering an antigen cassette to a mammalian cell comprising introducing into said cell an effective amount of a vector disclosed herein such as a C68 vector engineered to expression the antigen cassette.

[0355] Also disclosed herein is a method for producing an antigen comprising introducing a vector disclosed herein into a mammalian cell, culturing the cell under suitable conditions and producing the antigen.

[0356] V.D.2. E1-Expressing Complementation Cell Lines

[0357] To generate recombinant chimpanzee adenoviruses (Ad) deleted in any of the genes described herein, the function of the deleted gene region, if essential to the replication and infectivity of the virus, can be supplied to the recombinant virus by a helper virus or cell line, i.e., a complementation or packaging cell line. For example, to generate a replication-defective chimpanzee adenovirus vector, a cell line can be used which expresses the E1 gene products of the human or chimpanzee adenovirus; such a cell line can include HEK293 or variants thereof. The protocol for the generation of the cell lines expressing the chimpanzee E1 gene products (Examples 3 and 4 of U.S. Pat. No. 6,083,716) can be followed to generate a cell line which expresses any selected chimpanzee adenovirus gene.

[0358] An AAV augmentation assay can be used to identify a chimpanzee adenovirus E1-expressing cell line. This assay is useful to identify E1 function in cell lines made by using the E1 genes of other uncharacterized adenoviruses, e.g., from other species. That assay is described in Example 4B of U.S. Pat. No. 6,083,716.

[0359] A selected chimpanzee adenovirus gene, e.g., E1, can be under the transcriptional control of a promoter for expression in a selected parent cell line. Inducible or constitutive promoters can be employed for this purpose. Among inducible promoters are included the sheep metallothionine promoter, inducible by zinc, or the mouse mammary tumor virus (MMTV) promoter, inducible by a glucocorticoid, particularly, dexamethasone. Other inducible promoters, such as those identified in International patent application WO95/13392, incorporated by reference herein can also be used in the production of packaging cell lines. Constitutive promoters in control of the expression of the chimpanzee adenovirus gene can be employed also.

[0360] A parent cell can be selected for the generation of a novel cell line expressing any desired C68 gene. Without limitation, such a parent cell line can be HeLa [ATCC Accession No. CCL 2], A549 [ATCC Accession No. CCL 185], KB [CCL 17], Detroit [e.g., Detroit 510, CCL 72] and WI-38 [CCL 75] cells. Other suitable parent cell lines can be obtained from other sources. Parent cell lines can include CHO, HEK293 or variants thereof, 911, HeLa, A549, LP-293, PER.C6, or AE1-2a.

[0361] An E1-expressing cell line can be useful in the generation of recombinant chimpanzee adenovirus E1 deleted vectors. Cell lines constructed using essentially the same procedures that express one or more other chimpanzee adenoviral gene products are useful in the generation of recombinant chimpanzee adenovirus vectors deleted in the genes that encode those products. Further, cell lines which express other human Ad E1 gene products are also useful in generating chimpanzee recombinant Ads.

[0362] V.D.3. Recombinant Viral Particles as Vectors

[0363] The compositions disclosed herein can comprise viral vectors, that deliver at least one antigen to cells. Such vectors comprise a chimpanzee adenovirus DNA sequence such as C68 and an antigen cassette operatively linked to regulatory sequences which direct expression of the cassette. The C68 vector is capable of expressing the cassette in an infected mammalian cell. The C68 vector can be functionally deleted in one or more viral genes. An antigen cassette comprises at least one antigen under the control of one or more regulatory sequences such as a promoter. Optional helper viruses and/or packaging cell lines can supply to the chimpanzee viral vector any necessary products of deleted adenoviral genes.

[0364] The term “functionally deleted” means that a sufficient amount of the gene region is removed or otherwise altered, e.g., by mutation or modification, so that the gene region is no longer capable of producing one or more functional products of gene expression. Mutations or modifications that can result in functional deletions include, but are not limited to, nonsense mutations such as introduction of premature stop codons and removal of canonical and non-canonical start codons, mutations that alter mRNA splicing or other transcriptional processing, or combinations thereof. If desired, the entire gene region can be removed.

[0365] Modifications of the nucleic acid sequences forming the vectors disclosed herein, including sequence deletions, insertions, and other mutations may be generated using standard molecular biological techniques and are within the scope of this invention.

[0366] V.D.4. Construction of the Viral Plasmid Vector

[0367] The chimpanzee adenovirus C68 vectors useful in this invention include recombinant, defective adenoviruses, that is, chimpanzee adenovirus sequences functionally deleted in the E1a or E1b genes, and optionally bearing other mutations, e.g., temperature-sensitive mutations or deletions in other genes. It is anticipated that these chimpanzee sequences are also useful in forming hybrid vectors from other adenovirus and/or adeno-associated virus sequences. Homologous adenovirus vectors prepared from human adenoviruses are described in the published literature [see, for example, Kozarsky I and II, cited above, and references cited therein, U.S. Pat. No. 5,240,846].

[0368] In the construction of useful chimpanzee adenovirus C68 vectors for delivery of an antigen cassette to a human (or other mammalian) cell, a range of adenovirus nucleic acid sequences can be employed in the vectors. A vector comprising minimal chimpanzee C68 adenovirus sequences can be used in conjunction with a helper virus to produce an infectious recombinant virus particle. The helper virus provides essential gene products required for viral infectivity and propagation of the minimal chimpanzee adenoviral vector. When only one or more selected deletions of chimpanzee adenovirus genes are made in an otherwise functional viral vector, the deleted gene products can be supplied in the viral vector production process by propagating the virus in a selected packaging cell line that provides the deleted gene functions in trans.

[0369] V.D.5. Recombinant Minimal Adenovirus

[0370] A minimal chimpanzee Ad C68 virus is a viral particle containing just the adenovirus cis-elements necessary for replication and virion encapsidation. That is, the vector contains the cis-acting 5′ and 3′ inverted terminal repeat (ITR) sequences of the adenoviruses (which function as origins of replication) and the native 5′ packaging/enhancer domains (that contain sequences necessary for packaging linear Ad genomes and enhancer elements for the E1 promoter). See, for example, the techniques described for preparation of a “minimal” human Ad vector in International Patent Application WO96/13597 and incorporated herein by reference.

[0371] V.D.6. Other Defective Adenoviruses

[0372] Recombinant, replication-deficient adenoviruses can also contain more than the minimal chimpanzee adenovirus sequences. These other Ad vectors can be characterized by deletions of various portions of gene regions of the virus, and infectious virus particles formed by the optional use of helper viruses and/or packaging cell lines.

[0373] As one example, suitable vectors may be formed by deleting all or a sufficient portion of the C68 adenoviral immediate early gene E1a and delayed early gene E1b, so as to eliminate their normal biological functions. Replication-defective E1-deleted viruses are capable of replicating and producing infectious virus when grown on a chimpanzee adenovirus-transformed, complementation cell line containing functional adenovirus E1a and E1b genes which provide the corresponding gene products in trans. Based on the homologies to known adenovirus sequences, it is anticipated that, as is true for the human recombinant E1-deleted adenoviruses of the art, the resulting recombinant chimpanzee adenovirus is capable of infecting many cell types and can express antigen(s), but cannot replicate in most cells that do not carry the chimpanzee E1 region DNA unless the cell is infected at a very high multiplicity of infection.

[0374] As another example, all or a portion of the C68 adenovirus delayed early gene E3 can be eliminated from the chimpanzee adenovirus sequence which forms a part of the recombinant virus.

[0375] Chimpanzee adenovirus C68 vectors can also be constructed having a deletion of the E4 gene. Still another vector can contain a deletion in the delayed early gene E2a.

[0376] Deletions can also be made in any of the late genes L1 through L5 of the chimpanzee C68 adenovirus genome. Similarly, deletions in the intermediate genes IX and IVa2 can be useful for some purposes. Other deletions may be made in the other structural or non-structural adenovirus genes.

[0377] The above discussed deletions can be used individually, i.e., an adenovirus sequence can contain deletions of E1 only. Alternatively, deletions of entire genes or portions thereof effective to destroy or reduce their biological activity can be used in any combination. For example, in one exemplary vector, the adenovirus C68 sequence can have deletions of the E1 genes and the E4 gene, or of the E1, E2a and E3 genes, or of the E1 and E3 genes, or of E1, E2a and E4 genes, with or without deletion of E3, and so on. As discussed above, such deletions can be used in combination with other mutations, such as temperature-sensitive mutations, to achieve a desired result.

[0378] The cassette comprising antigen(s) be inserted optionally into any deleted region of the chimpanzee C68 Ad virus. Alternatively, the cassette can be inserted into an existing gene region to disrupt the function of that region, if desired.

[0379] V.D.7. Helper Viruses

[0380] Depending upon the chimpanzee adenovirus gene content of the viral vectors employed to carry the antigen cassette, a helper adenovirus or non-replicating virus fragment can be used to provide sufficient chimpanzee adenovirus gene sequences to produce an infective recombinant viral particle containing the cassette.

[0381] Useful helper viruses contain selected adenovirus gene sequences not present in the adenovirus vector construct and/or not expressed by the packaging cell line in which the vector is transfected. A helper virus can be replication-defective and contain a variety of adenovirus genes in addition to the sequences described above. The helper virus can be used in combination with the E1-expressing cell lines described herein.

[0382] For C68, the “helper” virus can be a fragment formed by clipping the C terminal end of the C68 genome with SspI, which removes about 1300 bp from the left end of the virus. This clipped virus is then co-transfected into an E1-expressing cell line with the plasmid DNA, thereby forming the recombinant virus by homologous recombination with the C68 sequences in the plasmid.

[0383] Helper viruses can also be formed into poly-cation conjugates as described in Wu et al, J. Biol. Chem., 264:16985-16987 (1989); K. J. Fisher and J. M. Wilson, Biochem. J., 299:49 (Apr. 1, 1994). Helper virus can optionally contain a reporter gene. A number of such reporter genes are known to the art. The presence of a reporter gene on the helper virus which is different from the antigen cassette on the adenovirus vector allows both the Ad vector and the helper virus to be independently monitored. This second reporter is used to enable separation between the resulting recombinant virus and the helper virus upon purification.

[0384] V.D.8. Assembly of Viral Particle and Infection of a Cell Line

[0385] Assembly of the selected DNA sequences of the adenovirus, the antigen cassette, and other vector elements into various intermediate plasmids and shuttle vectors, and the use of the plasmids and vectors to produce a recombinant viral particle can all be achieved using conventional techniques. Such techniques include conventional cloning techniques of cDNA, in vitro recombination techniques (e.g., Gibson assembly), use of overlapping oligonucleotide sequences of the adenovirus genomes, polymerase chain reaction, and any suitable method which provides the desired nucleotide sequence. Standard transfection and co-transfection techniques are employed, e.g., CaPO4 precipitation techniques or liposome-mediated transfection methods such as lipofectamine Other conventional methods employed include homologous recombination of the viral genomes, plaquing of viruses in agar overlay, methods of measuring signal generation, and the like.

[0386] For example, following the construction and assembly of the desired antigen cassette-containing viral vector, the vector can be transfected in vitro in the presence of a helper virus into the packaging cell line. Homologous recombination occurs between the helper and the vector sequences, which permits the adenovirus-antigen sequences in the vector to be replicated and packaged into virion capsids, resulting in the recombinant viral vector particles.

[0387] The resulting recombinant chimpanzee C68 adenoviruses are useful in transferring an antigen cassette to a selected cell. In in vivo experiments with the recombinant virus grown in the packaging cell lines, the E1-deleted recombinant chimpanzee adenovirus demonstrates utility in transferring a cassette to a non-chimpanzee, preferably a human, cell.

[0388] V.D.9. Use of the Recombinant Virus Vectors

[0389] The resulting recombinant chimpanzee C68 adenovirus containing the antigen cassette (produced by cooperation of the adenovirus vector and helper virus or adenoviral vector and packaging cell line, as described above) thus provides an efficient gene transfer vehicle which can deliver antigen(s) to a subject in vivo or ex vivo.

[0390] The above-described recombinant vectors are administered to humans according to published methods for gene therapy. A chimpanzee viral vector bearing an antigen cassette can be administered to a patient, preferably suspended in a biologically compatible solution or pharmaceutically acceptable delivery vehicle. A suitable vehicle includes sterile saline. Other aqueous and non-aqueous isotonic sterile injection solutions and aqueous and non-aqueous sterile suspensions known to be pharmaceutically acceptable carriers and well known to those of skill in the art may be employed for this purpose.

[0391] The chimpanzee adenoviral vectors are administered in sufficient amounts to transduce the human cells and to provide sufficient levels of antigen transfer and expression to provide a therapeutic benefit without undue adverse or with medically acceptable physiological effects, which can be determined by those skilled in the medical arts. Conventional and pharmaceutically acceptable routes of administration include, but are not limited to, direct delivery to the liver, intranasal, intravenous, intramuscular, subcutaneous, intradermal, oral and other parental routes of administration. Routes of administration may be combined, if desired.

[0392] Dosages of the viral vector will depend primarily on factors such as the condition being treated, the age, weight and health of the patient, and may thus vary among patients. The dosage will be adjusted to balance the therapeutic benefit against any side effects and such dosages may vary depending upon the therapeutic application for which the recombinant vector is employed. The levels of expression of antigen(s) can be monitored to determine the frequency of dosage administration.

[0393] Recombinant, replication defective adenoviruses can be administered in a “pharmaceutically effective amount”, that is, an amount of recombinant adenovirus that is effective in a route of administration to transfect the desired cells and provide sufficient levels of expression of the selected gene to provide a vaccinal benefit, i.e., some measurable level of protective immunity. C68 vectors comprising an antigen cassette can be co-administered with adjuvant. Adjuvant can be separate from the vector (e.g., alum) or encoded within the vector, in particular if the adjuvant is a protein. Adjuvants are well known in the art.

[0394] Conventional and pharmaceutically acceptable routes of administration include, but are not limited to, intranasal, intramuscular, intratracheal, subcutaneous, intradermal, rectal, oral and other parental routes of administration. Routes of administration may be combined, if desired, or adjusted depending upon the immunogen or the disease. For example, in prophylaxis of rabies, the subcutaneous, intratracheal and intranasal routes are preferred. The route of administration primarily will depend on the nature of the disease being treated.

[0395] The levels of immunity to antigen(s) can be monitored to determine the need, if any, for boosters. Following an assessment of antibody titers in the serum, for example, optional booster immunizations may be desired

### VI. Therapeutic and Manufacturing Methods

[0396] Also provided is a method of stimulating a tumor specific immune response in a subject, vaccinating against a tumor, treating and/or alleviating a symptom of cancer in a subject by administering to the subject one or more antigens such as a plurality of antigens identified using methods disclosed herein.

[0397] Also provided is a method of stimulating an infectious disease organism-specific immune response in a subject, vaccinating against an infectious disease organism, treating and/or alleviating a symptom of an infection associated with an infectious disease organism in a subject by administering to the subject one or more antigens such as a plurality of antigens identified using methods disclosed herein.

[0398] In some aspects, a subject has been diagnosed with cancer or is at risk of developing cancer. A subject can be a human, dog, cat, horse or any animal in which a tumor specific immune response is desired. A tumor can be any solid tumor such as breast, ovarian, prostate, lung, kidney, gastric, colon, testicular, head and neck, pancreas, brain, melanoma, and other tumors of tissue organs and hematological tumors, such as lymphomas and leukemias, including acute myelogenous leukemia, chronic myelogenous leukemia, chronic lymphocytic leukemia, T cell lymphocytic leukemia, and B cell lymphomas.

[0399] In some aspects, a subject has been diagnosed with an infection or is at risk of an infection (e.g., age, geographical/travel, and/or work-related increased risk of or predisposition to an infection, or at risk to a seasonal and/or novel disease infection).

[0400] An antigen can be administered in an amount sufficient to stimulate a CTL response. An antigen can be administered in an amount sufficient to stimulate a T cell response. An antigen can be administered in an amount sufficient to stimulate a B cell response. An antigen can be administered in an amount sufficient to stimulate both a T cell response and a B cell response.

[0401] An antigen can be administered alone or in combination with other therapeutic agents. Therapeutic agents can include those that target an infectious disease organism, such as an anti-viral or antibiotic agent.

[0402] In addition, a subject can be further administered an anti-immunosuppressive/immunostimulatory agent such as a checkpoint inhibitor. For example, the subject can be further administered an anti-CTLA antibody or anti-PD-1 or anti-PD-L1. Blockade of CTLA-4 or PD-L1 by antibodies can enhance the immune response to cancerous cells in the patient. In particular, CTLA-4 blockade has been shown effective when following a vaccination protocol.

[0403] The optimum amount of each antigen to be included in a vaccine composition and the optimum dosing regimen can be determined. For example, an antigen or its variant can be prepared for intravenous (i.v.) injection, sub-cutaneous (s.c.) injection, intradermal (i.d.) injection, intraperitoneal (i.p.) injection, intramuscular (i.m.) injection. Methods of injection include s.c., i.d., i.p., i.m., and i.v. Methods of DNA or RNA injection include i.d., i.m., s.c., i.p. and i.v. Other methods of administration of the vaccine composition are known to those skilled in the art.

[0404] A vaccine can be compiled so that the selection, number and/or amount of antigens present in the composition is/are tissue, cancer, infectious disease, and/or patient-specific. For instance, the exact selection of peptides can be guided by expression patterns of the parent proteins in a given tissue or guided by mutation or disease status of a patient. The selection can be dependent on the specific type of cancer, the specific infectious disease (e.g. a specific infectious disease isolate/strain the subject is infected with or at risk for infection by), the status of the disease, the goal of the vaccination (e.g., preventative or targeting an ongoing disease), earlier treatment regimens, the immune status of the patient, and, of course, the HLA-haplotype of the patient. Furthermore, a vaccine can contain individualized components, according to personal needs of the particular patient. Examples include varying the selection of antigens according to the expression of the antigen in the particular patient or adjustments for secondary treatments following a first round or scheme of treatment.

[0405] A patient can be identified for administration of an antigen vaccine through the use of various diagnostic methods, e.g., patient selection methods described further below. Patient selection can involve identifying mutations in, or expression patterns of, one or more genes. Patient selection can involve identifying the infectious disease of an ongoing infection. Patient selection can involve identifying risk of an infection by an infectious disease. In some cases, patient selection involves identifying the haplotype of the patient. The various patient selection methods can be performed in parallel, e.g., a sequencing diagnostic can identify both the mutations and the haplotype of a patient. The various patient selection methods can be performed sequentially, e.g., one diagnostic test identifies the mutations and separate diagnostic test identifies the haplotype of a patient, and where each test can be the same (e.g., both high-throughput sequencing) or different (e.g., one high-throughput sequencing and the other Sanger sequencing) diagnostic methods.

[0406] For a composition to be used as a vaccine for cancer or an infectious disease, antigens with similar normal self-peptides that are expressed in high amounts in normal tissues can be avoided or be present in low amounts in a composition described herein. On the other hand, if it is known that the tumor or infected cell of a patient expresses high amounts of a certain antigen, the respective pharmaceutical composition for treatment of this cancer or infection can be present in high amounts and/or more than one antigen specific for this particularly antigen or pathway of this antigen can be included.

[0407] Compositions comprising an antigen can be administered to an individual already suffering from cancer or an infection. In therapeutic applications, compositions are administered to a subject in an amount sufficient to stimulate an effective CTL response to the tumor antigen or infectious disease organism antigen and to cure or at least partially arrest symptoms and/or complications. An amount adequate to accomplish this is defined as “therapeutically effective dose.” Amounts effective for this use will depend on, e.g., the composition, the manner of administration, the stage and severity of the disease being treated, the weight and general state of health of the patient, and the judgment of the prescribing physician. It should be kept in mind that compositions can generally be employed in serious disease states, that is, life-threatening or potentially life threatening situations, especially when a cancer has metastasized or an infectious disease organism has induced organ damage and/or other immune pathology. In such cases, in view of the minimization of extraneous substances and the relative nontoxic nature of an antigen, it is possible and can be felt desirable by the treating physician to administer substantial excesses of these compositions.

[0408] For therapeutic use, administration can begin at the detection or surgical removal of tumors, or begin at the detection or treatment of an infection. This can be followed by boosting doses until at least symptoms are substantially abated and for a period thereafter, or immunity is considered to be provided (e.g., a memory B cell or T cell population, or antigen specific B cells or antibodies are produced).

[0409] The pharmaceutical compositions (e.g., vaccine compositions) for therapeutic treatment are intended for parenteral, topical, nasal, oral or local administration. A pharmaceutical compositions can be administered parenterally, e.g., intravenously, subcutaneously, intradermally, or intramuscularly. The compositions can be administered at the site of surgical excision to stimulate a local immune response to a tumor. The compositions can be administered to target specific infected tissues and/or cells of a subject. Disclosed herein are compositions for parenteral administration which comprise a solution of the antigen and vaccine compositions are dissolved or suspended in an acceptable carrier, e.g., an aqueous carrier. A variety of aqueous carriers can be used, e.g., water, buffered water, 0.9% saline, 0.3% glycine, hyaluronic acid and the like. These compositions can be sterilized by conventional, well known sterilization techniques, or can be sterile filtered. The resulting aqueous solutions can be packaged for use as is, or lyophilized, the lyophilized preparation being combined with a sterile solution prior to administration. The compositions may contain pharmaceutically acceptable auxiliary substances as required to approximate physiological conditions, such as pH adjusting and buffering agents, tonicity adjusting agents, wetting agents and the like, for example, sodium acetate, sodium lactate, sodium chloride, potassium chloride, calcium chloride, sorbitan monolaurate, triethanolamine oleate, etc.

[0410] Antigens can also be administered via liposomes, which target them to a particular cells tissue, such as lymphoid tissue. Liposomes are also useful in increasing half-life. Liposomes include emulsions, foams, micelles, insoluble monolayers, liquid crystals, phospholipid dispersions, lamellar layers and the like. In these preparations the antigen to be delivered is incorporated as part of a liposome, alone or in conjunction with a molecule which binds to, e.g., a receptor prevalent among lymphoid cells, such as monoclonal antibodies which bind to the CD45 antigen, or with other therapeutic or immunogenic compositions. Thus, liposomes filled with a desired antigen can be directed to the site of lymphoid cells, where the liposomes then deliver the selected therapeutic/immunogenic compositions. Liposomes can be formed from standard vesicle-forming lipids, which generally include neutral and negatively charged phospholipids and a sterol, such as cholesterol. The selection of lipids is generally guided by consideration of, e.g., liposome size, acid lability and stability of the liposomes in the blood stream. A variety of methods are available for preparing liposomes, as described in, e.g., Szoka et al., Ann. Rev. Biophys. Bioeng. 9; 467 (1980), U.S. Pat. Nos. 4,235,871, 4,501,728, 4,501,728, 4,837,028, and 5,019,369.

[0411] For targeting to the immune cells, a ligand to be incorporated into the liposome can include, e.g., antibodies or fragments thereof specific for cell surface determinants of the desired immune system cells. A liposome suspension can be administered intravenously, locally, topically, etc. in a dose which varies according to, inter alia, the manner of administration, the peptide being delivered, and the stage of the disease being treated.

[0412] For therapeutic or immunization purposes, nucleic acids encoding a peptide and optionally one or more of the peptides described herein can also be administered to the patient. A number of methods are conveniently used to deliver the nucleic acids to the patient. For instance, the nucleic acid can be delivered directly, as “naked DNA”. This approach is described, for instance, in Wolff et al., Science 247: 1465-1468 (1990) as well as U.S. Pat. Nos. 5,580,859 and 5,589,466. The nucleic acids can also be administered using ballistic delivery as described, for instance, in U.S. Pat. No. 5,204,253. Particles comprised solely of DNA can be administered. Alternatively, DNA can be adhered to particles, such as gold particles. Approaches for delivering nucleic acid sequences can include viral vectors, mRNA vectors, and DNA vectors with or without electroporation.

[0413] The nucleic acids can also be delivered complexed to cationic compounds, such as cationic lipids. Lipid-mediated gene delivery methods are described, for instance, in 9618372WOAWO 96/18372; 9324640WOAWO 93/24640; Mannino & Gould-Fogerite, BioTechniques 6(7): 682-691 (1988); U.S. Pat. No. 5,279,833 Rose U.S. Pat. Nos. 5,279,833; 9,106,309WOAWO 91/06309; and Feigner et al., Proc. Natl. Acad. Sci. USA 84: 7413-7414 (1987).

[0414] Antigens can also be included in viral vector-based vaccine platforms, such as vaccinia, fowlpox, self-replicating alphavirus, marabavirus, adenovirus (See, e.g., Tatsis et al., Adenoviruses, Molecular Therapy (2004) 10, 616-629), or lentivirus, including but not limited to second, third or hybrid second/third generation lentivirus and recombinant lentivirus of any generation designed to target specific cell types or receptors (See, e.g., Hu et al, Immunization Delivered by Lentiviral Vectors for Cancer and Infectious Diseases, Immunol Rev. (2011) 239(1): 45-61, Sakuma et al., Lentiviral vectors: basic to translational, Biochem J. (2012) 443(3):603-18, Cooper et al., Rescue of splicing-mediated intron loss maximizes expression in lentiviral vectors containing the human ubiquitin C promoter, Nucl. Acids Res. (2015) 43 (1): 682-690, Zufferey et al., Self-Inactivating Lentivirus Vector for Safe and Efficient In Vivo Gene Delivery, J. Virol. (1998) 72 (12): 9873-9880). Dependent on the packaging capacity of the above mentioned viral vector-based vaccine platforms, this approach can deliver one or more nucleotide sequences that encode one or more antigen peptides. The sequences may be flanked by non-mutated sequences, may be separated by linkers or may be preceded with one or more sequences targeting a subcellular compartment (See, e.g., Gros et al., Prospective identification of neoantigen-specific lymphocytes in the peripheral blood of melanoma patients, Nat Med. (2016) 22 (4):433-8, Stronen et al., Targeting of cancer neoantigens with donor-derived T cell receptor repertoires, Science. (2016) 352 (6291):1337-41, Lu et al., Efficient identification of mutated cancer antigens recognized by T cells associated with durable tumor regressions, Clin Cancer Res. (2014) 20(13):3401-10). Upon introduction into a host, infected cells express the antigens, and thereby stimulate a host immune (e.g., CTL) response against the peptide(s). Vaccinia vectors and methods useful in immunization protocols are described in, e.g., U.S. Pat. No. 4,722,848. Another vector is BCG (Bacille Calmette Guerin). BCG vectors are described in Stover et al. (Nature 351:456-460 (1991)). A wide variety of other vaccine vectors useful for therapeutic administration or immunization of antigens, e.g., Salmonella typhi vectors, and the like will be apparent to those skilled in the art from the description herein.

[0415] A means of administering nucleic acids uses minigene constructs encoding one or multiple epitopes. To create a DNA sequence encoding the selected CTL epitopes (minigene) for expression in human cells, the amino acid sequences of the epitopes are reverse translated. A human codon usage table is used to guide the codon choice for each amino acid. These epitope-encoding DNA sequences are directly adjoined, creating a continuous polypeptide sequence. To optimize expression and/or immunogenicity, additional elements can be incorporated into the minigene design. Examples of amino acid sequence that could be reverse translated and included in the minigene sequence include: helper T lymphocyte, epitopes, a leader (signal) sequence, and an endoplasmic reticulum retention signal. In addition, MHC presentation of CTL epitopes can be improved by including synthetic (e.g. poly-alanine) or naturally-occurring flanking sequences adjacent to the CTL epitopes. The minigene sequence is converted to DNA by assembling oligonucleotides that encode the plus and minus strands of the minigene. Overlapping oligonucleotides (30-100 bases long) are synthesized, phosphorylated, purified and annealed under appropriate conditions using well known techniques. The ends of the oligonucleotides are joined using T4 DNA ligase. This synthetic minigene, encoding the CTL epitope polypeptide, can then cloned into a desired expression vector.

[0416] Purified plasmid DNA can be prepared for injection using a variety of formulations. The simplest of these is reconstitution of lyophilized DNA in sterile phosphate-buffer saline (PBS). A variety of methods have been described, and new techniques can become available. As noted above, nucleic acids are conveniently formulated with cationic lipids. In addition, glycolipids, fusogenic liposomes, peptides and compounds referred to collectively as protective, interactive, non-condensing (PINC) could also be complexed to purified plasmid DNA to influence variables such as stability, intramuscular dispersion, or trafficking to specific organs or cell types.

[0417] Also disclosed is a method of manufacturing a vaccine, comprising performing the steps of a method disclosed herein; and producing a vaccine comprising a plurality of antigens or a subset of the plurality of antigens.

[0418] Antigens disclosed herein can be manufactured using methods known in the art. For example, a method of producing an antigen or a vector (e.g., a vector including at least one sequence encoding one or more antigens) disclosed herein can include culturing a host cell under conditions suitable for expressing the antigen or vector wherein the host cell comprises at least one polynucleotide encoding the antigen or vector, and purifying the antigen or vector. Standard purification methods include chromatographic techniques, electrophoretic, immunological, precipitation, dialysis, filtration, concentration, and chromatofocusing techniques.

[0419] Host cells can include a Chinese Hamster Ovary (CHO) cell, NS0 cell, yeast, or a HEK293 cell. Host cells can be transformed with one or more polynucleotides comprising at least one nucleic acid sequence that encodes an antigen or vector disclosed herein, optionally wherein the isolated polynucleotide further comprises a promoter sequence operably linked to the at least one nucleic acid sequence that encodes the antigen or vector. In certain embodiments the isolated polynucleotide can be cDNA.

### VII. Antigen Use and Administration

[0420] Vaccination methods, protocols, and schedules that can also be used include, but are not limited to, those described in international application publication WO2021092095, herein incorporated by reference for all purposes.

[0421] Each vector in a prime/boost strategy typically includes a cassette that includes antigens. Cassettes can include about 1-50 antigens, separated by linkers such as the natural sequence that normally surrounds each antigen or other non-natural linker sequences such as AAY. Cassettes can also include MHCII antigens such a tetanus toxoid antigen and PADRE antigen, which can be considered universal class II antigens. Cassettes can also include a targeting sequence such as a ubiquitin targeting sequence. In addition, each vaccine dose can be administered to the subject in conjunction with (e.g., concurrently, before, or after) an immune modulator. Each vaccine dose can be administered to the subject in conjunction with (e.g., concurrently, before, or after) a checkpoint inhibitor (CPI). CPI's can include those that inhibit CTLA4, PD1, and/or PDL1 such as antibodies or antigen-binding portions thereof. Such antibodies can include tremelimumab or durvalumab. Each vaccine dose can be administered to the subject in conjunction with (e.g., concurrently, before, or after) a cytokine, such as IL-2, IL-7, IL-12 (including IL-12 p35, p40, p70, and/or p70-fusion constructs), IL-15, or IL-21. Each vaccine dose can be administered to the subject in conjunction with (e.g., concurrently, before, or after) a modified cytokine (e.g., pegIL-2).

[0422] A vaccination protocol can be used to dose a subject with one or more antigens. A priming vaccine and a boosting vaccine can be used to dose the subject. The priming vaccine can be with any of the antigen encoding vectors described herein, such as vectors based on ChAdV68 (e.g., the sequences shown in SEQ ID NO:1 or 2). The boosting dose can be with any of the antigen encoding vectors described herein, such as vectors based on ChAdV68 (e.g., the sequences shown in SEQ ID NO:1 or 2) or SAM-based vectors (e.g., the sequences shown in SEQ ID NO:3 or 4). One or more boosting doses can be administered and can be serial administration of the same boosting vaccine (e.g., serial administration of the same ChAdV68-based vectors or serial administration of the same SAM-based vectors) or can be serial administration of different boosting vaccines (e.g., administration of a SAM-based vector followed by administration of a ChAdV68-based vector). Serial administration of different vaccines can include any combination of different vaccines. For example, a vaccine strategy can use a ChAdV68-based prime, followed by one or more SAM-based boosts, and the SAM-based boosts followed by a ChAdV68-based boost. Illustrative non-limiting vaccine strategies include, but are not limited to: ChAdV prime-SAM boost-SAM boost-ChAdV boost; or ChAdV prime-SAM boost-SAM boost-SAM boost-SAM boost-ChAdV boost.

[0423] ChAdV68-based vaccines can be administered at a dose ranging from 1×10¹¹ viral particles to 1×10¹² viral particles. ChAdV68-based vaccines can be administered at a dose of 1×10¹¹ viral particles. ChAdV68-based vaccines can be administered at a dose of 5×10¹¹ viral particles. ChAdV68-based vaccines can be administered at a dose of 1×10¹² viral particles. The selected dosage for ChAdV68-based vaccines will depend on, e.g., the composition, the manner of administration, the stage and severity of the disease being treated, the weight and general state of health of the patient, and the judgment of the prescribing physician.

[0424] SAM-based vaccines can be administered at a dose ranging 10-300 μg RNA. SAM-based vaccines can be administered at a dose ranging 100-300 μg RNA. SAM-based vaccines can be administered at a dose of 100 μg RNA. SAM-based vaccines can be administered at a dose of 300 μg RNA. The selected dosage for SAM-based vaccines will depend on, e.g., the composition, the manner of administration, the stage and severity of the disease being treated, the weight and general state of health of the patient, and the judgment of the prescribing physician.

[0425] A priming vaccine can be injected (e.g., intramuscularly) in a subject. Bilateral injections per dose can be used. For example, one or more injections of ChAdV68 (C68) can be used (e.g., total dose 1×10¹² viral particles); one or more injections of SAM vectors at low vaccine dose selected from the range 0.001 to 1 ug RNA, in particular 0.1 or 1 ug can be used; or one or more injections of SAM vectors at high vaccine dose selected from the range 1 to 100 ug RNA, in particular 10, 100, or 300 ug can be used.

[0426] A vaccine boost (boosting vaccine) can be injected (e.g., intramuscularly) after prime vaccination. Bilateral injections per dose can be used. For example, one or more injections of ChAdV68 (C68) can be used (e.g., total dose 1×10¹² viral particles); one or more injections of SAM vectors at low vaccine dose selected from the range 0.001 to 1 ug RNA, in particular 0.1 or 1 ug can be used; or one or more injections of SAM vectors at high vaccine dose selected from the range 1 to 100 ug RNA, in particular 10, 100 or 300 ug can be used.

[0427] A boosting vaccine can be administered about every 1, 2, 3, 4, 5, 6, 7, 8, 9, or 10 weeks, e.g., every 4 weeks and/or 8 weeks after the prime. A boosting vaccine can be administered every 4 weeks after the prime. A boosting vaccine can be administered every 6 weeks after the prime. A boosting vaccine can be administered every 12 weeks after the prime. Boosting doses can be administered at different intervals during the course of a vaccination protocol. For example, illustrative non-limiting examples include prime-4 w-boost-12 w-boost -12 w-boost; or prime-4 w-boost-6 w-boost-6 w-boost-6 w-boost-6 w-boost, where “w” represents weeks.

[0428] One or more of the vaccine administrations can include co-administration of one or more checkpoint inhibitors. Illustrative immune checkpoint inhibitors include Tremelimumab (CTLA-4 blocking antibody), anti-OX40, PD-L1 monoclonal Antibody (Anti-B7-H1; MEDI4736), ipilimumab, MK-3475 (PD-1 blocker), Nivolumamb (anti-PD1 antibody), CT-011 (anti-PD1 antibody), BY55 monoclonal antibody, AMP224 (anti-PDL1 antibody), BMS-936559 (anti-PDL1 antibody), MPLDL3280A (anti-PDL1 antibody), MSB0010718C (anti-PDL1 antibody) and Yervoy/ipilimumab (anti-CTLA-4 checkpoint inhibitor). In illustrative non-limiting examples, Nivolumamb, Yervoy/ipilimumab, or a combination thereof.

[0429] Anti-CTLA-4 (e.g., tremelimumab) can also be administered to the subject. For example, anti-CTLA4 can be administered subcutaneously near the site of the intramuscular vaccine injection (ChAdV68 prime or SAM low doses) to ensure drainage into the same lymph node. Tremelimumab is a selective human IgG2 mAb inhibitor of CTLA-4. Target Anti-CTLA-4 (tremelimumab) subcutaneous dose is typically 70-75 mg (in particular 75 mg) with a dose range of, e.g., 1-100 mg or 5-420 mg.

[0430] In certain instances an anti-PD-L1 antibody can be used such as durvalumab (MEDI 4736). Durvalumab is a selective, high affinity human IgG1 mAb that blocks PD-L1 binding to PD-1 and CD80. Durvalumab is generally administered at 20 mg/kg i.v. every 4 weeks.

[0431] Immune monitoring can be performed before, during, and/or after vaccine administration. Such monitoring can inform safety and efficacy, among other parameters.

[0432] To perform immune monitoring, PBMCs are commonly used. PBMCs can be isolated before prime vaccination, and after prime vaccination (e.g. 4 weeks and 8 weeks). PBMCs can be harvested just prior to boost vaccinations and after each boost vaccination (e.g. 4 weeks and 8 weeks).

[0433] Immune responses, such as T cell responses and B cells responses, can be assessed as part of an immune monitoring protocol. For example, the ability of a vaccine composition described herein to stimulate an immune response can be monitored and/or assessed. As used herein, “stimulate an immune response” refers to any increase in a immune response, such as initiating an immune response (e.g., a priming vaccine stimulating the initiation of an immune response in a naïve subject) or enhancement of an immune response (e.g., a boosting vaccine stimulating the enhancement of an immune response in a subject having a pre-existing immune response to an antigen, such as a pre-existing immune response initiated by a priming vaccine). T cell responses can be measured using one or more methods known in the art such as ELISpot, intracellular cytokine staining, cytokine secretion and cell surface capture, T cell proliferation, MHC multimer staining, or by cytotoxicity assay. T cell responses to epitopes encoded in vaccines can be monitored from PBMCs by measuring induction of cytokines, such as IFN-gamma, using an ELISpot assay. Specific CD4 or CD8 T cell responses to epitopes encoded in vaccines can be monitored from PBMCs by measuring induction of cytokines captured intracellularly or extracellularly, such as IFN-gamma, using flow cytometry. Specific CD4 or CD8 T cell responses to epitopes encoded in the vaccines can be monitored from PBMCs by measuring T cell populations expressing T cell receptors specific for epitope/MHC class I complexes using MHC multimer staining. Specific CD4 or CD8 T cell responses to epitopes encoded in the vaccines can be monitored from PBMCs by measuring the ex vivo expansion of T cell populations following 3H-thymidine, bromodeoxyuridine and carboxyfluoresceine-diacetate-succinimidylester (CFSE) incorporation. The antigen recognition capacity and lytic activity of PBMC-derived T cells that are specific for epitopes encoded in vaccines can be assessed functionally by chromium release assay or alternative colorimetric cytotoxicity assays.

[0434] B cell responses can be measured using one or more methods known in the art such as assays used to determine B cell differentiation (e.g., differentiation into plasma cells), B cell or plasma cell proliferation, B cell or plasma cell activation (e.g., upregulation of costimulatory markers such as CD80 or CD86), antibody class switching, and/or antibody production (e.g., an ELISA).

[0435] Disease status of a subject can be monitored following administration of any of the vaccine compositions described herein. For example, disease status may be monitored using isolated cell-free DNA (cfDNA) from a subject. In addition, the efficacy of a vaccine therapy may be monitored using isolated cfDNA from a subject. cfDNA monitoring can include the steps of: a. isolating or having isolated cfDNA from a subject; b. sequencing or having sequenced the isolated cfDNA; c. determining or having determined a frequency of one or more mutations in the cfDNA relative to a wild-type germline nucleic acid sequence of the subject, and d. assessing or having assessed from step (c) the status of a disease in the subject. The method can also include, following step (c) above, d. performing more than one iteration of steps (a)-(c) for the given subject and comparing the frequency of the one or more mutations determined in the more than one iterations; and f. assessing or having assessed from step (d) the status of a disease in the subject. The more than one iterations can be performed at different time points, such as a first iteration of steps (a)-(c) performed prior to administration of the vaccine composition and a second iteration of steps (a)-(c) is performed subsequent to administration of the vaccine composition. Step (c) can include comparing: the frequency of the one or more mutations determined in the more than one iterations, or the frequency of the one or more mutations determined in the first iteration to the frequency of the one or more mutations determined in the second iteration. An increase in the frequency of the one or more mutations determined in subsequent iterations or the second iteration can be assessed as disease progression. A decrease in the frequency of the one or more mutations determined in subsequent iterations or the second iteration can be assessed as a response. In some aspects, the response is a Complete Response (CR) or a Partial Response (PR). A therapy can be administered to a subject following an assessment step, such as where assessment of the frequency of the one or more mutations in the cfDNA indicates the subject has the disease. The cfDNA isolation step can use centrifugation to separate cfDNA from cells or cellular debris. cfDNA can be isolated from whole blood, such as by separating the plasma layer, buffy coat, and red bloods. cfDNA sequencing can use next generation sequencing (NGS), Sanger sequencing, duplex sequencing, whole-exome sequencing, whole-genome sequencing, de novo sequencing, phased sequencing, targeted amplicon sequencing, shotgun sequencing, or combinations thereof, and may include enriching the cfDNA for one or more polynucleotide regions of interest prior to sequencing (e.g., polynucleotides known or suspected to encode the one or more mutations, coding regions, and/or tumor exome polynucleotides). Enriching the cfDNA may include hybridizing one or more polynucleotide probes, which may be modified (e.g., biotinylated), to the one or more polynucleotide regions of interest. In general, any number of mutations may be monitored simultaneously or in parallel.

[0436] Homologous vaccination regimens can include an interval between homologous doses to improve efficacy of the second dose. For example, a ChAdV68-based vaccine can be administered as an initial dose and include an interval prior to re-administration of the ChAdV68-based vaccine as a boosting dose to improve efficacy, such as reducing the impact of ChAdV-specific neutralizing antibody titers on the efficacy of the boosting dose. For example, an initial dose may induce production of neutralizing antibodies which then subsequently wane over time. In illustrative non-limiting examples for ChAdV68-based vaccines described herein, the interval is at least 27 weeks. The interval can be 27 weeks. The interval can be 28 weeks. The interval can be 29 weeks. The interval can be 30 weeks. The interval can be 31 weeks. The interval can be 32 weeks. The interval can be 33 weeks. The interval can be at least 27 weeks. The interval can be at least 28 weeks. The interval can be at least 29 weeks. The interval can be at least 30 weeks. The interval can be at least 31 weeks. The interval can be at least 32 weeks. The interval can be at least 33 weeks.

[0437] The interval between ChAdV68-based vaccine administrations in a homologous prime-boost strategy can be as few as 8 weeks. The interval can be 8 weeks. The interval can be 9 weeks. The interval can be 10 weeks. The interval can be 11 weeks. The interval can be 12 weeks. The interval can be 13 weeks. The interval can be 14 weeks. The interval can be 15 weeks. The interval can be 16 weeks. The interval can be 17 weeks. The interval can be 18 weeks. The interval can be 19 weeks. The interval can be 20 weeks. The interval can be 21 weeks. The interval can be 23 weeks. The interval can be 24 weeks. The interval can be 25 weeks. The interval can be 26 weeks.

[0438] The interval between ChAdV68-based vaccine administrations in a homologous prime-boost strategy can be at least 8 weeks. The interval can be at least 9 weeks. The interval can be at least 10 weeks. The interval can be at least 11 weeks. The interval can be at least 12 weeks. The interval can be at least 13 weeks. The interval can be at least 14 weeks. The interval can be at least 15 weeks. The interval can be at least 16 weeks. The interval can be at least 17 weeks. The interval can be at least 18 weeks. The interval can be at least 19 weeks. The interval can be at least 20 weeks. The interval can be at least 21 weeks. The interval can be at least 23 weeks. The interval can be at least 24 weeks. The interval can be at least 25 weeks. The interval can be at least 26 weeks.

[0439] The interval between ChAdV68-based vaccine administrations in a homologous prime-boost strategy can be 2 months. The interval can be 2.5 months. The interval can be 3 months. The interval can be 3.5 months. The interval can be 4 months. The interval can be 4.5 months. The interval can be 5 months. The interval can be 5.5 months. The interval can be 6 months. The interval can be 6.5 months. The interval can be 7 months. The interval can be 7.5 months. The interval can be 8 months. The interval can be 8.5 months. The interval can be at least 2 months. The interval can be at least 2.5 months. The interval can be at least 3 months. The interval can be at least 3.5 months. The interval can be at least 4 months. The interval can be at least 4.5 months. The interval can be at least 5 months. The interval can be at least 5.5 months. The interval can be at least 6 months. The interval can be at least 6.5 months. The interval can be at least 7 months. The interval can be at least 7.5 months. The interval can be at least 8 months. The interval can be at least 8.5 months.

### VIII. Isolation and Detection of HLA Peptides

[0440] Isolation of HLA-peptide molecules was performed using classic immunoprecipitation (IP) methods after lysis and solubilization of the tissue sample (55-58). A clarified lysate was used for HLA specific IP. Examples and methods are described in more detail in international patent application publication WO/2018/208856, herein incorporated by reference, in its entirety, for all purposes.

### IX. Presentation Model

[0441] Presentation models can be used to identify likelihoods of peptide presentation in patients. Various presentation models are known to those skilled in the art, for example the presentation models described in more detail in U.S. Pat. No. 10,055,540, US Application Pub. No. US20200010849A1 and US20110293637, and international patent application publications WO/2018/195357, WO/2018/208856, and WO2016187508, each herein incorporated by reference, in their entirety, for all purposes.

### X. Training Module

[0442] Training modules can be used to construct one or more presentation models based on training data sets that generate likelihoods of whether peptide sequences will be presented by MHC alleles associated with the peptide sequences. Various training modules are known to those skilled in the art, for example the presentation models described in more detail in U.S. Pat. No. 10,055,540, US Application Pub. No. US20200010849A1, and international patent application publications WO/2018/195357 and WO/2018/208856, each herein incorporated by reference, in their entirety, for all purposes. A training module can construct a presentation model to predict presentation likelihoods of peptides on a per-allele basis. A training module can also construct a presentation model to predict presentation likelihoods of peptides in a multiple-allele setting where two or more MHC alleles are present.

### XI. Prediction Module

[0443] A prediction module can be used to receive sequence data and select candidate antigens in the sequence data using a presentation model. Specifically, the sequence data may be DNA sequences, RNA sequences, and/or protein sequences extracted from tumor tissue cells of patients, infected cells patients, or infectious disease organisms themselves. A prediction module may identify candidate neoantigens that are mutated peptide sequences by comparing sequence data extracted from normal tissue cells of a patient with the sequence data extracted from tumor tissue cells of the patient to identify portions containing one or more mutations. A prediction module may identify candidate antigens that are pathogen-derived peptides, virally-derived peptides, bacterially-derived peptides, fungally-derived peptides, and parasitically-derived peptides, such as by comparing sequence data extracted from normal tissue cells of a patient with the sequence data extracted from infected cells of the patient to identify portions containing one or more infectious disease organism associated antigens. A prediction module may identify candidate antigens that have altered expression in a tumor cell or cancerous tissue in comparison to a normal cell or tissue by comparing sequence data extracted from normal tissue cells of a patient with the sequence data extracted from tumor tissue cells of the patient to identify improperly expressed candidate antigens. A prediction module may identify candidate antigens that are expressed in an infected cell or infected tissue in comparison to a normal cell or tissue by comparing sequence data extracted from normal tissue cells of a patient with the sequence data extracted from infected tissue cells of the patient to identify expressed candidate antigens (e.g., identifying expressed polynucleotides and/or polypeptides specific to an infectious disease).

[0444] A presentation module can apply one or more presentation model to processed peptide sequences to estimate presentation likelihoods of the peptide sequences. Specifically, the prediction module may select one or more candidate antigen peptide sequences that are likely to be presented on tumor HLA molecules or infected cell HLA molecules by applying presentation models to the candidate antigens. In one implementation, the presentation module selects candidate antigen sequences that have estimated presentation likelihoods above a predetermined threshold. In another implementation, the presentation model selects the N candidate antigen sequences that have the highest estimated presentation likelihoods (where N is generally the maximum number of epitopes that can be delivered in a vaccine). A vaccine including the selected candidate antigens for a given patient can be injected into a subject to stimulate immune responses.

[0445] XI.B.Cassette Design Module

[0446] XI.B.1 Overview

[0447] A cassette design module can be used to generate a vaccine cassette sequence based on selected candidate peptides for injection into a patient. For example, a cassette design module can be used to generate a sequence encoding concatenated epitope sequences, such as concatenated T cell epitopes. Various cassette design modules are known to those skilled in the art, for example the cassette design modules described in more detail in U.S. Pat. No. 10,055,540, US Application Pub. No. US20200010849A1, and international patent application publications WO/2018/195357 and WO/2018/208856, each herein incorporated by reference, in their entirety, for all purposes.

[0448] A set of therapeutic epitopes may be generated based on the selected peptides determined by a prediction module associated with presentation likelihoods above a predetermined threshold, where the presentation likelihoods are determined by the presentation models. However it is appreciated that in other embodiments, the set of therapeutic epitopes may be generated based on any one or more of a number of methods (alone or in combination), for example, based on binding affinity or predicted binding affinity to HLA class I or class II alleles of the patient, binding stability or predicted binding stability to HLA class I or class II alleles of the patient, random sampling, and the like.

[0449] Therapeutic epitopes may correspond to selected peptides themselves. Therapeutic epitopes may also include C- and/or N-terminal flanking sequences in addition to the selected peptides. N- and C-terminal flanking sequences can be the native N- and C-terminal flanking sequences of the therapeutic vaccine epitope in the context of its source protein. Therapeutic epitopes can represent a fixed-length epitope Therapeutic epitopes can represent a variable-length epitope, in which the length of the epitope can be varied depending on, for example, the length of the C- or N-flanking sequence. For example, the C-terminal flanking sequence and the N-terminal flanking sequence can each have varying lengths of 2-5 residues, resulting in 16 possible choices for the epitope.

[0450] A cassette design module can also generate cassette sequences by taking into account presentation of junction epitopes that span the junction between a pair of therapeutic epitopes in the cassette. Junction epitopes are novel non-self but irrelevant epitope sequences that arise in the cassette due to the process of concatenating therapeutic epitopes and linker sequences in the cassette. The novel sequences of junction epitopes are different from the therapeutic epitopes of the cassette themselves.

[0451] A cassette design module can generate a cassette sequence that reduces the likelihood that junction epitopes are presented in the patient. Specifically, when the cassette is injected into the patient, junction epitopes have the potential to be presented by HLA class I or HLA class II alleles of the patient, and stimulate a CD8 or CD4 T-cell response, respectively. Such reactions are often times undesirable because T-cells reactive to the junction epitopes have no therapeutic benefit, and may diminish the immune response to the selected therapeutic epitopes in the cassette by antigenic competition.⁷⁶

[0452] A cassette design module can iterate through one or more candidate cassettes, and determine a cassette sequence for which a presentation score of junction epitopes associated with that cassette sequence is below a numerical threshold. The junction epitope presentation score is a quantity associated with presentation likelihoods of the junction epitopes in the cassette, and a higher value of the junction epitope presentation score indicates a higher likelihood that junction epitopes of the cassette will be presented by HLA class I or HLA class II or both.

[0453] In one embodiment, a cassette design module may determine a cassette sequence associated with the lowest junction epitope presentation score among the candidate cassette sequences.

[0454] A cassette design module may iterate through one or more candidate cassette sequences, determine the junction epitope presentation score for the candidate cassettes, and identify an optimal cassette sequence associated with a junction epitope presentation score below the threshold.

[0455] A cassette design module may further check the one or more candidate cassette sequences to identify if any of the junction epitopes in the candidate cassette sequences are self-epitopes for a given patient for whom the vaccine is being designed. To accomplish this, the cassette design module checks the junction epitopes against a known database such as BLAST. In one embodiment, the cassette design module may be configured to design cassettes that avoid junction self-epitopes.

[0456] A cassette design module can perform a brute force approach and iterate through all or most possible candidate cassette sequences to select the sequence with the smallest junction epitope presentation score. However, the number of such candidate cassettes can be prohibitively large as the capacity of the vaccine increases. For example, for a vaccine capacity of 20 epitopes, the cassette design module has to iterate through ˜10¹⁸ possible candidate cassettes to determine the cassette with the lowest junction epitope presentation score. This determination may be computationally burdensome (in terms of computational processing resources required), and sometimes intractable, for the cassette design module to complete within a reasonable amount of time to generate the vaccine for the patient. Moreover, accounting for the possible junction epitopes for each candidate cassette can be even more burdensome. Thus, a cassette design module may select a cassette sequence based on ways of iterating through a number of candidate cassette sequences that are significantly smaller than the number of candidate cassette sequences for the brute force approach.

[0457] A cassette design module can generate a subset of randomly or at least pseudo-randomly generated candidate cassettes, and selects the candidate cassette associated with a junction epitope presentation score below a predetermined threshold as the cassette sequence. Additionally, the cassette design module may select the candidate cassette from the subset with the lowest junction epitope presentation score as the cassette sequence. For example, the cassette design module may generate a subset of −1 million candidate cassettes for a set of 20 selected epitopes, and select the candidate cassette with the smallest junction epitope presentation score. Although generating a subset of random cassette sequences and selecting a cassette sequence with a low junction epitope presentation score out of the subset may be sub-optimal relative to the brute force approach, it requires significantly less computational resources thereby making its implementation technically feasible. Further, performing the brute force method as opposed to this more efficient technique may only result in a minor or even negligible improvement in junction epitope presentation score, thus making it not worthwhile from a resource allocation perspective. A cassette design module can determine an improved cassette configuration by formulating the epitope sequence for the cassette as an asymmetric traveling salesman problem (TSP). Given a list of nodes and distances between each pair of nodes, the TSP determines a sequence of nodes associated with the shortest total distance to visit each node exactly once and return to the original node. For example, given cities A, B, and C with known distances between each other, the solution of the TSP generates a closed sequence of cities, for which the total distance traveled to visit each city exactly once is the smallest among possible routes. The asymmetric version of the TSP determines the optimal sequence of nodes when the distance between a pair of nodes are asymmetric. For example, the “distance” for traveling from node A to node B may be different from the “distance” for traveling from node B to node A. By solving for an improved optimal cassette using an asymmetric TSP, the cassette design module can find a cassette sequence that results in a reduced presentation score across the junctions between epitopes of the cassette. The solution of the asymmetric TSP indicates a sequence of therapeutic epitopes that correspond to the order in which the epitopes should be concatenated in a cassette to minimize the junction epitope presentation score across the junctions of the cassette. A cassette sequence determined through this approach can result in a sequence with significantly less presentation of junction epitopes while potentially requiring significantly less computational resources than the random sampling approach, especially when the number of generated candidate cassette sequences is large. Illustrative examples of different computational approaches and comparisons for optimizing cassette design are described in more detail in U.S. Pat. No. 10,055,540, US Application Pub. No. US20200010849A1, and international patent application publications WO/2018/195357 and WO/2018/208856, each herein incorporated by reference, in their entirety, for all purposes.

[0458] Shared (neo)antigen sequences for inclusion in a shared antigen vaccine and appropriate patients for treatment with such vaccine can be chosen by one of skill in the art, e.g., as described in U.S. application Ser. No. 17/058,128, herein incorporated by reference for all purposes. Mass spectrometry (MS) validation of candidate shared (neo)antigens can performed as part of the selection process.

[0459] A cassette design module can also generate cassette sequences by taking into account additional protein sequences encoded in the vaccine. For example, a cassette design module used to generate a sequence encoding concatenated T cell epitopes can take into account T cell epitopes already encoded by additional protein sequences present in the vaccine (e.g., full-length protein sequences), such as by removing T cell epitopes already encoded by the additional protein sequences from the list of candidate sequences.

[0460] A cassette design module can also generate cassette sequences by taking into account the size of the sequences. Without wishing to be bound by theory, in general, increased cassette size can negatively impact vaccine aspects, such as vaccine production and/or vaccine efficacy. In one example, the cassette design module can take into account overlapping sequences, such as overlapping T cell epitope sequences. In general, a single sequence containing overlapping T cell epitope sequences (also referred to as a “frame”) is more efficient than separately linking individual T cell epitope sequences as it reduces the sequence size needed to encode the multiple peptides. Accordingly, in an illustrative example, a cassette design module used to generate a sequence encoding concatenated T cell epitopes can take into account the cost/benefit of extending a candidate T cell epitope to encode one or more additional T cell epitopes, such as determining the benefit gained in additional population coverage for an MHC presenting the additional T cell epitope versus the cost of increasing the size of the sequence.

[0461] A cassette design module can also generate cassette sequences by taking into account the magnitude of stimulation of an immune response generated by validated epitopes.

[0462] A cassette design module can also generate cassette sequences by taking into account presentation of encoded epitopes across a population, for example that at least one immunogenic epitope is presented by at least one HLA across a proportion of a population, for example by at least 85%, 90%, or 95% of a population (e.g., HLA-A, HLA-B and HLA-C genes over four major ethnic groups, namely European (EUR), African American (AFA), Asian and Pacific Islander (APA) and Hispanic (HIS)). As an illustrative non-limiting example, a cassette design module can also generate cassette sequences such that at least one HLA is present at least across 85%, 90%, or 95% of a population that presents at least one validated epitope or presents at least 4, 5, 6, or 7 predicted epitopes.

[0463] A cassette design module can also generate cassette sequences by taking into account other aspects that improve potential safety, such as limiting encoding or the potential to encode a functional protein, functional protein domain, functional protein subunit, or functional protein fragment potentially presenting a safety risk. In some cases, a cassette design module can limit sequence size of encoded peptides such that they are less than 50%, less than 49%, less than 48%, less than 47%, less than 46%, less than 45%, less than 45%, less than 43%, less than 42%, less than 41%, less than 40%, less than 39%, less than 38%, less than 37%, less than 36%, less than 35%, less than 34%, or less than 33% of the translated, corresponding full-length protein. In some cases, a cassette design module can limit sequence size of encoded peptides such that a single contiguous sequence is less than 50% of the translated, corresponding full-length protein, but more than one sequence may be derived from the same translated, corresponding full-length protein and together encode more than 50%. In an illustrative example, if a single sequence containing overlapping T cell epitope sequences (“frame”) is larger than 50% of the translated, corresponding full-length protein, the frame can be split into multiple frames (e.g., f1, f2 etc.) such that each frame is less than 50% of the translated, corresponding full-length protein. A cassette design module can also limit sequence size of encoded peptides such that a single contiguous sequence is less than 49%, less than 48%, less than 47%, less than 46%, less than 45%, less than 45%, less than 43%, less than 42%, less than 41%, less than 40%, less than 39%, less than 38%, less than 37%, less than 36%, less than 35%, less than 34%, or less than 33% of the translated, corresponding full-length protein. Where multiple frames from the same gene are encoded, the multiple frames can have overlapping sequences with each other, in other words each separately encode the same sequence. Where multiple frames from the same gene are encoded, the two or more nucleic acid sequences derived from the same gene can be ordered such that a first nucleic acid sequence cannot be immediately followed by or linked to a second nucleic acid sequence if the second nucleic acid sequence follows, immediately or not, the first nucleic acid sequence in the corresponding gene. For example, if there are 3 frames within the same gene (f1,f2,f3 in increasing order of amino acid position):
[0464] The following cassette orderings are not allowed:
   [0465] f1 immediately followed by f2
   [0466] f2 immediately followed by f3
   [0467] f1 immediately followed by f3
[0468] The following cassette orderings are allowed:
   [0469] f3 immediately followed by f2
   [0470] f2 immediately followed by f1

### XIII. Example Computer

[0471] A computer can be used for any of the computational methods described herein. One skilled in the art will recognize a computer can have different architectures. Examples of computers are known to those skilled in the art, for example the computers described in more detail in U.S. Pat. No. 10,055,540, US Application Pub. No. US20200010849A1, and international patent application publications WO/2018/195357 and WO/2018/208856, each herein incorporated by reference, in their entirety, for all purposes.

### XIV. Examples

[0472] Below are examples of specific embodiments for carrying out the present invention. The examples are offered for illustrative purposes only, and are not intended to limit the scope of the present invention in any way. Efforts have been made to ensure accuracy with respect to numbers used (e.g., amounts, temperatures, etc.), but some experimental error and deviation should, of course, be allowed for.

[0473] The practice of the present invention will employ, unless otherwise indicated, conventional methods of protein chemistry, biochemistry, recombinant DNA techniques and pharmacology, within the skill of the art. Such techniques are explained fully in the literature. See, e.g., T. E. Creighton, Proteins: Structures and Molecular Properties (W.H. Freeman and Company, 1993); A. L. Lehninger, Biochemistry (Worth Publishers, Inc., current addition); Sambrook, et al., Molecular Cloning: A Laboratory Manual (2nd Edition, 1989); Methods In Enzymology (S. Colowick and N. Kaplan eds., Academic Press, Inc.); Remington's Pharmaceutical Sciences, 18th Edition (Easton, Pennsylvania: Mack Publishing Company, 1990); Carey and Sundberg Advanced Organic Chemistry 3^{rd} Ed. (Plenum Press) Vols A and B (1992).

[0474] xiv.A. Spike Protein Sequence Optimization

[0475] Various sequence-optimized nucleotide sequences encoding the Spike protein were evaluated in ChAdV68 vaccine vectors.

### Sequence-Optimization of Spike Sequence

[0476] The Spike nucleotide sequence from Wuhan Hu/1 (SEQ ID NO:78) was sequence-optimized by substituting synonymous codons such that the amino acid sequence was unaffected. An IDT algorithm was used for enhanced expression in humans and for reduced complexity to aid synthesis (see, e.g., SEQ ID NOs:66-74). The Spike sequence was additionally sequence-optimized using two additional algorithms; (1) a single sequence (SEQ ID NO:87) generated using SGI DNA (La Jolla, CA); (2) 6 sequences designated CT1, CT20, CT56, CT83, CT131, and CT 199 (SEQ ID NOs:79-84) generated using COOL from the University of Singapore (COOL algorithm generates multiple sequences and 6 were selected). The sequences of each are presented in Table 1.

[0477] Splicing events were identified in cDNA from 293A cells infected with ChAdV68 viruses or transfected with ChAdV68 genomic DNA. Specifically, total RNA from 10e5-10e6 cells was purified using Qiagen's RNeasy columns. Residual DNA was removed by DNAse treatment, and cDNA was produced using SuperScriptIV reverse transcriptase (Thermo). Subsequently, primers specific for the 5′ UTR and 3′ UTR of the Gritstone ChAdV68 cassette were used to generate PCR products, analyzed by agarose gel electrophoresis, gel-purified, and Sanger-sequenced to identify regions deleted by splicing.

[0478] Splice donor sites were removed by site-directed mutagenesis disrupting the nucleotide sequence motif while not disturbing the amino acid sequence. Mutagenesis was accomplished by incorporating above mutations into PCR primers, amplifying several fragments in parallel, and running a Gibson assembly on the fragments (overlapping by 30-60 nt). Optimized clone CT1-2C (SEQ ID NO:85) had Sanger sequence-identified splice donor motifs at NT385 and NT539 mutated, and clone IDT-4C (SEQ ID NO:86) had Sanger sequence-identified splice donor motifs at NT385, NT539, and predicted donor motifs at NT2003, and NT2473 mutated. Additionally, a possible polyadenylation site AATAAA at nt 445 was mutated to AAcAAA in IDT-4C clone.

[0479] The sequences described are presented in Table 1.

TABLE 1
Sequence-optimized Spike Sequences

| Spike | | |
|---|---|---|
| Sequence | Nucleic Acid Sequence | SEQ ID NO: |
| Spike Native; | atgtttgtttttcttgttttattgccactagtctctagtcagtgtgttaatcttacaaccagaactcaattaccccctgcatacact | 78 |
| NC_045512.2 | aattctttcacacgtggtgtttattaccctgacaaagttttcagatcctcagttttacattcaactcaggacttgttcttacctttc | |
| Severe acute | ttttccaatgttacttggttccatgctatacatgtctctgggaccaatggtactaagaggtttgataaccctgtcctaccattta | |
| respiratory | atgatggtgtttattttgcttccactgagaagtctaacataataagaggctggatttttggtactactttagattcgaagaccc | |
| syndrome | agtccctacttattgttaataacgctactaatgttgttattaaagtctgtgaatttcaattttgtaatgatccatttttgggtgtttat | |
| coronavirus | taccacaaaaacaacaaaagttggatggaaagtgagttcagagtttattctagtgcgaataattgcacttttgaatatgtctc | |
| 2 isolate | tcagccttttcttatggaccttgaaggaaaacagggtaatttcaaaaatcttagggaatttgtgtttaagaatattgatggttat | |
| Wuhan-Hu-1 | tttaaaatatattctaagcacacgcctattaatttagtgcgtgatctccctcagggtttttcggctttagaaccattggtagattt | |
| | gccaataggtattaacatcactaggtttcaaactttacttgctttacatagaagttatttgactcctggtgattcttcttcaggtt | |
| | ggacagctggtgctgcagcttattatgtgggttatcttcaacctaggacttttctattaaaatataatgaaaatggaaccatta | |
| | cagatgctgtagactgtgcacttgaccctctctcagaaacaaagtgtacgttgaaatccttcactgtagaaaaaggaatct | |
| | atcaaacttctaactttagagtccaaccaacagaatctattgttagatttcctaatattacaaacttgtgcccttttggtgaagt | |
| | ttttaacgccaccagatttgcatctgtttatgcttggaacaggaagagaatcagcaactgtgttgctgattattctgtcctata | |
| | taattccgcatcattttccacttttaagtgttatggagtgtctcctactaaattaaatgatctctgctttactaatgtctatgcaga | |
| | ttcatttgtaattagaggtgatgaagtcagacaaatcgctccagggcaaactggaaagattgctgattataattataaatta | |
| | ccagatgattttacaggctgcgttatagcttggaattctaacaatcttgattctaaggttggtggtaattataattacctgtata | |
| | gattgtttaggaagtctaatctcaaaccttttgagagagatatttcaactgaaatctatcaggccggtagcacaccttgtaat | |
| | ggtgttgaaggttttaattgttactttcctttacaatcatatggtttccaacccactaatggtgttggttaccaaccatacagag | |
| | tagtagtactttcttttgaacttctacatgcaccagcaactgtttgtggacctaaaaagtctactaatttggttaaaaacaaat | |
| | gtgtcaatttcaacttcaatggtttaacaggcacaggtgttcttactgagtctaacaaaaagtttctgcctttccaacaatttg | |
| | gcagagacattgctgacactactgatgctgtccgtgatccacagacacttgagattcttgacattacaccatgttcttttggt | |
| | ggtgtcagtgttataacaccaggaacaaatacttctaaccaggttgctgttctttatcaggatgttaactgcacagaagtcc | |
| | ctgttgctattcatgcagatcaacttactcctacttggcgtgtttattctacaggttctaatgtttttcaaacacgtgcaggctgt | |
| | ttaataggggctgaacatgtcaacaactcatatgagtgtgacatacccattggtgcaggtatatgcgctagttatcagact | |
| | cagactaattctcctcgggggcacgtagtgtagctagtcaatccatcattgcctacactatgtcacttggtgcagaaaatt | |
| | cagttgcttactctaataactctattgccatacccacaaattttactattagtgttaccacagaaattctaccagtgtctatgac | |
| | caagacatcagtagattgtacaatgtacatttgtggtgattcaactgaatgcagcaatcttttgttgcaatatggcagtttttgt | |
| | acacaattaaaccgtgctttaactggaatagctgttgaacaagacaaaaacacccaagaagtttttgcacaagtcaaaca | |
| | aatttacaaaacaccaccaattaaagattttggtggttttaatttttcacaaatattaccagatccatcaaaaccaagcaaga | |
| | ggtcatttattgaagatctacttttcaacaaagtgacacttgcagatgctggcttcatcaaacaatatggtgattgccttggt | |
| | gatattgctgctagagacctcatttgtgcacaaaagtttaacggccttactgttttgccacctttgctcacagatgaaatgatt | |
| | gctcaatacacttctgcactgttagcgggtacaatcacttctggttggacctttggtgcaggtgctgcattacaaataccatt | |
| | tgctatgcaaatggcttataggtttaatggtattggagttacacagaatgttctctatgagaaccaaaaattgattgccaacc | |
| | aatttaatagtgctattggcaaaattcaagactcactttcttccacagcaagtgcacttggaaaacttcaagatgtggtcaa | |
| | ccaaaatgcacaagctttaaacacgcttgttaaacaacttagctccaattttggtgcaatttcaagtgttttaaatgatatcctt | |
| | tcacgtcttgacaaagttgaggctgaagtgcaaattgataggttgatcacaggcagacttcaaagtttgcagacatatgtg | |
| | actcaacaattaattagagctgcagaaatcagagcttctgctaatcttgctgctactaaaatgtcagagtgtgtacttggac | |
| | aatcaaaaagagttgatttttgtggaaagggctatcatcttatgtccttccctcagtcagcacctcatggtgtagtcttcttgc | |
| | atgtgacttatgtccctgcacaagaaaagaacttcacaactgctcctgccatttgtcatgatggaaaagcacactttcctcg | |
| | tgaaggtgtctttgtttcaaatggcacacactggtttgtaacacaaaggaatttttatgaaccacaaatcattactacagaca | |
| | acacatttgtgtctggtaactgtgatgttgtaataggaattgtcaacaacacagtttatgatcctttgcaacctgaattagact | |
| | cattcaaggaggagttagataaatattttaagaatcatacatcaccagatgttgatttaggtgacatctctggcattaatgctt | |
| | cagttgtaaacattcaaaaagaaattgaccgcctcaatgaggttgccaagaatttaaatgaatctctcatcgatctccaag | |
| | aacttggaaagtatgagcagtatataaaatggccatggtacatttggctaggttttatagctggcttgattgccatagtaatg | |
| | gtgacaattatgctttgctgtatgaccagttgctgtagttgtctcaagggctgttgttcttgtggatcctgctgcaaatttgatg | |
| | aagacgactctgagccagtgctcaaaggagtcaaattacattacacataa | |
| Spike CT1 | ATGTTTGTCTTCCTGGTCTTGCTGCCGCTGGTGAGCAGCCAGTGCGTGA | 79 |
| Optimized | ATCTCACCACCCGCACCCAGCTTCCACCTGCCTACACTAACAGCTTCAC | |
| | CCGAGGGGTGTATTACCCTGACAAGGTATTCCGGTCCTCCGTCCTCCAT | |
| | AGCACGCAGGACCTTTTTCTGCCCTTCTTCTCAAATGTGACATGGTTCCA | |
| | TGCCATTCACGTGAGCGGCACGAATGGAACGAAGCGCTTTGATAACCC | |
| | CGTGCTGCCTTTCAATGACGGCGTCTACTTCGCCTCCACTGAAAAGTCA | |
| | AACATCATCCGGGGCTGGATCTTTGGCACCACTCTTGATTCAAAGACCC | |
| | AGTCACTGCTGATTGTGAACAATGCTACAAACGTGGTTATCAAGGTGTG | |
| | TGAGTTTCAGTTCTGTAACGATCCATTTTTGGGAGTGTACTACCACAAG | |
| | AACAACAAGTCCTGGATGGAGTCTGAGTTCAGAGTGTATAGCTCTGCTA | |
| | ACAACTGCACCTTCGAGTACGTGTCCCAGCCTTTCCTTATGGACCTGGA | |
| | AGGCAAACAGGGCAATTTCAAAAACCTGAGAGAGTTCGTGTTTAAGAA | |
| | CATTGACGGATACTTCAAAATTTATTCTAAGCACACACCAATTAACTTA | |
| | GTGCGGGACCTACCCCAAGGCTTTAGCGCCCTAGAGCCCCTGGTTGACC | |
| | TGCCCATTGGGATCAATATAACAAGGTTCCAAACTCTACTGGCTCTGCA | |
| | TAGAAGTTATCTGACCCCAGGAGACAGCTCTAGTGGTTGGACCGCCGGC | |
| | GCAGCAGCCTACTATGTCGGGTACTTACAGCCACGCACGTTCCTTCTGA | |
| | AGTACAATGAGAACGGGACAATCACTGACGCAGTAGACTGTGCACTGG | |
| | ACCCGCTAAGCGAGACTAAGTGCACACTTAAATCCTTCACGGTGGAGA | |
| | AAGGCATTTATCAGACCTCTAACTTCAGGGTGCAGCCAACAGAAAGCA | |
| | TTGTGCGATTCCCAAATATTACTAATCTTTGCCCTTTCGGGGAGGTCTTT | |
| | AATGCAACTAGATTCGCATCAGTCTATGCGTGGAACCGCAAACGCATTT | |
| | CCAATTGTGTCGCAGACTACTCAGTGCTGTACAACTCTGCCTCTTTCAGT | |
| | ACGTTCAAGTGTTACGGAGTGTCACCCACTAAACTGAACGACCTGTGCT | |
| | TTACAAATGTCTACGCTGACTCCTTCGTGATTAGGGGAGACGAGGTGAG | |
| | ACAAATTGCCCCCGGACAGACTGGGAAGATTGCCGACTACAATTATAA | |
| | GCTTCCTGATGATTTCACTGGCTGTGTTATTGCCTGGAATAGTAACAATC | |
| | TGGATAGCAAGGTGGGAGGCAACTATAACTACTTATATCGACTGTTTAG | |
| | GAAGAGTAATCTGAAACCATTTGAGCGGGATATTTCCACAGAAATTTAC | |
| | CAGGCCGGGAGCACACCATGTAATGGGGTGGAGGGATTTAATTGTTAC | |
| | TTCCCACTCCAGAGCTATGGTTTCCAACCCACCAATGGAGTGGGTTACC | |
| | AGCCCTATAGAGTCGTGGTGCTTAGTTTTGAGCTGCTTCACGCCCCAGC | |
| | AACCGTCTGCGGTCCCAAAAAGTCGACCAATCTCGTGAAAAACAAATG | |
| | CGTAAACTTCAACTTTAACGGCTTAACAGGAACCGGCGTGCTCACCGAA | |
| | AGCAACAAGAAATTCCTTCCATTTCAGCAATTCGGAAGGGACATCGCCG | |
| | ACACAACAGACGCGGTGAGGGACCCACAGACTCTGGAGATACTGGACA | |
| | TCACTCCTTGTTCGTTTGGGGGCGTCTCGGTCATCACACCCGGGACTAA | |
| | TACTAGTAATCAGGTAGCAGTTTTATATCAAGGCGTCAACTGTACCGAA | |
| | GTACCTGTGGCCATACACGCTGATCAGCTAACGCCAACATGGCGAGTCT | |
| | ATTCCACCGGCTCTAACGTTTTTCAGACCAGGGCTGGGTGCCTGATAGG | |
| | GGCAGAGCACGTCAATAATTCCTATGAGTGTGATATCCCCATAGGTGCG | |
| | GGGATCTGTGCCAGCTATCAAACCCAAACCAATTCACCAAGGCGAGCA | |
| | CGGTCTGTGGCTTCTCAGAGCATAATTGCATATACAATGTCACTGGGCG | |
| | CTGAGAATAGCGTTGCATACTCTAATAACAGCATAGCCATTCCCACGAA | |
| | CTTTACTATCAGTGTGACAACCGAAATATTGCCAGTTTCGATGACCAAA | |
| | ACTAGCGTGGATTGCACGATGTACATCTGTGGAGACTCTACCGAATGCA | |
| | GCAATCTGCTATTACAATATGGCAGCTTCTGTACACAGTTAAATCGAGC | |
| | CTTGACAGGCATCGCAGTGGAACAGGACAAAAATACTCAAGAGGTGTT | |
| | TGCACAGGTGAAGCAAATCTACAAAACGCCCCCCATTAAAGATTTTGGC | |
| | GGGTTCAATTTTTCACAAATTCTCCCCGACCCGTCTAAGCCGAGTAAGC | |
| | GGTCCTTCATCGAAGATCTGCTCTTTAACAAAGTAACCCTCGCCGATGC | |
| | CGGCTTTATTAAGCAGTATGGCGACTGCCTGGGGGATATAGCCGCTCGT | |
| | GACCTGATTTGCGCCCAGAAGTTCAATGGTCTGACCGTGTTGCCTCCTTT | |
| | ATTGACCGATGAAATGATTGCCCAGTACACTAGTGCCCTGCTGGCCGGC | |
| | ACTATCACGTCTGGGTGGACCTTCGGAGCTGGTGCCGCCTTGCAGATAC | |
| | CTTTTGCAATGCAGATGGCCTATAGGTTTAATGGTATCGGAGTGACTCA | |
| | GAACGTACTGTACGAGAACCAGAAGCTCATCGCTAATCAATTTAACTCC | |
| | GCTATCGGAAAAATCCAGGACAGCCTCTCTTCTACAGCTAGCGCTCTGG | |
| | GCAAACTGCAGGATGTCGTTAATCAGAATGCCCAGGCCCTGAACACCTT | |
| | GGTTAAACAACTATCTTCCAACTTCGGGGCCATATCCAGTGTGTTGAAT | |
| | GATATTCTCTCCCGCTTGGATAAGGTGGAAGCTGAGGTGCAGATCGATC | |
| | GCTTGATCACCGGCAGACTGCAGTCCCTCCAGACATATGTAACTCAGCA | |
| | GCTGATTAGAGCCGCCGAGATAAGGGCAAGTGCGAATCTGGCTGCCAC | |
| | CAAGATGAGCGAATGTGTATTGGGCCAGAGCAAACGAGTTGATTTTTGC | |
| | GGTAAGGGGTATCATTTAATGTCTTTCCCTCAATCCGCACCTCATGGCG | |
| | TAGTTTTCCTGCATGTGACTTATGTCCCGGCTCAGGAGAAGAATTTTAC | |
| | CACAGCCCCCGCGATCTGCCATGACGGAAAGGCCCACTTCCCCCGGGA | |
| | AGGCGTGTTTGTATCCAATGGGACTCACTGGTTTGTCACTCAGCGAAAT | |
| | TTTTATGAACCACAGATCATCACCACTGACAACACATTTGTTAGTGGAA | |
| | ACTGCGATGTGGTCATCGGCATCGTGAATAACACTGTCTATGATCCACT | |
| | GCAACCTGAACTGGATTCTTTTAAAGAGGAACTCGACAAGTATTTTAAA | |
| | AACCACACTAGCCCTGACGTGGATCTCGGTGACATTTCTGGCATCAACG | |
| | CTAGCGTAGTGAACATTCAGAAAGAGATAGATAGACTTAATGAGGTGG | |
| | CCAAGAACCTCAACGAAAGTCTGATCGACCTCCAGGAACTGGGGAAAT | |
| | ACGAGCAGTACATTAAATGGCCTTGGTACATATGGCTGGGGTTCATTGC | |
| | TGGGCTGATCGCAATAGTGATGGTGACCATAATGCTCTGTTGCATGACT | |
| | AGCTGCTGCAGCTGCCTGAAGGGCTGCTGTAGTTGTGGGTCATGTTGTA | |
| | AGTTTGACGAAGATGATAGCGAGCCTGTCCTTAAAGGAGTGAAGCTCC | |
| | ACTACACCTAG | |
| Spike CT20 | Not shown | 80 |
| Optimized | | |
| Spike CT56 | Not shown | 81 |
| Optimized | | |
| Spike CT83 | Not shown | 82 |
| Optimized | | |
| Spike | Not shown | 83 |
| CT131 | | |
| Optimized | | |
| Spike | No shown | 84 |
| CT199 | | |
| Optimized | | |
| Spike CT1- | ATGTTTGTCTTCCTGGTCTTGCTGCCGCTcGTGtctAGCCAGTGCGTGAATC | 85 |
| 2C | TCACCACCCGCACCCAGCTTCCACCTGCCTACACTAACAGCTTCACCCG | |
| | AGGGGTGTATTACCCTGACAAGGTATTCCGGTCCTCCGTCCTCCATAGC | |
| | ACGCAGGACCTTTTTCTGCCCTTCTTCTCAAATGTGACATGGTTCCATGC | |
| | CATTCACGTGAGCGGCACGAATGGAACGAAGCGCTTTGATAACCCCGT | |
| | GCTGCCTTTCAATGACGGCGTCTACTTCGCCTCCACTGAAAAGTCAAAC | |
| | ATCATCCGGGGCTGGATCTTTGGCACCACTCTTGATTCAAAGACCCAGT | |
| | CACTGCTGATTGTGAACAATGCTACAAACGTGGTTATCAAaGTcTGcGAG | |
| | TTTCAGTTCTGTAACGATCCATTTTTGGGAGTGTACTACCACAAGAACA | |
| | ACAAGTCCTGGATGGAGTCTGAGTTCAGAGTGTATAGCTCTGCTAACAA | |
| | CTGCACCTTCGAGTACGTGTCCCAGCCTTTCCTTATGGACCTGGAAGGC | |
| | AAACAGGGCAATTTCAAAAACCTGAGAGAGTTCGTGTTTAAGAACATT | |
| | GACGGATACTTCAAAATTTATTCTAAGCACACACCAATTAACTTAGTGC | |
| | GGGACCTACCCCAAGGCTTTAGCGCCCTAGAGCCCCTGGTTGACCTGCC | |
| | CATTGGGATCAATATAACAAGGTTCCAAACTCTACTGGCTCTGCATAGA | |
| | AGTTATCTGACCCCAGGAGACAGCTCTAGTGGTTGGACCGCCGGCGCA | |
| | GCAGCCTACTATGTCGGGTACTTACAGCCACGCACGTTCCTTCTGAAGT | |
| | ACAATGAGAACGGGACAATCACTGACGCAGTAGACTGTGCACTGGACC | |
| | CGCTAAGCGAGACTAAGTGCACACTTAAATCCTTCACGGTGGAGAAAG | |
| | GCATTTATCAGACCTCTAACTTCAGGGTGCAGCCAACAGAAAGCATTGT | |
| | GCGATTCCCAAATATTACTAATCTTTGCCCTTTCGGGGAGGTCTTTAATG | |
| | CAACTAGATTCGCATCAGTCTATGCGTGGAACCGCAAACGCATTTCCAA | |
| | TTGTGTCGCAGACTACTCAGTGCTGTACAACTCTGCCTCTTTCAGTACGT | |
| | TCAAGTGTTACGGAGTGTCACCCACTAAACTGAACGACCTGTGCTTTAC | |
| | AAATGTCTACGCTGACTCCTTCGTGATTAGGGGAGACGAGGTGAGACA | |
| | AATTGCCCCCGGACAGACTGGGAAGATTGCCGACTACAATTATAAGCTT | |
| | CCTGATGATTTCACTGGCTGTGTTATTGCCTGGAATAGTAACAATCTGG | |
| | ATAGCAAGGTGGGAGGCAACTATAACTACTTATATCGACTGTTTAGGAA | |
| | GAGTAATCTGAAACCATTTGAGCGGGATATTTCCACAGAAATTTACCAG | |
| | GCCGGGAGCACACCATGTAATGGGGTGGAGGGATTTAATTGTTACTTCC | |
| | CACTCCAGAGCTATGGTTTCCAACCCACCAATGGAGTGGGTTACCAGCC | |
| | CTATAGAGTCGTGGTGCTTAGTTTTGAGCTGCTTCACGCCCCAGCAACC | |
| | GTCTGCGGTCCCAAAAAGTCGACCAATCTCGTGAAAAACAAATGCGTA | |
| | AACTTCAACTTTAACGGCTTAACAGGAACCGGCGTGCTCACCGAAAGC | |
| | AACAAGAAATTCCTTCCATTTCAGCAATTCGGAAGGGACATCGCCGACA | |
| | CAACAGACGCcGTcAGGGACCCACAGACTCTGGAGATACTGGACATCAC | |
| | TCCTTGTTCGTTTGGGGGCGTCTCGGTCATCACACCCGGGACTAATACT | |
| | AGTAATCAGGTAGCAGTTTTATATCAAGGCGTCAACTGTACCGAAGTAC | |
| | CTGTGGCCATACACGCTGATCAGCTAACGCCAACATGGCGAGTCTATTC | |
| | CACCGGCTCTAACGTTTTTCAGACCAGGGCTGGGTGCCTGATAGGGGCA | |
| | GAGCACGTCAATAATTCCTATGAGTGTGATATCCCCATAGGTGCGGGGA | |
| | TCTGTGCCAGCTATCAAACCCAAACCAATTCACCAAGGCGAGCACGGTC | |
| | TGTGGCTTCTCAGAGCATAATTGCATATACAATGTCACTGGGCGCTGAG | |
| | AATAGCGTTGCATACTCTAATAACAGCATAGCCATTCCCACGAACTTTA | |
| | CTATCAGTGTGACAACCGAAATATTGCCAGTTTCGATGACCAAAACTAG | |
| | CGTGGATTGCACGATGTACATCTGTGGAGACTCTACCGAATGCAGCAAT | |
| | CTGCTATTACAATATGGCAGCTTCTGTACACAGTTAAATCGAGCCTTGA | |
| | CAGGCATCGCAGTGGAACAGGACAAAAATACTCAAGAGGTGTTTGCAC | |
| | AGGTGAAGCAAATCTACAAAACGCCCCCCATTAAAGATTTTGGCGGGTT | |
| | CAATTTTTCACAAATTCTCCCCGACCCGTCTAAGCCGAGTAAGCGGTCC | |
| | TTCATCGAAGATCTGCTCTTTAACAAAGTAACCCTCGCCGATGCCGGCT | |
| | TTATTAAGCAGTATGGCGACTGCCTGGGGGATATAGCCGCTCGTGACCT | |
| | GATTTGCGCCCAGAAGTTCAATGGTCTGACCGTGTTGCCTCCTTTATTGA | |
| | CCGATGAAATGATTGCCCAGTACACTAGTGCCCTGCTGGCCGGCACTAT | |
| | CACGTCTGGGTGGACCTTCGGAGCTGGTGCCGCCTTGCAGATACCTTTT | |
| | GCAATGCAGATGGCCTATAGGTTTAATGGTATCGGAGTGACTCAGAAC | |
| | GTACTGTACGAGAACCAGAAGCTCATCGCTAATCAATTTAACTCCGCTA | |
| | TCGGAAAAATCCAGGACAGCCTCTCTTCTACAGCTAGCGCTCTGGGCAA | |
| | ACTGCAGGATGTCGTTAATCAGAATGCCCAGGCCCTGAACACCTTGGTT | |
| | AAACAACTATCTTCCAACTTCGGGGCCATATCCAGTGTGTTGAATGATA | |
| | TTCTCTCCCGCTTGGATAAGGTGGAAGCTGAGGTGCAGATCGATCGCTT | |
| | GATCACCGGCAGACTGCAGTCCCTCCAGACATATGTAACTCAGCAGCTG | |
| | ATTAGAGCCGCCGAGATAAGGGCAAGTGCGAATCTGGCTGCCACCAAG | |
| | ATGAGCGAATGTGTATTGGGCCAGAGCAAACGAGTTGATTTTTGCGGTA | |
| | AGGGGTATCATTTAATGTCTTTCCCTCAATCCGCACCTCATGGCGTAGTT | |
| | TTCCTGCATGTGACTTATGTCCCGGCTCAGGAGAAGAATTTTACCACAG | |
| | CCCCCGCGATCTGCCATGACGGAAAGGCCCACTTCCCCCGGGAAGGCG | |
| | TGTTTGTATCCAATGGGACTCACTGGTTTGTCACTCAGCGAAATTTTTAT | |
| | GAACCACAGATCATCACCACTGACAACACATTTGTTAGTGGAAACTGCG | |
| | ATGTGGTCATCGGCATCGTGAATAACACTGTCTATGATCCACTGCAACC | |
| | TGAACTGGATTCTTTTAAAGAGGAACTCGACAAGTATTTTAAAAACCAC | |
| | ACTAGCCCTGACGTGGATCTCGGTGACATTTCTGGCATCAACGCTAGCG | |
| | TAGTGAACATTCAGAAAGAGATAGATAGACTTAATGAGGTGGCCAAGA | |
| | ACCTCAACGAAAGTCTGATCGACCTCCAGGAACTGGGGAAATACGAGC | |
| | AGTACATTAAATGGCCTTGGTACATATGGCTGGGGTTCATTGCTGGGCT | |
| | GATCGCAATAGTGATGGTGACCATAATGCTCTGTTGCATGACTAGCTGC | |
| | TGCAGCTGCCTGAAGGGCTGCTGTAGTTGTGGGTCATGTTGTAAGTTTG | |
| | ACGAAGATGATAGCGAGCCTGTCCTTAAAGGAGTGAAGCTCCACTACA | |
| | CCTAG | |
| Spike IDT- | ATGTTTGTCTTTCTGGTCCTGCTTCCCCTCGTTAGTTCTCAGTGTGTGAA | 86 |
| 4C | CCTCACCACACGGACGCAACTCCCTCCAGCTTACACAAATTCTTTTACG | |
| | CGAGGCGTGTATTATCCGGATAAAGTTTTCAGGTCCTCCGTCCTGCACT | |
| | CCACGCAGGACCTTTTTTTGCCGTTCTTTTCTAACGTAACATGGTTTCAT | |
| | GCCATTCATGTTTCCGGGACAAACGGTACGAAACGCTTTGATAACCCTG | |
| | TGCTGCCGTTCAATGATGGCGTTTACTTTGCCTCTACGGAAAAGAGTAA | |
| | CATAATCCGAGGCTGGATCTTCGGGACCACCCTGGATAGCAAGACTCA | |
| | GAGTCTTCTCATCGTTAATAACGCTACAAACGTTGTTATCAAaGTcTGcG | |
| | AATTCCAGTTTTGCAACGATCCCTTTTTGGGGGTATACTATCACAAAAA | |
| | CAAcAAAAGTTGGATGGAATCAGAGTTTCGCGTGTATTCTTCTGCGAAC | |
| | AACTGCACGTTTGAATACGTTAGTCAGCCTTTTCTCATGGACTTGGAgGG | |
| | cAAaCAGGGGAACTTTAAAAACTTGCGGGAGTTCGTTTTTAAGAACATA | |
| | GATGGTTACTTCAAAATTTATAGCAAACATACACCGATCAACCTCGTGA | |
| | GAGATCTCCCACAGGGTTTTTCCGCACTCGAACCGCTCGTGGATCTGCC | |
| | GATTGGAATTAACATTACCCGCTTCCAGACCCTGTTGGCTCTGCACAGA | |
| | AGCTATCTGACGCCAGGGGATTCCAGCAGTGGATGGACGGCGGGTGCG | |
| | GCCGCGTATTATGTAGGCTATCTCCAACCCCGAACGTTCTTGCTGAAGT | |
| | ACAATGAGAATGGGACCATTACGGATGCTGTGGATTGTGCATTGGATCC | |
| | TCTCTCTGAGACAAAATGCACCCTTAAAAGCTTCACTGTAGAAAAGGGT | |
| | ATTTATCAGACTAGCAACTTCCGCGTACAACCAACGGAGTCTATCGTTA | |
| | GGTTCCCCAACATTACTAACTTGTGCCCATTTGGCGAAGTGTTTAACGC | |
| | AACTAGGTTTGCTAGTGTCTATGCTTGGAATCGAAAGAGAATAAGCAAT | |
| | TGTGTCGCAGATTACTCCGTATTGTATAATTCTGCAAGCTTTTCAACATT | |
| | CAAGTGCTACGGAGTGTCTCCCACCAAATTGAACGACCTGTGTTTTACT | |
| | AACGTGTATGCCGACTCTTTCGTTATCCGAGGCGATGAGGTCAGGCAAA | |
| | TTGCCCCCGGACAAACTGGGAAAATTGCGGATTATAATTACAAGCTTCC | |
| | AGACGACTTTACGGGCTGTGTTATCGCATGGAACTCCAACAATCTCGAC | |
| | AGCAAAGTGGGTGGAAATTATAATTATTTGTATAGATTGTTTCGCAAGT | |
| | CCAACCTGAAGCCATTCGAGAGAGACATCTCCACCGAGATTTATCAAGC | |
| | CGGCTCAACTCCTTGCAACGGAGTCGAAGGCTTCAACTGTTATTTTCCG | |
| | CTTCAGTCCTATGGTTTTCAACCTACGAACGGCGTGGGATACCAGCCGT | |
| | ATCGAGTCGTGGTACTGTCCTTTGAACTTTTGCACGCCCCAGCAACTGTT | |
| | TGCGGACCAAAAAAGTCCACAAATCTCGTCAAAAACAAGTGCGTTAAT | |
| | TTTAATTTTAACGGGCTTACGGGTACTGGTGTACTGACGGAGTCCAATA | |
| | AGAAATTCCTGCCATTCCAACAGTTTGGACGGGATATTGCTGATACGAC | |
| | CGACGCTGTGCGAGATCCCCAGACACTTGAGATCCTCGACATAACCCCC | |
| | TGTAGTTTTGGTGGAGTGTCTGTAATTACCCCCGGAACGAACACCAGCA | |
| | ACCAAGTTGCGGTGCTTTATCAGGGTGTTAATTGCACTGAGGTTCCTGT | |
| | CGCGATACATGCCGACCAACTGACGCCTACATGGCGAGTATATTCAACG | |
| | GGCTCCAACGTCTTCCAGACGCGAGCCGGTTGTCTCATTGGAGCTGAAC | |
| | ATGTGAACAACTCTTATGAATGCGATATACCAATTGGGGCtGGaATCTGC | |
| | GCCTCTTATCAGACGCAGACTAACTCACCCAGACGAGCACGGAGCGTG | |
| | GCAAGCCAATCCATTATTGCCTACACCATGTCCTTGGGAGCTGAGAATT | |
| | CAGTCGCCTATTCTAATAATAGCATTGCTATACCGACGAACTTTACAAT | |
| | TTCCGTAACTACCGAAATATTGCCCGTCAGTATGACTAAGACTAGCGTT | |
| | GACTGCACAATGTACATTTGCGGCGATAGTACCGAATGCTCTAATCTTC | |
| | TTCTGCAGTATGGTAGTTTTTGTACACAACTGAATCGAGCTCTGACTGG | |
| | GATCGCAGTCGAACAGGACAAAAATACACAGGAAGTTTTCGCGCAAGT | |
| | GAAGCAAATCTACAAAACGCCTCCCATAAAAGATTTCGGAGGATTCAA | |
| | TTTCAGTCAGATACTCCCTGATCCCTCTAAACCATCTAAACGATCCTTTA | |
| | TCGAAGATTTGCTGTTCAACAAaGTcACCCTTGCTGACGCTGGATTCATA | |
| | AAGCAGTACGGGGATTGTCTTGGCGATATCGCAGCCCGAGACCTTATTT | |
| | GTGCCCAAAAATTTAACGGACTTACGGTACTCCCTCCCCTTCTGACTGA | |
| | CGAAATGATAGCCCAGTACACCAGTGCTCTGCTGGCTGGCACCATAACG | |
| | AGCGGATGGACTTTTGGTGCGGGTGCAGCACTGCAGATCCCCTTCGCGA | |
| | TGCAAATGGCATACAGGTTTAATGGGATTGGGGTCACCCAGAATGTATT | |
| | GTACGAGAACCAGAAGCTTATAGCGAATCAATTTAACAGTGCAATTGG | |
| | TAAGATTCAGGACAGCCTTTCAAGTACCGCGAGTGCTCTCGGGAAGTTG | |
| | CAGGATGTAGTAAATCAAAATGCGCAGGCGCTGAATACGTTGGTTAAA | |
| | CAGCTCAGCAGTAATTTTGGAGCAATTTCTAGCGTGCTGAATGACATCC | |
| | TCAGCAGACTCGATAAGGTGGAGGCTGAGGTACAGATAGATAGACTCA | |
| | TCACGGGCAGATTGCAGAGTTTGCAGACATACGTCACGCAACAACTCAT | |
| | TCGAGCAGCAGAAATTAGAGCATCCGCAAATCTGGCGGCCACGAAAAT | |
| | GTCTGAGTGCGTTCTGGGGCAGTCCAAGAGAGTTGACTTTTGTGGGAAA | |
| | GGATATCATCTGATGAGTTTTCCGCAGTCAGCGCCACATGGTGTGGTCT | |
| | TTCTGCACGTTACTTATGTCCCCGCACAGGAGAAGAATTTTACGACCGC | |
| | GCCAGCTATTTGCCATGACGGTAAGGCTCACTTCCCGAGGGAAGGGGT | |
| | ATTCGTTTCTAACGGTACGCATTGGTTTGTTACGCAACGGAACTTTTATG | |
| | AACCACAGATTATTACCACCGACAACACATTCGTAAGTGGAAACTGTG | |
| | ATGTCGTTATCGGAATAGTAAATAATACCGTTTATGACCCCCTTCAGCC | |
| | TGAACTTGATTCCTTCAAGGAAGAGCTCGATAAATACTTTAAGAACCAC | |
| | ACCAGCCCCGATGTTGACCTGGGTGATATATCTGGGATCAACGCTTCTG | |
| | TCGTCAACATTCAAAAAGAGATCGATCGCCTGAATGAGGTGGCCAAAA | |
| | ACCTCAATGAAAGTCTCATTGACCTTCAAGAACTCGGTAAGTACGAGCA | |
| | ATACATCAAGTGGCCATGGTACATATGGCTGGGCTTCATTGCTGGGTTG | |
| | ATAGCTATAGTGATGGTTACGATAATGTTGTGTTGTATGACATCCTGCT | |
| | GTAGCTGCCTTAAAGGTTGTTGTTCTTGCGGTTCTTGTTGTAAGTTTGAC | |
| | GAAGATGATTCAGAGCCTGTTCTGAAAGGGGTGAAGCTCCATTATACTT | |
| | GA | |
| Spike-SGI | Not shown | 87 |

### Cloning of Sequence-Optimized Spike Sequences

[0480] Each sequence-optimized Spike sequence was ordered as a set of 3 gBlocks from IDT with each gblock between 1300-1500 bp and overlapping with each other by approximately 100 nucleotides. The gBlocks comprising the 5′ and 3′ ends of the Spike sequence overlapped with the plasmid backbone by 100 nucleotides. The gblocks were assembled by a combination of PCR and Gibson assembly into a linearized pA68-E4d AsisI/PmeI backbone to generate pA68-E4-sequence-optimized Spike clones. Clones were screened by PCR and clones of the correct size were then grown for plasmid production and sequencing by either NGS or Sanger sequencing. Once a correct clone was sequence confirmed, large scale plasmid production and purification was performed for transfection.

### Vector Production

[0481] pA68-E4-Spike plasmid DNA was digested with Pad and 2 ug DNA was transfected into 293F cells using TransIt Lenti transfection reagent. Five days post transfection, cells and media were harvested and a lysate generated by freeze-thawing at −80 C and at 37 C. A fraction of the lysate was used to re-infect 30 mL of 293F cells and incubated for 48-72 h before harvesting. Lysate was generated by freeze-thawing at −80 C and at 37 C and a fraction of the lysate was used to infect 400 mL of 293F cells seeded at 1e6 cells/mL. Next, 48-72 h later cells were harvested, lysed in 10 mM tris pH 8.0/0.1% Triton X-100 and freeze thawed 1× at 37 and −80 C. The lysate was then clarified by centrifugation at 4300×g for 10 mM prior to loading on a 1.2/1.4 CsCl gradient. The gradient was run for a minimum of 2 h before the bands were harvested diluted 2-4× in Tris and then rerun on a 1.35 CsCl gradient for at least 2 h. The viral bands were harvested and then dialyzed 3× in 1×ARM buffer. The virus infectious titer was determined by an immunostaining titer assay and the viral particle measured by Absorbance at A260 nm.

### Western Analysis

[0482] Samples for Spike expression analysis were either harvested at designated times post transfection or in the case of purified virus by setting up a controlled infection experiment with a known virus MOI and harvested at a specific time post infection, typically 24 to 48 h. 1e6 cells were typically harvested in 0.5 mL of SDS-PAGE loading buffer with 10% Beta-mercaptoethanol. Samples were boiled and run on 4-20% polyacrylamide gels under denaturing and reducing conditions. The gels were then blotted onto a PVDF membrane using a BioRad Rapid transfer device. The membrane was blocked for 2 h at room temperature in 5% Skim milk in TBST. The membrane was then probed with an anti-Spike 51 polyclonal (Sino Biologicals) or anti-Spike monoclonal antibody 1A9 (GeneTex; Cat. No. GTX632604) and incubated for 2 h. The membrane was then washed in PBST (5×) and the probed with a HRP-linked anti-mouse antibody (Bethyl labs) for 1 h. The membrane was washed as described above and then incubated with a chemiluminescent substrate ECL plus (ThermoFisher). The image was then captured using a Chemidoc (BioRad device).

### Results

[0483] Expression of Spike S2 protein was assessed during viral production in 293F cells with various Spike-encoding vectors. Using vectors encoding IDT sequence-optimized Spike cassettes, Spike S2 protein was detected by Western blot using an anti-Spike S2 antibody (GeneTex) when expressed in a SAM vector, but not when expressed in a ChAdV68 vector (“CMV-Spike (IDT)”; SEQ ID NO:69) at two different MOIs and timepoints (data not shown). Two clones engineered to express Spike variant D614G (“CMV-Spike (IDT)-D614G” SEQ ID NO:70) also did not express detectable levels of Spike protein by Western using the S2 antibody (data not shown). Clones engineered to co-express the SARS-CoV-2 Membrane protein together with Spike (“CMV-Spike (IDT)-D614G-Mem” SEQ ID NO:66) or including a R682V mutations to disrupt the Furin cleavage site did not rescue the expression phenotype (data not shown). In contrast, Spike 51 protein was detected for all IDT constructs, albeit at low levels, with the exception of the Furin R682V mutation in which no Spike 51 protein was detected.

[0484] To deconvolute if the expressions issues with the IDT sequence-optimized clones were specific to the 51 or S2 domains, vectors expressing only the 51 or S2 domains were also evaluated. A ChAdV68 vector encoding the IDT sequence-optimized Spike 51 protein alone demonstrated strong protein expression, in contrast to the lower expression observed with the full-length Spike vector (data not shown). As expected, no signal was observed for 51 with the vector encoding the S2 domain alone. In contrast, a ChAdV68 vector encoding the IDT sequence-optimized Spike S2 protein alone did not demonstrate observable protein expression, comparable to the absence of signal observed with the full-length Spike vector (data not shown). Thus, the data indicate the IDT sequence-optimized Spike S2 exhibited poor expression, including impacting expression of the full-length Spike sequence.

[0485] To address protein expression, the SARS-CoV-2 Spike-encoding nucleotide sequence was sequence-optimized using additional sequence-optimization algorithms; (1) a single sequence (SEQ ID NO:87) generated using SGI DNA (La Jolla, CA); (2) 6 sequences designated CT1, CT20, CT56, CT83, CT131, and CT 199 (SEQ ID NOs:79-84) generated using COOL from the University of Singapore (COOL algorithm generates multiple sequences and 6 were selected). Sequence-optimization with the COOL algorithm generated a sequence—CT1 (SEQ ID NO:79)—that demonstrated detectable expression using a ChAdV68 vector as assessed by Western using both an anti-S2 and anti-S1 antibody (data not shown). The additional sequences generated using the COOL algorithm and the SGI algorithm were also assessed by Western. The SGI clone and COOL sequence CT131 also demonstrated detectable levels of Spike protein by Western using an anti-S2 antibody, while other COOL generated sequences did not generate detectable signals other than the control CT1 derived sequence (lane 2). Thus, the data indicate that specific sequence-optimizations improved expression of full-length SARS-CoV-2 Spike protein in ChAdV68 vectors.

[0486] SARS-CoV-2 is a cytoplasm-replicating positive-sense RNA virus encoding its own replication machinery, and as such SARS-CoV-2 mRNA are not naturally processed by splicing and nuclear-export machineries. To assess the role of splicing in SARS-CoV-2 Spike-encoding mRNA expressed from a ChAdV68 vector, primers were designed to amplify the Spike coding region. In the presence of mRNA splicing, amplicon sizes would be smaller than the expected full-length coding region. While PCR of the plasmid encoding the SARS-CoV-2 Spike cassette demonstrated the expected amplicon size (“Spike Plasmid” left panel, right column), PCR amplification of cDNA from infected 293 cells demonstrated two smaller amplicons indicating splicing of the mRNA transcript (“ChAd-Spike (IDT) cDNA” left panel, left column). In addition, the Spike coding sequence was split into S1 and S2 encoding sequences. PCR amplification of S1 cDNA from infected 293 cells demonstrated the expected amplicon size (“SpikeS1” right panel, left column) indicating S1 was likely not undergoing undesired splicing while sequences in the S2 region may be influencing splicing.

[0487] The smaller amplicon sequences were analyzed and two splice donor sites were identified by Sanger sequencing. Three additional potential donor sites were predicted by further sequence analysis. The position and identity of the splice motif sequences are presented below (the nt triplets correspond to codons, numbering starts with reference to Spike ATG):

NT 385-:
AAG GTG TGT → AAa GTc TGc (identified by sequencing)
NT 539-:
AA GGT AAG C → Ag GGc AAa C (identified by sequencing)
NT 2003-:
CA GGT ATC T → Ct GGa ATC T (predicted)
NT 2473-:
AAG GTG ACC → AAa GTc ACC (predicted)
NT 3417-:
C CCC CTT CAG CCT GAA CTT GAT TCC (SEQ ID NO: 123) → T CCa CTg
CAa CCT GAA CTT GAT agt (SEQ ID NO: 124)

[0488] Selected splice donor sites were removed by site-directed mutagenesis disrupting the nucleotide sequence motif while not disturbing the amino acid sequence. COOL sequence-optimized clone CT1 was used as the reference sequence for clone CT1-2C (SEQ ID NO:85) having the sequence-identified splice donor motifs at NT385 and NT539 mutated. IDT sequence-optimized clone was used as the reference sequence for clone IDT-4C (SEQ ID NO:86) and had both sequence-identified and predicted splice donor motifs at NT385, NT539, NT2003, and NT2473 mutated, as well as a possible polyadenylation site AATAAA at NT445 mutated to AAcAAA. Spike protein expression was detected by Western in the clone including the sequence-identified splice donor motifs. Splicing was further assessed in the constructs by PCR analysis. Mutating the splice donor motifs and/or a potential polyA site alone did not prevent splicing indicating splicing potentially occurred from sub-dominant splice sites.

[0489] Given the identification of splicing events in the full-length Spike mRNA expressed from ChAdV68 vectors, additional constructs are generated and assessed for improved protein expression. Additional optimizations include constructs featuring exogenous nuclear export signals (e.g., Constitutive Transport Element (CTE), RNA Transport Element (RTE), or Woodchuck Posttranscriptional Regulatory Element (WPRE)) or the addition of an artificial intron through introduction of exogenous splice donor/branch/acceptor motif sequences to bias splicing, such as introducing a SV40 mini-intron (SEQ ID NO:88) between the CMV promoter and the Kozak sequence immediately upstream of the Spike gene. The identified and predicted splice donor motifs are also further evaluated in combination with additional sequence optimizations.

[0490] XIV.B. Multicistronic Self-Amplifying mRNA Vector Evaluation

[0491] Evaluation results are presented for self-amplifying mRNA (SAM) SARS-CoV-2 vaccine designs featuring multiple expression cassettes driven by separate subgenomic alphavirus-derived promoters. FIG. 1 illustrates a self-amplifying mRNA (SAM) system featuring a single alphavirus-derived subgenomic promoter (SGP). In such a system, the single SGP is solely responsible for the transcription of the payload cassette, including multicistronic transcripts expressing multiple proteins using 2A ribosome skipping sequence elements (e.g., E2A, P2A, F2A, or T2A sequences) or Internal Ribosome Entry Site (IRES) sequence elements. FIG. 2 illustrates a SAM system featuring multiple expression cassettes driven by separate SGPs. Without wishing to be bound by theory, the multiple SGPs can drive higher expression of the gene under control of the second SGP (SGP2) given both SGP1 and SGP2 will produce transcripts encoding the second gene.

[0492] Various SARS-CoV-2 vaccine designs, constructs, and dosing regimens were evaluated. The vaccines encoded various optimized versions of the Spike protein, selected predicted T cell epitopes (TCE), or a combination of Spike and TCE cassettes.

[0493] Specifically, various subgenomic alphavirus-derived promoters (SGP) including the core 24-nt conserved promoter sequence ctctctacggcTAAcctgaa(+1)tgga (SEQ ID NO: 27989) that functions as promoter for the transcription of the 26S transcripts were assessed.

[0494] In vectors with two cassettes either encoding a SARS-CoV-2 peptide (various Spike variant sequences below in Table 2) or various concatenated T cell epitope cassettes (see representative “TCE5”), the first cassette was driven by a first subgenomic alphavirus-derived promoter SGP1 (GGGCCCCTATAACTCTCTACGGCTAACCTGAATGGACTACGAC (SEQ ID NO: 27981)) and the second cassette was driven by a second subgenomic alphavirus-derived promoter SGP2 (GGGCCCCTATAACTCTCTACGGCTAACCTGAATGGACTACGACATAGTCTAGTCCG CCAAG (SEQ ID NO: 27980)). The SGP2 was flanked by nucleotides encoding the C-terminal 8 amino acids of the nonstructural protein 4 (nsP4) on the 5′ region and flanked 3′ by nucleotides encoding a 18-nt nontranslated region (e.g., atagtctagtccgccaag (SEQ ID NO: 27976)) from the VEEV alphavirus (see Am. J. Trop. Med. Hyg., 59(6), 1998, pp. 952-964, herein incorporated by reference for all purposes). Flanking sequences were included in SGP2 for various purposes, including preventing recombination with SGP1 and incorporating any potential additional transcriptional enhancer elements. In addition, SGP2 is encoded immediately 5′ of the Kozak sequence for the second cassette. A representative sequence including both SGP1 and SGP2 is shown in SEQ ID NO:93.

[0495] Specific methods are described in further detail below.

### Mouse Immunizations

[0496] All mouse studies were conducted at Murigenics under IACUC approved protocols. Balb/c mice (Envigo), 6-8 weeks old were used for all studies. Vaccines were stored at −80° C., thawed at room temperature on the day of immunization, and then diluted to 0.1 μg/mL with PBS and filtered through a 0.2 micron filter. Filtered formulations were stored at 4° C. and injected within 4 hours of preparation. All immunizations were bilateral intramuscular to the tibialis anterior, 2 injections of 50 μL each, 100 μL total.

### Splenocyte Isolation

[0497] For the evaluation of T-cell response, mouse spleens were extracted at various timepoints following immunization. Note that in some studies immunizations were staggered to enable spleens to be collected at the same time and compared. Spleens were collected and analyzed by IFNγ ELISpot and ICS. Spleens were suspended in RPMI complete (RPMI+10% FBS) and dissociated using the gentleMACS Dissociator (Milltenyi Biotec). Dissociated cells were filtered using a 40 μm strainer and red blood cells were lysed with ACK lysing buffer (150 mM NH₄Cl, 10 mM KHCO₃, 0.1 mM EDTA). Following lysis, cells were filtered with a 30 μm strainer and resuspended in RMPI complete.

### Serum Collection

[0498] At various timepoints post immunization 200 μL of blood was drawn. Blood was centrifuged at 1000 g for 10 minutes at room temperature. Serum was collected and frozen at −80° C.

### S1 IgG MSD/ELISA

[0499] 96-well QuickPlex plates (Meso Scale Discovery, Rockville, MD) were coated with 50 μL of 1 μg/mL SARS-CoV-2 S1 (ACROBiosystems, Newark, DE), diluted in DPBS (Corning, Corning, NY), and incubated at 4° C. overnight. Wells were washed three times with agitation using 250 μL of PBS+0.05% Tween-20 (Teknova, Hollister, CA) and plates blocked with 150 μL Superblock PBS (Thermo Fisher Scientific, Waltham, MA) for 1 hour at room temperature on an orbital shaker. Test sera was diluted at appropriate series in 10% species-matched serum (Innovative Research, Novi, MI) and tested in single wells on each plate. Starting dilution 1:100, 3-fold dilutions, 11 dilutions per sample. Wells were washed and 50 uL of the diluted samples were added to wells and incubated for 1 hour at room temperature on an orbital shaker Wells were washed and incubated with 25 μL of 1 μg/mL SULFO-TAG labeled anti-mouse antibody (MSD), diluted in DPBS+1% BSA (Sigma-Aldrich, St. Louis, MO), for 1 hour at room temperature on an orbital shaker. Wells were washed and 150 μL tripropylamine containing read buffer (MSD) added. Plates were run immediately using the QPlex SQ 120 (MSD) ECL plate reader. Endpoint titer is defined as the reciprocal dilution for each sample at which the signal is twice the background value, and is interpolated by fitting a line between the final two values that are greater than twice the background value. The background values is the average value (calculated for each plate) of the control wells containing 10% species-matched serum only.

### IFNγ ELISpot Analysis

[0500] IFNγ ELISpot assays were performed using pre-coated 96-well plates (MAbtech, Mouse IFNγ ELISpot PLUS, ALP) following manufacturer's protocol. Samples were stimulated overnight with various overlapping peptide pools (15 amino acids in length, 11 amino acid overlap), at a final concentration of 1 μg/mL per peptide. For Spike—eight different overlapping peptide pools spanning the SARS-CoV-2 Spike antigen (Genscript, 36-40 peptides per pool). Splenocytes were plated in duplicate at 1×10⁵ cells per well for each Spike pool, and 2.5×10⁴ cells per well (mixed with 7.5×10⁴ naïve cells) for Spike pools 2, 4, and 7. To measure response to the TCE cassette—one pool spanning Nucleocapsid protein (JPT, NCap-1, 102 peptides), one spanning Membrane protein (JPT, VME-1, 53 peptides), and one spanning the Orf3a regions encoded in the cassette (Genscript, 38 peptides). For TCE peptide pools, splenocytes were plated in duplicate at 2×10⁵ cells per well for each pool. A DMSO only control was plated for each sample and cell number. Following overnight incubation at 37° C., plates were washed with PBS and incubated with anti-monkey IFNγ mAb biotin (MAbtech) for two hours, followed by an additional wash and incubation with Streptavidin-ALP (MAbtech) for one hour. After final wash, plates were incubated for ten minutes with BCIP/NBT (MAbtech) to develop the immunospots. Spots were imaged and enumerated using an AID reader (Autoimmun Diagnostika). For data processing and analysis, samples with replicate well variability (Variability=Variance/(median+1)) greater than 10 and median greater than 10 were excluded. Spot values were adjusted based on the well saturation according to the formula:

AdjustedSpots=RawSpots+2*(RawSpots*Saturation/(100-Saturation)

Each sample was background corrected by subtracting the average value of the negative control peptide wells. Data is presented as spot forming colonies (SFC) per 1×10⁶ splenocytes. Wells with well saturation values greater than 35% were labeled as “too numerous to count” (TNTC) and excluded. For samples and peptides that were TNTC, the value measured with 2.5×10⁴ cells/well was used.

[0501] The various sequences evaluated are as follows:
[0502] “IDTSpike_{g}”: SARS-CoV-2 Spike protein encoded by IDT optimized sequence (see SEQ ID NO:69) and including a D614G mutation with reference to SEQ ID NO:59 (see corresponding nucleotide mutation in SEQ ID NO:70); also referred to as “Spike V1”
[0503] “CTSpike_{g}”: SARS-CoV-2 Spike protein encoded by Cool Tool optimized sequence version 1 (SEQ ID NO:79) including a D614G mutation with reference to SEQ ID NO:59 (see corresponding nucleotide mutation in SEQ ID NO:70); also referred to as “Spike V2.” In versions referred to as “CTSpike_{D}” D614 is not altered.
[0504] “CTSpikeF2P_{g}”: SARS-CoV-2 Spike protein encoded by Cool Tool optimized sequence version 1 (SEQ ID NO:79) including a R682V to disrupt the Furin cleavage site (682-685 RRAR (SEQ ID NO: 125) to GSAS (SEQ ID NO: 126)); and K986P and V987P to interfere with the secondary structure of Spike with reference to the reference Spike protein (SEQ ID NO:59). The nucleotide sequence is shown in SEQ ID NO:89 and protein sequence shown in SEQ ID NO:90
[0505] “TCE5”: Selected CD8+ epitopes predicted by the EDGE platform to be presented on MHC molecules for SARS-CoV-2 proteins other than Spike. The nucleotide sequence is shown in SEQ ID NO:91 and protein sequence shown in SEQ ID NO:92
[0506] “TCE6”: Selected CD8+ epitopes predicted by the EDGE platform to be presented on MHC molecules for SARS-CoV-2 proteins other than Spike.
[0507] “TCE7”: Selected CD8+ epitopes predicted by the EDGE platform to be presented on MHC molecules for SARS-CoV-2 proteins other than Spike.
[0508] “TCE7”: Selected CD8+ epitopes predicted by the EDGE platform to be presented on MHC molecules for SARS-CoV-2 proteins other than Spike.
[0509] “TCE9”: Selected CD8+ epitopes predicted by the EDGE platform to be presented on MHC molecules for SARS-CoV-2 proteins other than Spike, including validated epitopes conserved between SARS and SARS-2 (e.g., as a pan-coronavirus vaccine), with certain frames extended (21 additional amino acids across all frames) to include additional predicted epitopes for alleles (i.e., not validated epitopes), for a total size of 556 amino acids
[0510] “TCE11”: Selected CD8+ epitopes predicted by the EDGE platform to be presented on MHC molecules for SARS-CoV-2 proteins other than Spike and Nucleocapsid; validated epitopes for a total size of 616 amino acids (197aa+full N) in addition to Spike
[0511] A representative SAM vector SAM-SGP1-TCE5-SGP2-CTSpike_{G}F2P is shown in SEQ ID NO:93

TABLE 2
Encoded Spike Variants

CTSpikeF2Pg nucleotide (SEQ ID NO: 89); Bold Italic Furin Mutation 682-685 RRAR (SEQ ID NO: 125)
to GSAS (SEQ ID NO: 126), Bold Lower Case K986P and V987P
ATGTTTGTCTTCCTGGTCTTGCTGCCGCTGGTGAGCAGCCAGTGCGTGAATCTCACCACCCGCACCC
AGCTTCCACCTGCCTACACTAACAGCTTCACCCGAGGGGTGTATTACCCTGACAAGGTATTCCGGTC
CTCCGTCCTCCATAGCACGCAGGACCTTTTTCTGCCCTTCTTCTCAAATGTGACATGGTTCCATGCCA
TTCACGTGAGCGGCACGAATGGAACGAAGCGCTTTGATAACCCCGTGCTGCCTTTCAATGACGGCG
TCTACTTCGCCTCCACTGAAAAGTCAAACATCATCCGGGGCTGGATCTTTGGCACCACTCTTGATTC
AAAGACCCAGTCACTGCTGATTGTGAACAATGCTACAAACGTGGTTATCAAGGTGTGTGAGTTTCA
GTTCTGTAACGATCCATTTTTGGGAGTGTACTACCACAAGAACAACAAGTCCTGGATGGAGTCTGA
GTTCAGAGTGTATAGCTCTGCTAACAACTGCACCTTCGAGTACGTGTCCCAGCCTTTCCTTATGGAC
CTGGAAGGCAAACAGGGCAATTTCAAAAACCTGAGAGAGTTCGTGTTTAAGAACATTGACGGATA
CTTCAAAATTTATTCTAAGCACACACCAATTAACTTAGTGCGGGACCTACCCCAAGGCTTTAGCGCC
CTAGAGCCCCTGGTTGACCTGCCCATTGGGATCAATATAACAAGGTTCCAAACTCTACTGGCTCTGC
ATAGAAGTTATCTGACCCCAGGAGACAGCTCTAGTGGTTGGACCGCCGGCGCAGCAGCCTACTATG
TCGGGTACTTACAGCCACGCACGTTCCTTCTGAAGTACAATGAGAACGGGACAATCACTGACGCAG
TAGACTGTGCACTGGACCCGCTAAGCGAGACTAAGTGCACACTTAAATCCTTCACGGTGGAGAAAG
GCATTTATCAGACCTCTAACTTCAGGGTGCAGCCAACAGAAAGCATTGTGCGATTCCCAAATATTA
CTAATCTTTGCCCTTTCGGGGAGGTCTTTAATGCAACTAGATTCGCATCAGTCTATGCGTGGAACCG
CAAACGCATTTCCAATTGTGTCGCAGACTACTCAGTGCTGTACAACTCTGCCTCTTTCAGTACGTTC
AAGTGTTACGGAGTGTCACCCACTAAACTGAACGACCTGTGCTTTACAAATGTCTACGCTGACTCCT
TCGTGATTAGGGGAGACGAGGTGAGACAAATTGCCCCCGGACAGACTGGGAAGATTGCCGACTAC
AATTATAAGCTTCCTGATGATTTCACTGGCTGTGTTATTGCCTGGAATAGTAACAATCTGGATAGCA
AGGTGGGAGGCAACTATAACTACTTATATCGACTGTTTAGGAAGAGTAATCTGAAACCATTTGAGC
GGGATATTTCCACAGAAATTTACCAGGCCGGGAGCACACCATGTAATGGGGTGGAGGGATTTAATT
GTTACTTCCCACTCCAGAGCTATGGTTTCCAACCCACCAATGGAGTGGGTTACCAGCCCTATAGAGT
CGTGGTGCTTAGTTTTGAGCTGCTTCACGCCCCAGCAACCGTCTGCGGTCCCAAAAAGTCGACCAAT
CTCGTGAAAAACAAATGCGTAAACTTCAACTTTAACGGCTTAACAGGAACCGGCGTGCTCACCGAA
AGCAACAAGAAATTCCTTCCATTTCAGCAATTCGGAAGGGACATCGCCGACACAACAGACGCGGTG
AGGGACCCACAGACTCTGGAGATACTGGACATCACTCCTTGTTCGTTTGGGGGCGTCTCGGTCATC
ACACCCGGGACTAATACTAGTAATCAGGTAGCAGTTTTATATCAAGGCGTCAACTGTACCGAAGTA
CCTGTGGCCATACACGCTGATCAGCTAACGCCAACATGGCGAGTCTATTCCACCGGCTCTAACGTTT
TTCAGACCAGGGCTGGGTGCCTGATAGGGGCAGAGCACGTCAATAATTCCTATGAGTGTGATATCC
CCATAGGTGCGGGGATCTGTGCCAGCTATCAAACCCAAACCAATTCACCAgGGaGcGCAaGcTCTGT
GGCTTCTCAGAGCATAATTGCATATACAATGTCACTGGGCGCTGAGAATAGCGTTGCATACTCTAA
TAACAGCATAGCCATTCCCACGAACTTTACTATCAGTGTGACAACCGAAATATTGCCAGTTTCGATG
ACCAAAACTAGCGTGGATTGCACGATGTACATCTGTGGAGACTCTACCGAATGCAGCAATCTGCTA
TTACAATATGGCAGCTTCTGTACACAGTTAAATCGAGCCTTGACAGGCATCGCAGTGGAACAGGAC
AAAAATACTCAAGAGGTGTTTGCACAGGTGAAGCAAATCTACAAAACGCCCCCCATTAAAGATTTT
GGCGGGTTCAATTTTTCACAAATTCTCCCCGACCCGTCTAAGCCGAGTAAGCGGTCCTTCATCGAAG
ATCTGCTCTTTAACAAAGTAACCCTCGCCGATGCCGGCTTTATTAAGCAGTATGGCGACTGCCTGGG
GGATATAGCCGCTCGTGACCTGATTTGCGCCCAGAAGTTCAATGGTCTGACCGTGTTGCCTCCTTTA
TTGACCGATGAAATGATTGCCCAGTACACTAGTGCCCTGCTGGCCGGCACTATCACGTCTGGGTGG
ACCTTCGGAGCTGGTGCCGCCTTGCAGATACCTTTTGCAATGCAGATGGCCTATAGGTTTAATGGTA
TCGGAGTGACTCAGAACGTACTGTACGAGAACCAGAAGCTCATCGCTAATCAATTTAACTCCGCTA
TCGGAAAAATCCAGGACAGCCTCTCTTCTACAGCTAGCGCTCTGGGCAAACTGCAGGATGTCGTTA
ATCAGAATGCCCAGGCCCTGAACACCTTGGTTAAACAACTATCTTCCAACTTCGGGGCCATATCCA
GTGTGTTGAATGATATTCTCTCCCGCTTGGATccacctGAAGCTGAGGTGCAGATCGATCGCTTGATCA
CCGGCAGACTGCAGTCCCTCCAGACATATGTAACTCAGCAGCTGATTAGAGCCGCCGAGATAAGGG
CAAGTGCGAATCTGGCTGCCACCAAGATGAGCGAATGTGTATTGGGCCAGAGCAAACGAGTTGATT
TTTGCGGTAAGGGGTATCATTTAATGTCTTTCCCTCAATCCGCACCTCATGGCGTAGTTTTCCTGCAT
GTGACTTATGTCCCGGCTCAGGAGAAGAATTTTACCACAGCCCCCGCGATCTGCCATGACGGAAAG
GCCCACTTCCCCCGGGAAGGCGTGTTTGTATCCAATGGGACTCACTGGTTTGTCACTCAGCGAAATT
TTTATGAACCACAGATCATCACCACTGACAACACATTTGTTAGTGGAAACTGCGATGTGGTCATCG
GCATCGTGAATAACACTGTCTATGATCCACTGCAACCTGAACTGGATTCTTTTAAAGAGGAACTCG
ACAAGTATTTTAAAAACCACACTAGCCCTGACGTGGATCTCGGTGACATTTCTGGCATCAACGCTA
GCGTAGTGAACATTCAGAAAGAGATAGATAGACTTAATGAGGTGGCCAAGAACCTCAACGAAAGT
CTGATCGACCTCCAGGAACTGGGGAAATACGAGCAGTACATTAAATGGCCTTGGTACATATGGCTG
GGGTTCATTGCTGGGCTGATCGCAATAGTGATGGTGACCATAATGCTCTGTTGCATGACTAGCTGCT
GCAGCTGCCTGAAGGGCTGCTGTAGTTGTGGGTCATGTTGTAAGTTTGACGAAGATGATAGCGAGC
CTGTCCTTAAAGGAGTGAAGCTCCACTACACCTAG
CTSpikeF2Pg amino acid (SEQ ID NO: 90); Bold Italic Furin Mutation 682-685 RRAR (SEQ ID NO: 125)
to GSAS (SEQ ID NO: 126), Bold Lower Case K986P and V987P
MFVFLVLLPLVSSQCVNLTTRTQLPPAYTNSFTRGVYYPDKVFRSSVLHSTQDLFLPFFSNVTWFHAIHV
SGTNGTKRFDNPVLPFNDGVYFASTEKSNIIRGWIFGTTLDSKTQSLLIVNNATNVVIKVCEFQFCNDPFL
GVYYHKNNKSWMESEFRVYSSANNCTFEYVSQPFLMDLEGKQGNFKNLREFVFKNIDGYFKIYSKHTPI
NLVRDLPQGFSALEPLVDLPIGINITRFQTLLALHRSYLTPGDSSSGWTAGAAAYYVGYLQPRTFLLKYN
ENGTITDAVDCALDPLSETKCTLKSFTVEKGIYQTSNFRVQPTESIVRFPNITNLCPFGEVFNATRFASVY
AWNRKRISNCVADYSVLYNSASFSTFKCYGVSPTKLNDLCFTNVYADSFVIRGDEVRQIAPGQTGKIAD
YNYKLPDDFTGCVIAWNSNNLDSKVGGNYNYLYRLFRKSNLKPFERDISTEIYQAGSTPCNGVEGENCY
FPLQSYGFQPTNGVGYQPYRVVVLSFELLHAPATVCGPKKSTNLVKNKCVNFNFNGLTGTGVLTESNK
KFLPFQQFGRDIADTTDAVRDPQTLEILDITPCSFGGVSVITPGTNTSNQVAVLYQGVNCTEVPVAIHAD
QLTPTWRVYSTGSNVFQTRAGCLIGAEHVNNSYECDIPIGAGICASYQTQTNSPGSASSVASQSIIAYTMS
LGAENSVAYSNNSIAIPTNFTISVTTEILPVSMTKTSVDCTMYICGDSTECSNLLLQYGSFCTQLNRALTGI
AVEQDKNTQEVFAQVKQIYKTPPIKDFGGFNFSQILPDPSKPSKRSFIEDLLFNKVTLADAGFIKQYGDCL
GDIAARDLICAQKFNGLTVLPPLLTDEMIAQYTSALLAGTITSGWTFGAGAALQIPFAMQMAYRFNGIG
VTQNVLYENQKLIANQFNSAIGKIQDSLSSTASALGKLQDVVNQNAQALNTLVKQLSSNFGAISSVLNDI
LSRLDppEAEVQIDRLITGRLQSLQTYVTQQLIRAAEIRASANLAATKMSECVLGQSKRVDFCGKGYHL
MSFPQSAPHGVVFLHVTYVPAQEKNFTTAPAICHDGKAHFPREGVFVSNGTHWFVTQRNFYEPQIITTD
NTFVSGNCDVVIGIVNNTVYDPLQPELDSFKEELDKYFKNHTSPDVDLGDISGINASVVNIQKEIDRLNE
VAKNLNESLIDLQELGKYEQYIKWPWYIWLGFIAGLIAIVMVTIMLCCMTSCCSCLKGCCSCGSCCKFD
EDDSEPVLKGVKLHYT*
B.1.351Spike-FurinMt Amino Acid sequence (South African Spike Variant) (SEQ ID NO:112)
MFVFLVLLPLVSSQCVNFTTRTQLPPAYTNSFTRGVYYPDKVFRSSVLHSTQDLFLPFFSNVTWFHAIHV
SGTNGTKRFANPVLPFNDGVYFASTEKSNIIRGWIFGTTLDSKTQSLLIVNNATNVVIKVCEFQFCNDPFL
GVYYHKNNKSWMESEFRVYSSANNCTFEYVSQPFLMDLEGKQGNFKNLREFVFKNIDGYFKIYSKHTPI
NLVRGLPQGFSALEPLVDLPIGINITRFQTLHISYLTPGDSSSGWTAGAAAYYVGYLQPRTFLLKYNENG
TITDAVDCALDPLSETKCTLKSFTVEKGIYQTSNFRVQPTESIVRFPNITNLCPFGEVENATRFASVYAWN
RKRISNCVADYSVLYNSASFSTFKCYGVSPTKLNDLCFTNVYADSFVIRGDEVRQIAPGQTGNIADYNY
KLPDDFTGCVIAWNSNNLDSKVGGNYNYLYRLFRKSNLKPFERDISTEIYQAGSTPCNGVKGFNCYFPL
QSYGFQPTYGVGYQPYRVVVLSFELLHAPATVCGPKKSTNLVKNKCVNFNFNGLTGTGVLTESNKKFL
PFQQFGRDIADTTDAVRDPQTLEILDITPCSFGGVSVITPGTNTSNQVAVLYQGVNCTEVPVAIHADQLTP
TWRVYSTGSNVFQTRAGCLIGAEHVNNSYECDIPIGAGICASYQTQTNSPGSASSVASQSIIAYTMSLGV
ENSVAYSNNSIAIPTNFTISVTTEILPVSMTKTSVDCTMYICGDSTECSNLLLQYGSFCTQLNRALTGIAVE
QDKNTQEVFAQVKQIYKTPPIKDFGGFNFSQILPDPSKPSKRSFIEDLLFNKVTLADAGFIKQYGDCLGDI
AARDLICAQKFNGLTVLPPLLTDEMIAQYTSALLAGTITSGWTFGAGAALQIPFAMQMAYRENGIGVTQ
NVLYENQKLIANQFNSAIGKIQDSLSSTASALGKLQDVVNQNAQALNTLVKQLSSNFGAISSVLNDILSR
LDPPEAEVQIDRLITGRLQSLQTYVTQQLIRAAEIRASANLAATKMSECVLGQSKRVDFCGKGYHLMSF
PQSAPHGVVFLHVTYVPAQEKNFTTAPAICHDGKAHFPREGVFVSNGTHWFVTQRNFYEPQIITTDNTF
VSGNCDVVIGIVNNTVYDPLQPELDSFKEELDKYFKNHTSPDVDLGDISGINASVVNIQKEIDRLNEVAK
NLNESLIDLQELGKYEQYIKWPWYIWLGFIAGLIAIVMVTIMLCCMTSCCSCLKGCCSCGSCCKFDEDDS
EPVLKGVKLHYT

TABLE 8
TCE9 Cassette (Order of Frames as Shown)

| | Frame Start | Frame End | | SEQ |
|---|---|---|---|---|
| Gene | in Gene | in Gene | Frame sequence | ID NO: |
| nsp12 | 4719 | 4745 | GPLVRKIFVDGVPFVVSTGYHFRELGV | 27961 |
| nsp4 | 3096 | 3134 | PVYSFLPGVYSVIYLYLTFYLTNDVSFLAHIQWMVM | 27962 |
| | | | FTP | |
| M | 89 | 109 | GLMWLSYFIASFRLFARTRSM | 27951 |
| nsp12 | 4888 | 4905 | NNLDKSAGFPFNKWGKAR | 27963 |
| nsp3 | 2745 | 2761 | ATTRQVVNVVTTKIALK | 27957 |
| M | 61 | 79 | TLACFVLAAVYRINWITGG | 27964 |
| nsp3 | 1919 | 1935 | PYPNASFDNFKFVCDNI | 27953 |
| nsp3 | 2676 | 2692 | TYNKVENMTPRDLGACI | 27965 |
| ORF3a | 29 | 52 | VRATATIPIQASLPFGWLIVGVAL | 27949 |
| nsp12 | 4806 | 4826 | NFNKDFYDFAVSKGFFKEGSS | 27954 |
| N | 96 | 117 | GGDGKMKDLSPRWYFYYLGTGP | 27960 |
| nsp12 | 5213 | 5234 | KQGDDYVYLPYPDPSRILGAGC | 27966 |
| N | 356 | 378 | HIDAYKTFPPTEPKKDKKKKADE | 27944 |
| ORF3a | 133 | 149 | CRSKNPLLYDANYFLCW | 27945 |
| nsp6 | 3643 | 3668 | SLATVAYFNMVYMPASWVMRIMTWLD | 27967 |
| nsp12 | 4529 | 4545 | GNCDTLKEILVTYNCCD | 27968 |
| nsp3 | 1630 | 1660 | EAFEYYHTTDPSFLGRYMSALNHTKKWKYPQ | 27969 |
| nsp3 | 1360 | 1377 | ISNEKQEILGTVSWNLRE | 27947 |
| M | 160 | 203 | DIKDLPKEITVATSRTLSYYKLGASQRVAGDSGFAA | 27948 |
| | | | YSRYRIGN | |
| N | 301 | 337 | WPQIAQFAPSASAFFGMSRIGMEVTPSGTWLTYTGAI | 27970 |
| nsp12 | 4553 | 4571 | DWYDFVENPDILRVYANLG | 27952 |
| nsp4 | 2850 | 2909 | ACPLIAAVITREVGFVVPGLPGTILRTTNGDFLHFLPR | 27971 |
| | | | VFSAVGNICYTPSKLIEYTDFA | |

TABLE 9
TCE11 Cassette (Order of Frames as Shown)

| | Frame Start | Frame End | | SEQ |
|---|---|---|---|---|
| Gene | in Gene | in Gene | Frame sequence | ID NO: |
| nsp12 | 4896 | 4826 | NVAFQTVKPGNFNKDFYDFAVSKGFFKEGSS | 27972 |
| M | 182 | 203 | GASQRVAGDSGFAAYSRYRIGN | 27973 |
| nsp12 | 4728 | 4745 | DGVPFVVSTGYHFRELGV | 27955 |
| nsp4 | 3111 | 3134 | YLTFYLTNDVSFLAHIQWMVMFTP | 27950 |
| M | 89 | 109 | GLMWLSYFIASFRLFARTRSM | 27951 |
| nsp3 | 1632 | 1660 | FEYYHTTDPSFLGRYMSALNHTKKWKYPQ | 27946 |
| nsp3 | 1360 | 1377 | ISNEKQEILGTVSWNLRE | 27947 |
| nsp3 | 2745 | 2761 | ATTRQVVNVVTTKIALK | 27957 |
| M | 61 | 77 | TLACFVLAAVYRINWIT | 27959 |

TCE5 Amino Acid Sequence (SEQ ID NO: 92):
MAGEAPFLYLYALVYFLQSINFVRIIMRLWLCWKCRSKNPLLYDANYFLCWHTNLAVFQSASKI
ITLKKRWQLALSKGVHFVCNLLLVTLKQGEIKDATPSDFVRATATIPIQASLPFGWLIVGVALLA
VRRPQGLPNNTASWFTALTQHGKEDLKFPRGQGVPINTNSSPDDQIGYYRRATRRIMACLVGLM
WLSYFIASFRLKKDKKKKADETQALPQRQKKQQTVTLLPAADLDDFSKQLQGNFGDQELIRQG
TDYKHWPQIAQFAPSASAFFGMSRIGMEVTPSGTWLTYTGAIKITSGDGTTSPISEHDYQIGGYTE
KWESGVKKMSGKGQQQQGQTVTKKSAAEASKKPRQKRTATKAYNVTQAFGRRGPEQTLLWP
VTLACFVLAAVYRINWFKDQVILLNKHIDAYKTFPPTEPKKDKKKKTSPARMAGNGGDAALAL
LLLDRLNQLESKMSGKGQKMKDLSPRWYFYYLGTGPEDCVVLHSYFTSDYYQLYSTQLSTDTG
VEHVTFFIYNKIVDEPEEHVQIHTIDGSSGGIIWVATEGALNTPKDHIGTRNPANNAAIVLQLPQG
TTLPKGFYAEGPGPGAKFVAAWTLKAAAGPGPGQYIKANSKFIGITELGPGPG-
TCE11 Amino Acid Sequence: Concatenated EDGE predicted SARS-COV-2 MHC
Class I Epitope Cassette “TCE11” with N-term leader (bold) and C-term Universal MHC
Class II with GPGPG linkers (SEQ ID NO: 56) (bold italic):
MAGNVAFQTVKPGNFNKDFYDFAVSKGFFKEGSSGASQRVAGDSGFAAYSRYRIGNDGVPFVV
STGYHFRELGVYLTFYLTNDVSFLAHIQWMVMFTPGLMWLSYFIASFRLFARTRSMFEYYHTTD
PSFLGRYMSALNHTKKWKYPQISNEKQEILGTVSWNLREATTRQVVNVVTTKIALKTLACFVLA
AVYRINWITGPGPGAKFVAAWTLKAAAGPGPGQYIKANSKFIGITELGPGPG-

[0512] SAM-SGP1-TCE5-SGP2-CTSpike_{G}F2P Nucleotide Sequence (SEQ ID NO:93): (NT 1-17: T7 promoter; NT 62-7543: VEEV non-structural protein coding region; NT 7518-7560: SGP1; NT 7582-7587 and 9541-9546: Kozak sequence; NT 7588-9474: TCE5 cassette; NT 9480-9540: SGP2; NT 9547-13368: CTSpike Furin-2P)

[0513] CMV-CTSpikeGF2P-CMV-TCE5 Cassette Nucleotide Sequence (SEQ ID NO:114)

### Results

[0514] Various SAM vector organizations all featuring dual cassettes expressed by SGP1 and SGP2 were evaluated.

[0515] Examined were multicistronic SAM vectors that address potential technical limitations present in the field, including, but not limited to: (1) improving expression of multiple payloads that include large cassettes (e.g., greater than the size of a native cassette expressed from a native alphavirus subgenomic promoter, such as cassettes approximately 4 kb or greater in length); (2) improved control of expression of multiple payloads, e.g., controlling the relative expression of different payloads; and (3) improved vector stability, such as by reducing vector recombination events (e.g., intra-vector promoter recombination between alphavirus subgenomic promoters).

[0516] Expression of the cassettes was effectively driven by both promoters, as assessed by monitoring T cell responses to the encoded epitopes. Notably, the second cassette under the control of the SGP2 promoter results in better expression in a vaccine setting, as assessed by monitoring T cell responses, generally greater than two fold.

[0517] SAM vaccine platforms encoding various orders of a modified SARS-CoV-2 Spike protein and a T cell epitope (TCE) cassette encoding EDGE predicted epitopes (EPE) were assessed.

[0518] T cell responses to Spike (top panel), T cell responses to the encoded T cell epitopes (middle panel), and Spike-specific IgG antibodies (bottom panel) were produced when vaccinated with various constructs. In FIG. 5 and FIG. 6 (and quantified in Tables 4A-C), SAM constructs included “IDTSpike_{g}” (SEQ ID NO:69) alone (left columns), IDTSpike_{g} expressed from a first subgenomic promoter followed by TCE5 expressed from a second subgenomic promoter (middle columns), or TCE5 expressed from a first subgenomic promoter followed by IDTSpike_{g} expressed from a second subgenomic promoter (right columns), with immune responses assessed, as described above. In FIG. 7 and FIG. 8 (and quantified in Tables 5A-C), SAM constructs included “IDTSpike_{g}” (SEQ ID NO:69) alone (first column), IDTSpike_{g} expressed from a first subgenomic promoter followed by TCE6 or TCE7 expressed from a second subgenomic promoter (columns 2 and 4, respectively), or TCE6 or TCE7 expressed from a first subgenomic promoter followed by IDTSpike_{g} expressed from a second subgenomic promoter (columns 3 and 5, respectively), with immune responses assessed, as described above In FIG. 9 and FIG. 10 (and quantified in Tables 6A-C), SAM constructs included “CTSpike_{g}” (SEQ ID NO:79) alone (first column), CTSpike_{g} expressed from a first subgenomic promoter followed by TCE5 or TCE8 expressed from a second subgenomic promoter (columns 2 and 4, respectively), or TCE5 or TCE8 expressed from a first subgenomic promoter followed by CTSpike_{g} expressed from a second subgenomic promoter (columns 3 and 5, respectively), with immune responses assessed, as described above. In FIG. 11 and FIG. 12 (and quantified in Tables 7A-D), SAM constructs included a Spike protein (501Y.V2) from the B.1.351 (“South African” beta-lineage) SARS-CoV-2 isolate (SEQ ID NO:112; “SA Spike”) alone (first column), TCE5 (see Table 8) expressed from a first subgenomic promoter followed by SA-Spike expressed from a second subgenomic promoter (column 2), a cassette encoding both a SARS-CoV-2 Nucleocapsid protein (SEQ ID NO:62; “Nuc”; original Wuhan isolate) and TCE11 (see Table 9) expressed from a first subgenomic promoter (Nucleocapsid-T2A linker-TCE11, and including GPGPG linkers (SEQ ID NO: 56) and both PADRE and Tetanus Toxoid universal MHC class II epitopes) followed by SA-Spike expressed from a second subgenomic promoter (column 3), or naïve mice (column 4) with immune responses assessed, as described above.

[0519] Generally, and in particular for Spike proteins, T cell responses were increased when the respective epitopes were expressed from the second subgenomic promoter (SGP2), including increased Spike-directed T cell responses relative to Spike alone. A similar trend was also observed generally with increased Spike-specific IgG titers when the Spike antigen was expressed from the second subgenomic promoter except, for potentially the CTSpike g constructs.

[0520] Accordingly, the results demonstrate the use of multiple distinct SGP promoters results in effective expression of multiple cassettes within an alphavirus-derived SAM vector, particularly in a vaccine setting. Additionally, the data demonstrate sequence order of antigen cassettes in the SAM vaccine platform influenced immune responses.

TABLE 4A
Spike T cell response (SFU/1e6 splenocytes)

| | Spike | Spike-TCE5 | TCE5-Spike |
|---|---|---|---|
| | 3466 | 6604 | 10395 |
| | 3884 | 2522 | 10420 |
| | 6269 | 5372 | 9292 |
| | 5678 | 4934 | 6488 |
| | 2666 | 3257 | 9156 |
| | 4164 | 3814 | 2815 |
| Median | 4024 | 4374 | 9224 |

TABLE 4B
TCE T cell response (SFU/1e6 splenocytes)

| | Spike | Spike-TCE5 | TCE5-Spike |
|---|---|---|---|
| | 18 | 215 | 324 |
| | 5 | 708 | 104 |
| | 304 | 383 | 128 |
| | 20 | 419 | 205 |
| | 61 | 148 | 214 |
| | 7 | 206 | 411 |
| Median | 19 | 299 | 209 |

TABLE 4C
S1 IgG endpoint titer

| | Spike | Spike-TCE5 | TCE5-Spike |
|---|---|---|---|
| | 8904 | 27680 | 75450 |
| | 29451 | 28074 | 27263 |
| | 27217 | 9645 | 28979 |
| | 26670 | 9149 | 24879 |
| Geomean | 20887 | 16182 | 34897 |
| Geometric | 1.768 | 1.875 | 1.678 |
| SD factor | | | |

TABLE 5A
Spike T cell response (SFU/1e6 splenocytes)

| | | TCE6 | Spike | Spike | TCE7 |
|---|---|---|---|---|---|
| | Spike | Spike | TCE6 | TCE7 | Spike |
| | 5697 | 2558 | 4219 | 1977 | 6040 |
| | 2842 | 1781 | 4928 | 3144 | 4677 |
| | 2476 | 2183 | 10362 | 3685 | 14404 |
| | 1704 | 2748 | 3706 | 5231 | 14220 |
| | 5478 | 3126 | 5996 | 2941 | 12466 |
| | 3500 | 2212 | 10228 | 2790 | 11233 |
| Median | 3171 | 2385 | 5462 | 3042 | 11850 |

TABLE 5B
TCE T cell response (SFU/1e6 splenocytes)

| | | TCE6 | Spike | Spike | TCE7 |
|---|---|---|---|---|---|
| | Spike | Spike | TCE6 | TCE7 | Spike |
| | 28 | 78 | 204 | 614 | 167 |
| | 13 | 0 | 20 | 411 | 74 |
| | 10 | 29 | 8 | 948 | 341 |
| | 221 | 339 | 119 | 565 | 235 |
| | 8 | 419 | 122 | 121 | 281 |
| | 218 | 46 | 0 | 994 | 731 |
| Median | 20 | 62 | 70 | 590 | 258 |

TABLE 5C
S1 IgG endpoint titer

| | | Spike | TCE6 | Spike | TCE7 |
|---|---|---|---|---|---|
| | Spike | TCE6 | Spike | TCE7 | Spike |
| | 10144 | 24609 | 74421 | 26791 | 85199 |
| | 28845 | 9464 | 91647 | 28185 | 29016 |
| | 86496 | 79136 | 84008 | 25318 | 28165 |
| | 29796 | 28607 | 83058 | 29150 | 77604 |
| Geomean | 29468 | 26947 | 83057 | 27322 | 48213 |
| Geometric | 2.399 | 2.385 | 1.089 | 1.063 | 1.831 |
| SD factor | | | | | |

TABLE 6A
Spike T cell response (SFU/1e6 splenocytes)

| | | TCE5 | Spike | Spike | TCE8 |
|---|---|---|---|---|---|
| | Spike | Spike | TCE5 | TCE8 | Spike |
| | 13043 | 5977 | 11014 | 5177 | 5880 |
| | 5533 | 9466 | 11203 | 6359 | 12949 |
| | 4305 | 4897 | 21464 | 2611 | 7382 |
| | 7015 | 6451 | 13209 | 3184 | 7357 |
| | 4665 | 6026 | 13058 | 6709 | 4947 |
| | 6260 | 6936 | * | 4614 | 7772 |
| Median | 5896 | 6238 | 13058 | 4895 | 7369 |

* Sample not analyzed due to poor quality of isolated splenocytes

TABLE 6B
TCE T cell response (SFU/1e6 splenocytes)

| | | TCE5 | Spike | Spike | TCE8 |
|---|---|---|---|---|---|
| | Spike | Spike | TCE5 | TCE8 | Spike |
| | 20 | 765 | 35 | 420 | 205 |
| | 15 | 458 | 457 | 433 | 284 |
| | 20 | 357 | 524 | 391 | 199 |
| | 97 | 1041 | 707 | 646 | 301 |
| | 3 | 489 | 235 | 299 | 89 |
| | 36 | 591 | * | 533 | 246 |
| Median | 20 | 540 | 457 | 427 | 226 |

* Sample not analyzed due to poor quality of isolated splenocytes

TABLE 6C
S1 IgG endpoint titer

| | | Spike | TCE5 | Spike | TCE8 |
|---|---|---|---|---|---|
| | Spike | TCE5 | Spike | TCE8 | Spike |
| | 917961 | 256697 | 227456 | 246815 | 268408 |
| | 241746 | 277841 | 85046 | 88935 | 247788 |
| | 236694 | 253652 | 85780 | 228072 | 704747 |
| | 698916 | 232433 | 90132 | 248220 | 259580 |
| Geomean | 437723 | 254647 | 110587 | 187754 | 332120 |
| Geometric | 2.027 | 1.076 | 1.618 | 1.648 | 1.653 |
| SD factor | | | | | |

TABLE 7A
Spike T cell response (SFU/1e6 splenocytes)

| SA | TCE9-SA | N-TCE11-SA | Naive |
|---|---|---|---|
| 15900 | 8323 | 12215 | 20 |
| 6686 | 4344 | 7611 | 15 |
| 6748 | 6724 | 17488 | 20 |
| 6435 | 11265 | 10469 | 10 |
| 5547 | 3840 | 5961 | 80 |
| 7615 | 11284 | 12460 | 45 |

TABLE 7B
TCE T cell response (SFU/1e6 splenocytes) - Mean +/− SEM

| Protein | SA | TCE9-SA | N-TCE11-SA | Naive |
|---|---|---|---|---|
| Mem | 3.38 +/− 1.25 | 1.25 +/− 1.25 | 3.75 +/− 2.39 | 1.66 +/− 0.83 |
| ORF3A | 33.06 +/− 18.49 | 89.82 +/− 70.08 | 233.79 +/− 225.79 | 3.78 +/− 0.86 |
| NSP3 | 52.96 +/− 4.77 | 224.87 +/− 21.91 | 40.51 +/− 5.38 | 48.3 +/− 3.67 |
| NSP4 | 19.16 +/− 4.17 | 12.01 +/− 3.32 | 13.33 +/− 2.47 | 9.17 +/− 2.86 |
| NSP6 | 12.08 +/− 4.15 | 5.51 +/− 2.66 | 2.91 +/− 1.87 | 5.48 +/− 2.94 |
| NSP12 | 48.03 +/− 8.23 | 49.35 +/− 8.30 | 70.01 +/− 27.57 | 44.81 +/− 10.86 |

TABLE 7C
Nucleocapsid T cell response (SFU/1e6 splenocytes)

| SA | TCE9-SA | N-TCE11-SA | Naive |
|---|---|---|---|
| 2.5 | 10 | 713 | 0 |
| 15 | 0 | 400 | 0 |
| 17.5 | 0 | 238 | 7.90 |
| 7.5 | 0 | 388 | 12.5 |
| 5 | 0 | 367 | 15 |
| 0 | 19.9 | 533 | 0 |

TABLE 7D
S1 IgG endpoint titer

| | SA | TCE9-SA | N-TCE11-SA |
|---|---|---|---|
| | 7106065 | 2451309 | 2326720 |
| | 7223710 | 2663906 | 7150126 |
| | 7599055 | 2489358 | 2677973 |
| | 2857405 | 2412035 | 7082536 |
| Geomean | 5778036 | 2502344 | 4214666 |
| Geometric | 1.6 | 1.045 | 1.836 |
| SD factor | | | |

[0521] Certain additional sequences for vectors, cassettes, and antibodies referred to herein are described below and referred to by SEQ ID NO.

Tremelimumab VL (SEQ ID NO: 16)
Tremelimumab VH (SEQ ID NO: 17)
Tremelimumab VH CDR1 (SEQ ID NO: 18)
Tremelimumab VH CDR2 (SEQ ID NO: 19)
Tremelimumab VH CDR3 (SEQ ID NO: 20)
Tremelimumab VL CDR1 (SEQ ID NO: 21)
Tremelimumab VL CDR2 (SEQ ID NO: 22)
Tremelimumab VL CDR3 (SEQ ID NO: 23)
Durvalumab (MEDI4736) VL (SEQ ID NO: 24)
MEDI4736 VH (SEQ ID NO: 25)
MEDI4736 VH CDR1 (SEQ ID NO: 26)
MEDI4736 VH CDR2 (SEQ ID NO: 27)
MEDI4736 VH CDR3 (SEQ ID NO: 28)
MEDI4736 VL CDR1 (SEQ ID NO: 29)
MEDI4736 VL CDR2 (SEQ ID NO: 30)
MEDI4736 VL CDR3 (SEQ ID NO: 31)
UbA76-25merPDTT nucleotide (SEQ ID NO: 32)
UbA76-25merPDTT polypeptide (SEQ ID NO: 33)
MAG-25merPDTT nucleotide (SEQ ID NO: 34)
MAG-25merPDTT polypeptide (SEQ ID NO: 35)
Ub7625merPDTT_NoSFL nucleotide (SEQ ID NO: 36)
Ub7625merPDTT_NoSFL polypeptide (SEQ ID NO: 37)
ChAdV68.5WTnt.MAG25mer (SEQ ID NO: 2); AC_000011.1 with E1 (nt 577 to 3403) and E3 (nt 27,125-
31,825) sequences deleted; corresponding ATCC VR-594 nucleotides substituted at five positions; model
neoantigen cassette under the control of the CMV promoter/enhancer inserted in place of deleted E1; SV40
polyA 3′ of cassette
Venezuelan equine encephalitis virus [VEE] (SEQ ID NO: 3) GenBank: L01442.2
VEE-MAG25mer (SEQ ID NO: 4); contains MAG-25merPDTT nucleotide (bases 30-1755)
Venezuelan equine encephalitis virus strain TC-83 [TC-83](SEQ ID NO: 5) GenBank: L01443.1
VEE Delivery Vector (SEQ ID NO: 6); VEE genome with nucleotides 7544-11176 deleted [alphavirus structural
proteins removed]
TC-83 Delivery Vector(SEQ ID NO: 7); TC-83 genome with nucleotides 7544-11176 deleted [alphavirus
structural proteins removed]
VEE Production Vector (SEQ ID NO: 8); VEE genome with nucleotides 7544-11176 deleted, plus 5′ T7-
promoter, plus 3′ restriction sites
TC-83 Production Vector(SEQ ID NO: 9); TC-83 genome with nucleotides 7544-11176 deleted, plus 5′ T7-
promoter, plus 3′ restriction sites
VEE-UbAAY (SEQ ID NO: 14); VEE delivery vector with MHC class I mouse tumor epitopes SIINFEKL (SEQ
ID NO: 129) and AH1-A5 inserted
VEE-Luciferase (SEQ ID NO: 15); VEE delivery vector with luciferase gene inserted at 7545
ubiquitin (SEQ ID NO: 38) > UbG76 0-228
Ubiquitin A76 (SEQ ID NO: 39) > UbA76 0-228
HLA-A2 (MHC class I) signal peptide (SEQ ID NO: 40) > MHC SignalPep 0-78
HLA-A2 (MHC class I) Trans Membrane domain (SEQ ID NO: 41) > HLA A2 TM Domain 0-201
IgK Leader Seq (SEQ ID NO: 42) > IgK Leader Seq 0-60
Human DC-Lamp (SEQ ID NO: 43) > HumanDCLAMP 0-3178
Mouse LAMP1 (SEQ ID NO: 44) > MouseLamp1 0-1858
Human Lamp1 cDNA (SEQ ID NO: 45) > Human Lamp1 0-2339
Tetanus toxoid nulceic acid sequence (SEQ ID NO: 46)
Tetanus toxoid amino acid sequence (SEQ ID NO: 47)
PADRE nulceotide sequence (SEQ ID NO: 48)
PADRE amino acid sequence (SEQ ID NO: 49)
WPRE (SEQ ID NO: 50) > WPRE 0-593
IRES (SEQ ID NO: 51) > eGFP_IRES_SEAP_Insert 1746-2335
GFP (SEQ ID NO: 52)
SEAP (SEQ ID NO: 53)
Firefly Luciferase (SEQ ID NO: 54)
FMDV 2A (SEQ ID NO: 55)
GPGPG linker (SEQ ID NO: 56)
chAd68-Empty-E4deleted (SEQ ID NO: 75): AC_000011.1 with E1 (nt 577 to 3403), E3 (nt 27,125- 31,825), and
E4 region (nt 34,916 to 35,642) sequences deleted and the corresponding ATCC VR-594 (Independently
sequenced Full-Length VR-594 C68 SEQ ID NO: 10) nucleotides substituted at five positions
NC_045512.2 Severe acute respiratory syndrome coronavirus 2 isolate Wuhan-Hu-1, complete genome (SEQ ID
NO: 76)

[0522] Table A

[symbol]

[0523] Refer to Sequence Listing, SEQ ID NOS. 130-8195. Presented is each candidate MHC Class I epitope encoded by SARS-CoV-2 that was predicted to associate with a given HLA allele with an EDGE score >0.001. Each entry includes the candidate epitope sequence and cognate HLA alleles with a predicted EDGE score greater than 0.001, with each cognate pairing ranked as H (EDGE score >0.1), M (EDGE score between 0.01 and 0.1), and L (EDGE score <0.01). For example, the candidate epitope MESLVPGF (SEQ ID NO: 127) is predicted to pair with HLA-B*18:01, HLA-B*37:01, and HLA-B*07:05 with EDGE scores 0.019, 0.032, and 0.008, respectively. Accordingly, the entry for SEQ ID NO: 130 is “MESLVPGF: B18:01M; B37:01M; B07:05L.”

[0524] Table B

[symbol]

[0525] Refer to Sequence Listing, SEQ ID NOS. 8196-26740. Presented is each candidate MHC Class II epitope encoded by SARS-CoV-2 that was predicted to associate with a given HLA allele with an EDGE score >0.001. Each entry includes the candidate epitope sequence and cognate HLA alleles with a predicted EDGE score greater than 0.001, with each cognate pairing ranked as H (EDGE score >0.1), M (EDGE score between 0.01 and 0.1), and L (EDGE score <0.01). For example, the candidate epitope VELVAELEGI (SEQ ID NO: 128) is predicted to pair with HLA-DQA1*03:02-B1*03:03, HLA-DRB1*11:02, HLA-DQA1*05:05-B1*03:19, and HLA-DPA1*01:03-B1*104:01 with EDGE scores 0.003145, 0.00328, 0.041097, and 0.011613, respectively. Accordingly, the entry for SEQ ID NO: 8219 is “VELVAELEGI: DQA1*03:02-B1*03:03L; DRB1*11:02L; DQA1*05:05-B1*03:19M; DPA1*01:03-B1*104:01M.” Only HLA-DQ and HLA-DP are referred to by their alpha and beta chains. HLA-DR is referred to only by its beta chain as the alpha chain is generally invariable in the human population, with HLA-DR peptide contact regions particularly invariant.

[0526] Table C

[symbol]

[0527] Refer to Sequence Listing, SEQ ID NOS. 26741-27179. Presented are additional MHC Class I epitopes, other than those from the Spike protein, encoded within the optimized cassette that were predicted to associate with a given HLA allele with an EDGE score >0.001. The additional epitopes were determined by calculating population coverage criteria P with all initial epitopes provided by the SARS-CoV-2 Spike protein (SEQ ID NO:59) split into 51 and S2 and applying the optimization algorithms described herein.

[0528] Table D

[symbol]

[0529] Refer to Sequence Listing, SEQ ID NOS. 27180-27495, for SARS-CoV-2 Spike overlapping peptide pools. Each entry includes the stimulatory peptide, SARS-CoV-2 protein source, peptide subpool information, and Table. For example, the stimulatory peptide MFVFLVLLPLVSSQC (SEQ ID NO: 27180) is derived from SARS-CoV-2 Spike protein (Wuhan D614G variant), included in subpool S_Wu_1_2, and found in Table D. Accordingly, the entry for SEQ ID NO. 27180 is “MFVFLVLLPLVSSQC: Spike Wuhan D614G; S_Wu_1_2; Table D”.

[0530] Table E

[symbol]

[0531] Refer to Sequence Listing, SEQ ID NOS. 27496-27603, for TCE5-encoded overlapping peptide pools. Each entry includes the stimulatory peptide, SARS-CoV-2 protein source, peptide subpool information, and Table. For example, the stimulatory peptide LLWPVTLACFVLAAV (SEQ ID NO: 27496) is derived from SARS-CoV-2 Membrane protein, included in subpool OLP_Mem, and found in Table E. Accordingly, the entry for SEQ ID NO. 27496 is “LLWPVTLACFVLAAV: Membrane; OLP_Mem; Table E”.

[0532] Table F

[symbol]

[0533] Refer to Sequence Listing, SEQ ID NOS. 27604-27939, for TCE5-encoded minimal epitope peptide pools. Each entry includes the stimulatory peptide, SARS-CoV-2 protein source, peptide subpool information, and Table. For example, the stimulatory peptide ALSKGVHFV (SEQ ID NO: 27604) is derived from SARS-CoV-2 ORF3a protein (frame 52-85), included in subpool Min_validated, and found in Table F. Accordingly, the entry for SEQ ID NO. 27604 is “ALSKGVHFV: ORF3a 52-85; Min_validated; Table F”.

### REFERENCES

[0534] 1. Desrichard, A., Snyder, A. & Chan, T. A. Cancer Neoantigens and Applications for Immunotherapy. Clin. Cancer Res. Off. J. Am. Assoc. Cancer Res. (2015). doi:10.1158/1078-0432.CCR-14-3175
[0535] 2. Schumacher, T. N. & Schreiber, R. D. Neoantigens in cancer immunotherapy. Science 348, 69-74 (2015).
[0536] 3. Gubin, M. M., Artyomov, M. N., Mardis, E. R. & Schreiber, R. D. Tumor neoantigens: building a framework for personalized cancer immunotherapy. J. Clin. Invest. 125, 3413-3421 (2015).
[0537] 4. Rizvi, N. A. et al. Cancer immunology. Mutational landscape determines sensitivity to PD-1 blockade in non-small cell lung cancer. Science 348, 124-128 (2015).
[0538] 5. Snyder, A. et al. Genetic basis for clinical response to CTLA-4 blockade in melanoma. N. Engl. J. Med. 371, 2189-2199 (2014).
[0539] 6. Carreno, B. M. et al. Cancer immunotherapy. A dendritic cell vaccine increases the breadth and diversity of melanoma neoantigen-specific T cells. Science 348, 803-808 (2015).
[0540] 7. Tran, E. et al. Cancer immunotherapy based on mutation-specific CD4+ T cells in a patient with epithelial cancer. Science 344, 641-645 (2014).
[0541] 8. Hacohen, N. & Wu, C. J.-Y. United States Patent Application: 20110293637-COMPOSITIONS AND METHODS OF IDENTIFYING TUMOR SPECIFIC NEOANTIGENS. (A1). at <http://appftl.uspto.gov/netacgi/nph-Pars er?Sect1=PTO1 &S ect2=HITOFF&d=PG0l&p=l&u=inetahtml/PTO/srchnum.html&r=l&f=G&1=50&s1=20110293637.PGNR.
[0542] 9. Lundegaard, C., Hoof, I., Lund, O. & Nielsen, M. State of the art and challenges in sequence based T-cell epitope prediction. Immunome Res. 6 Suppl 2, S3 (2010).
[0543] 10. Yadav, M. et al. Predicting immunogenic tumour mutations by combining mass spectrometry and exome sequencing. Nature 515, 572-576 (2014).
[0544] 11. Bassani-Sternberg, M., Pletscher-Frankild, S., Jensen, L. J. & Mann, M. Mass spectrometry of human leukocyte antigen class I peptidomes reveals strong effects of protein abundance and turnover on antigen presentation. Mol. Cell. Proteomics MCP 14, 658-673 (2015).
[0545] 12. Van Allen, E. M. et al. Genomic correlates of response to CTLA-4 blockade in metastatic melanoma. Science 350, 207-211 (2015).
[0546] 13. Yoshida, K. & Ogawa, S. Splicing factor mutations and cancer. Wiley Interdiscip. Rev. RNA 5, 445-459 (2014).
[0547] 14. Cancer Genome Atlas Research Network. Comprehensive molecular profiling of lung adenocarcinoma. Nature 511, 543-550 (2014).
[0548] 15. Rajasagi, M. et al. Systematic identification of personal tumor-specific neoantigens in chronic lymphocytic leukemia. Blood 124, 453-462 (2014).
[0549] 16. Downing, S. R. et al. U.S. patent application Ser. No. 01/202,08706-OPTIMIZATION OF MULTIGENE ANALYSIS OF TUMOR SAMPLES. (A1). at <http://appftl.uspto.gov/netacgi/nph-Parser?Sect1=PTO1&Sect2=HITOFF&d=PG0l&p=l&u=inetahtml/PTO/srchnum.html&r=l&f=G&1=50&s1=20120208706.PGNR.
[0550] 17. Target Capture for NextGen Sequencing—IDT. at <http://www.idtdna.com/pages/products/nextgen/target-capture>
[0551] 18. Shukla, S. A. et al. Comprehensive analysis of cancer-associated somatic mutations in class I HLA genes. Nat. Biotechnol. 33, 1152-1158 (2015).
[0552] 19. Cieslik, M. et al. The use of exome capture RNA-seq for highly degraded RNA with application to clinical cancer sequencing. Genome Res. 25, 1372-1381 (2015).
[0553] 20. Bodini, M. et al. The hidden genomic landscape of acute myeloid leukemia: subclonal structure revealed by undetected mutations. Blood 125, 600-605 (2015).
[0554] 21. Saunders, C. T. et al. Strelka: accurate somatic small-variant calling from sequenced tumor-normal sample pairs. Bioinforma. Oxf. Engl. 28, 1811-1817 (2012).
[0555] 22. Cibulskis, K. et al. Sensitive detection of somatic point mutations in impure and heterogeneous cancer samples. Nat. Biotechnol. 31, 213-219 (2013).
[0556] 23. Wilkerson, M. D. et al. Integrated RNA and DNA sequencing improves mutation detection in low purity tumors. Nucleic Acids Res. 42, e107 (2014).
[0557] 24. Mose, L. E., Wilkerson, M. D., Hayes, D. N., Perou, C. M. & Parker, J. S. ABRA: improved coding indel detection via assembly-based realignment. Bioinforma. Oxf. Engl. 30, 2813-2815 (2014).
[0558] 25. Ye, K., Schulz, M. H., Long, Q., Apweiler, R. & Ning, Z. Pindel: a pattern growth approach to detect break points of large deletions and medium sized insertions from paired-end short reads. Bioinforma. Oxf. Engl. 25, 2865-2871 (2009).
[0559] 26. Lam, H. Y. K. et al. Nucleotide-resolution analysis of structural variants using BreakSeq and a breakpoint library. Nat. Biotechnol. 28, 47-55 (2010).
[0560] 27. Frampton, G. M. et al. Development and validation of a clinical cancer genomic profiling test based on massively parallel DNA sequencing. Nat. Biotechnol. 31, 1023-1031 (2013).
[0561] 28. Boegel, S. et al. HLA typing from RNA-Seq sequence reads. Genome Med. 4, 102 (2012).
[0562] 29. Liu, C. et al. ATHLATES: accurate typing of human leukocyte antigen through exome sequencing. Nucleic Acids Res. 41, e142 (2013).
[0563] 30. Mayor, N. P. et al. HLA Typing for the Next Generation. PloS One 10, e0127153 (2015).
[0564] 31. Roy, C. K., Olson, S., Graveley, B. R., Zamore, P. D. & Moore, M. J. Assessing long-distance RNA sequence connectivity via RNA-templated DNA-DNA ligation. eLife 4, (2015).
[0565] 32. Song, L. & Florea, L. CLASS: constrained transcript assembly of RNA-seq reads. BMC Bioinformatics 14 Suppl 5, S14 (2013).
[0566] 33. Maretty, L., Sibbesen, J. A. & Krogh, A. Bayesian transcriptome assembly. Genome Biol. 15, 501 (2014).
[0567] 34. Pertea, M. et al. StringTie enables improved reconstruction of a transcriptome from RNA-seq reads. Nat. Biotechnol. 33, 290-295 (2015).
[0568] 35. Roberts, A., Pimentel, H., Trapnell, C. & Pachter, L. Identification of novel transcripts in annotated genomes using RNA-Seq. Bioinforma. Oxf. Engl. (2011). doi:10.1093/bioinformatics/btr355
[0569] 36. Vitting-Seerup, K., Porse, B. T., Sandelin, A. & Waage, J. spliceR: an R package for classification of alternative splicing and prediction of coding potential from RNA-seq data. BMC Bioinformatics 15, 81 (2014).
[0570] 37. Rivas, M. A. et al. Human genomics. Effect of predicted protein-truncating genetic variants on the human transcriptome. Science 348, 666-669 (2015).
[0571] 38. Skelly, D. A., Johansson, M., Madeoy, J., Wakefield, J. & Akey, J. M. A powerful and flexible statistical framework for testing hypotheses of allele-specific gene expression from RNA-seq data. Genome Res. 21, 1728-1737 (2011).
[0572] 39. Anders, S., Pyl, P. T. & Huber, W. HTSeq—a Python framework to work with high-throughput sequencing data. Bioinforma. Oxf. Engl. 31, 166-169 (2015).
[0573] 40. Furney, S. J. et al. SF3B1 mutations are associated with alternative splicing in uveal melanoma. Cancer Discov. (2013). doi:10.1158/2159-8290.CD-13-0330
[0574] 41. Zhou, Q. et al. A chemical genetics approach for the functional assessment of novel cancer genes. Cancer Res. (2015). doi:10.1158/0008-5472.CAN-14-2930
[0575] 42. Maguire, S. L. et al. SF3B1 mutations constitute a novel therapeutic target in breast cancer. J. Pathol. 235, 571-580 (2015).
[0576] 43. Carithers, L. J. et al. A Novel Approach to High-Quality Postmortem Tissue Procurement: The GTEx Project. Biopreservation Biobanking 13, 311-319 (2015).
[0577] 44. Xu, G. et al. RNA CoMPASS: a dual approach for pathogen and host transcriptome analysis of RNA-seq datasets. PloS One 9, e89445 (2014).
[0578] 45. Andreatta, M. & Nielsen, M. Gapped sequence alignment using artificial neural networks: application to the MHC class I system. Bioinforma. Oxf. Engl. (2015). doi:10.1093/bioinformatics/btv639
[0579] 46. Jørgensen, K. W., Rasmussen, M., Buus, S. & Nielsen, M. NetMHCstab—predicting stability of peptide-MHC-I complexes; impacts for cytotoxic T lymphocyte epitope discovery. Immunology 141, 18-26 (2014).
[0580] 47. Larsen, M. V. et al. An integrative approach to CTL epitope prediction: a combined algorithm integrating MHC class I binding, TAP transport efficiency, and proteasomal cleavage predictions. Eur. J. Immunol. 35, 2295-2303 (2005).
[0581] 48. Nielsen, M., Lundegaard, C., Lund, O. & Kemir, C. The role of the proteasome in generating cytotoxic T-cell epitopes: insights obtained from improved predictions of proteasomal cleavage. Immunogenetics 57, 33-41 (2005).
[0582] 49. Boisvert, F.-M. et al. A Quantitative Spatial Proteomics Analysis of Proteome Turnover in Human Cells. Mol. Cell. Proteomics 11, M111.011429-M111.011429 (2012).
[0583] 50. Duan, F. et al. Genomic and bioinformatic profiling of mutational neoepitopes reveals new rules to predict anticancer immunogenicity. J. Exp. Med. 211, 2231-2248 (2014).
[0584] 51. Janeway's Immunobiology: 9780815345312: Medicine & Health Science Books @ Amazon.com. at <http://www.amazon.comaaneways-Immunobiology-Kenneth-Murphy/dp/0815345313>
[0585] 52. Calis, J. J. A. et al. Properties of MHC Class I Presented Peptides That Enhance Immunogenicity. PLoS Comput. Biol. 9, e1003266 (2013).
[0586] 53. Zhang, J. et al. Intratumor heterogeneity in localized lung adenocarcinomas delineated by multiregion sequencing. Science 346, 256-259 (2014)
[0587] 54. Walter, M. J. et al. Clonal architecture of secondary acute myeloid leukemia. N. Engl. J. Med. 366, 1090-1098 (2012).
[0588] 55. Hunt D F, Henderson R A, Shabanowitz J, Sakaguchi K, Michel H, Sevilir N, Cox A L, Appella E, Engelhard V H. Characterization of peptides bound to the class I MHC molecule HLA-A2.1 by mass spectrometry. Science 1992. 255: 1261-1263.
[0589] 56. Zarling A L, Polefrone J M, Evans A M, Mikesh L M, Shabanowitz J, Lewis S T, Engelhard V H, Hunt D F. Identification of class I MHC-associated phosphopeptides as targets for cancer immunotherapy. Proc Natl Acad Sci USA. 2006 Oct. 3; 103(40):14889-94.
[0590] 57. Bassani-Sternberg M, Pletscher-Frankild S, Jensen L J, Mann M. Mass spectrometry of human leukocyte antigen class I peptidomes reveals strong effects of protein abundance and turnover on antigen presentation. Mol Cell Proteomics. 2015 March; 14(3):658-73. doi: 10.1074/mcp.M114.042812.
[0591] 58. Abelin J G, Trantham P D, Penny S A, Patterson A M, Ward S T, Hildebrand W H, Cobbold M, Bai D L, Shabanowitz J, Hunt D F. Complementary IMAC enrichment methods for HLA-associated phosphopeptide identification by mass spectrometry. Nat Protoc. 2015 September; 10(9):1308-18. doi: 10.1038/nprot.2015.086. Epub 2015 Aug. 6
[0592] 59. Barnstable C J, Bodmer W F, Brown G, Galfre G, Milstein C, Williams A F, Ziegler A. Production of monoclonal antibodies to group A erythrocytes, HLA and other human cell surface antigens-new tools for genetic analysis. Cell. 1978 May; 14(1):9-20.
[0593] 60. Goldman J M, Hibbin J, Kearney L, Orchard K, Th'ng K H. HLA-DR monoclonal antibodies inhibit the proliferation of normal and chronic granulocytic leukaemia myeloid progenitor cells. Br J Haematol. 1982 November; 52(3):411-20.
[0594] 61. Eng J K, Jahan T A, Hoopmann M R. Comet: an open-source MS/MS sequence database search tool. Proteomics. 2013 January; 13(1):22-4. doi: 10.1002/pmic.201200439. Epub 2012 Dec. 4.
[0595] 62. Eng J K, Hoopmann M R, Jahan T A, Egertson J D, Noble W S, MacCoss MJ. A deeper look into Comet—implementation and features. J Am Soc Mass Spectrom. 2015 November; 26(11):1865-74. doi: 10.1007/s13361-015-1179-x. Epub 2015 Jun. 27.
[0596] 63. Lukas Käll, Jesse Canterbury, Jason Weston, William Stafford Noble and Michael J. MacCoss. Semi-supervised learning for peptide identification from shotgun proteomics datasets. Nature Methods 4:923-925, November 2007
[0597] 64. Lukas Käll, John D. Storey, Michael J. MacCoss and William Stafford Noble. Assigning confidence measures to peptides identified by tandem mass spectrometry. Journal of Proteome Research, 7(1):29-34, January 2008
[0598] 65. Lukas Käll, John D. Storey and William Stafford Noble. Nonparametric estimation of posterior error probabilities associated with peptides identified by tandem mass spectrometry. Bioinformatics, 24(16):i42-i48, August 2008
[0599] 66. Kinney R M, BJ Johnson, VL Brown, D W Trent. Nucleotide Sequence of the 26 S mRNA of the Virulent Trinidad Donkey Strain of Venezuelan Equine Encephalitis Virus and Deduced Sequence of the Encoded Structural Proteins. Virology 152 (2), 400-413. 1986 Jul. 30.
[0600] 67. Jill E Slansky, Frédérique M Rattis, Lisa F Boyd, Tarek Fahmy, Elizabeth M Jaffee, Jonathan P Schneck, David H Margulies, Drew M Pardoll. Enhanced Antigen-Specific Antitumor Immunity with Altered Peptide Ligands that Stabilize the MHC-Peptide-TCR Complex. Immunity, Volume 13, Issue 4, 1 Oct. 2000, Pages 529-538.
[0601] 68. A Y Huang, P H Gulden, A S Woods, M C Thomas, C D Tong, W Wang, V H Engelhard, G Pasternack, R Cotter, D Hunt, D M Pardoll, and E M Jaffee. The immunodominant major histocompatibility complex class I-restricted antigen of a murine colon tumor derives from an endogenous retroviral gene product. Proc Natl Acad Sci USA.; 93(18): 9730-9735, 1996 Sep. 3.
[0602] 69. JOHNSON, BARBARA J. B., RICHARD M. KINNEY, CRYSTLE L. KOST AND DENNIS W. TRENT. Molecular Determinants of Alphavirus Neurovirulence: Nucleotide and Deduced Protein Sequence Changes during Attenuation of Venezuelan Equine Encephalitis Virus. J Gen Virol 67:1951-1960, 1986.
[0603] 70. Aarnoudse, C. A., Krüse, M., Konopitzky, R., Brouwenstijn, N., and Schrier, P. I. (2002). TCR reconstitution in Jurkat reporter cells facilitates the identification of novel tumor antigens by cDNA expression cloning. Int J Cancer 99, 7-13.
[0604] 71. Alexander, J., Sidney, J., Southwood, S., Ruppert, J., Oseroff, C., Maewal, A., Snoke, K., Serra, H. M., Kubo, R. T., and Sette, A. (1994). Development of high potency universal DR-restricted helper epitopes by modification of high affinity DR-blocking peptides. Immunity 1, 751-761.
[0605] 72. Banu, N., Chia, A., Ho, Z. Z., Garcia, A. T., Paravasivam, K., Grotenbreg, G. M., Bertoletti, A., and Gehring, A. J. (2014). Building and optimizing a virus-specific T cell receptor library for targeted immunotherapy in viral infections. Scientific Reports 4, 4166.
[0606] 73. Cornet, S., Miconnet, I., Menez, J., Lemonnier, F., and Kosmatopoulos, K. (2006). Optimal organization of a polypeptide-based candidate cancer vaccine composed of cryptic tumor peptides with enhanced immunogenicity. Vaccine 24, 2102-2109.
[0607] 74. Depla, E., van der Aa, A., Livingston, B. D., Crimi, C., Allosery, K., de Brabandere, V., Krakover, J., Murthy, S., Huang, M., Power, S., et al. (2008). Rational design of a multiepitope vaccine encoding T-lymphocyte epitopes for treatment of chronic hepatitis B virus infections. Journal of Virology 82, 435-450.
[0608] 75. Ishioka, G. Y., Fikes, J., Hermanson, G., Livingston, B., Crimi, C., Qin, M., del Guercio, M. F., Oseroff, C., Dahlberg, C., Alexander, J., et al. (1999). Utilization of MHC class I transgenic mice for development of minigene DNA vaccines encoding multiple HLA-restricted CTL epitopes. J Immunol 162, 3915-3925.
[0609] 76. Janetzki, S., Price, L., Schroeder, H., Britten, C. M., Welters, M. J. P., and Hoos, A. (2015). Guidelines for the automated evaluation of Elispot assays. Nat Protoc 10, 1098-1115.
[0610] 77. Lyons, G. E., Moore, T., Brasic, N., Li, M., Roszkowski, J. J., and Nishimura, M. I. (2006). Influence of human CD8 on antigen recognition by T-cell receptor-transduced cells. Cancer Res 66, 11455-11461.
[0611] 78. Nagai, K., Ochi, T., Fujiwara, H., An, J., Shirakata, T., Mineno, J., Kuzushima, K., Shiku, H., Melenhorst, J. J., Gostick, E., et al. (2012). Aurora kinase A-specific T-cell receptor gene transfer redirects T lymphocytes to display effective antileukemia reactivity. Blood 119, 368-376.
[0612] 79. Panina-Bordignon, P., Tan, A., Termijtelen, A., Demotz, S., Corradin, G., and Lanzavecchia, A. (1989). Universally immunogenic T cell epitopes: promiscuous binding to human MHC class II and promiscuous recognition by T cells. Eur J Immunol 19, 2237-2242.
[0613] 80. Vitiello, A., Marchesini, D., Furze, J., Sherman, L. A., and Chesnut, R. W. (1991). Analysis of the HLA-restricted influenza-specific cytotoxic T lymphocyte response in transgenic mice carrying a chimeric human-mouse class I major histocompatibility complex. J Exp Med 173, 1007-1015.
[0614] 81. Yachi, P. P., Ampudia, J., Zal, T., and Gascoigne, N. R. J. (2006). Altered peptide ligands induce delayed CD8-T cell receptor interaction—a role for CD8 in distinguishing antigen quality. Immunity 25, 203-211.
[0615] 82. Pushko P, Parker M, Ludwig G V, Davis N L, Johnston R E, Smith J F. Replicon-helper systems from attenuated Venezuelan equine encephalitis virus: expression of heterologous genes in vitro and immunization against heterologous pathogens in vivo. Virology. 1997 Dec. 22; 239(2):389-401.
[0616] 83. Strauss, JH and E G Strauss. The alphaviruses: gene expression, replication, and evolution. Microbiol Rev. 1994 September; 58(3): 491-562.
[0617] 84. Rheme C, Ehrengruber M U, Grandgirard D. Alphaviral cytotoxicity and its implication in vector development. Exp Physiol. 2005 January; 90(1):45-52. Epub 2004 Nov. 12.
[0618] 85. Riley, Michael K. II, and Wilfred Vermerris. Recent Advances in Nanomaterials for Gene Delivery-A Review. Nanomaterials 2017, 7(5), 94.
[0619] 86. Frolov I, Hardy R, Rice C M. Cis-acting RNA elements at the 5′ end of Sindbis virus genome RNA regulate minus- and plus-strand RNA synthesis. RNA. 2001 November; 7(11):1638-51.
[0620] 87. Jose J, Snyder J E, Kuhn R J. A structural and functional perspective of alphavirus replication and assembly. Future Microbiol. 2009 September; 4(7):837-56.
[0621] 88. Bo Li and C. olin N. Dewey. RSEM: accurate transcript quantification from RNA-Seq data with or without a referenfe genome. BMC Bioinformatics, 12:323, August 2011
[0622] 89. Hillary Pearson, Tariq Daouda, Diana Paola Granados, Chantal Durette, Eric Bonneil, Mathieu Courcelles, Anja Rodenbrock, Jean-Philippe Laverdure, Caroline Cote, Sylvie Mader, Sebastien Lemieux, Pierre Thibault, and Claude Perreault. MHC class I-associated peptides derive from selective regions of the human genome. The Journal of Clinical Investigation, 2016,
[0623] 90. Juliane Liepe, Fabio Marino, John Sidney, Anita Jeko, Daniel E. Bunting, Alessandro Sette, Peter M. Kloetzel, Michael P. H. Stumpf, Albert J. R. Heck, Michele Mishto. A large fraction of HLA class I ligands are proteasome-generated spliced peptides. Science, 21, October 2016.
[0624] 91. Mommen G P., Marino, F., Meiring H D., Poelen, MC., van Gaans-van den Brink, JA., Mohammed S., Heck A J., and van Els C A. Sampling From the Proteome to the Human Leukocyte Antigen-DR (HLA-DR) Ligandome Proceeds Via High Specificity. Mol Cell Proteomics 15(4): 1412-1423, April 2016.
[0625] 92. Sebastian Kreiter, Mathias Vormehr, Niels van de Roemer, Mustafa Diken, Martin Löwer, Jan Diekmann, Sebastian Boegel, Barbara Schrörs, Fulvia Vascotto, John C. Castle, Arbel D. Tadmor, Stephen P. Schoenberger, Christoph Huber, Özlem Tiireci, and Ugur Sahin. Mutant MHC class II epitopes drive therapeutic immune responses to caner. Nature 520, 692-696, April 2015.
[0626] 93. Tran E., Turcotte S., Gros A., Robbins P. F., Lu Y. C., Dudley M. E., Wunderlich J. R., Somerville R. P., Hogan K., Hinrichs C. S., Parkhurst M. R., Yang J. C., Rosenberg S. A. Cancer immunotherapy based on mutation-specific CD4+ T cells in a patient with epithelial cancer. Science 344(6184) 641-645, May 2014.
[0627] 94. Andreatta M., Karosiene E., Rasmussen M., Stryhn A., Buus S., Nielsen M. Accurate pan-specific prediction of peptide-MHC class II binding affinity with improved binding core identification. Immunogenetics 67(11-12) 641-650, November 2015.
[0628] 95. Nielsen, M., Lund, 0. NN-align. An artificial neural network-based alignment algorithm for MHC class II peptide binding prediction. BMC Bioinformatics 10:296, September 2009.
[0629] 96. Nielsen, M., Lundegaard, C., Lund, O. Prediction of MHC class II binding affinity using SMM-align, a novel stabilization matrix alignment method. BMC Bioinformatics 8:238, July 2007.
[0630] 97. Zhang, J., et al. PEAKS DB: de novo sequencing assisted database search for sensitive and accurate peptide identification. Molecular & Cellular Proteomics. 11(4):1-8. 1/2/2012.
[0631] 98. Jensen, Kamilla Kjaergaard, et al. “Improved Methods for Prediting Peptide Binding Affinity to MHC Class II Molecules.” Immunology, 2018, doi:10.1111/imm.12889.
[0632] 99. Carter, S. L., Cibulskis, K., Heiman, E., McKenna, A., Shen, H., Zack, T., Laird, P. W., Onofrio, R. C., Winckler, W., Weir, B. A., et al. (2012). Absolute quantification of somatic DNA alterations in human cancer. Nat. Biotechnol. 30, 413-421
[0633] 100. McGranahan, N., Rosenthal, R., Hiley, C. T., Rowan, A. J., Watkins, T. B. K., Wilson, G. A., Birkbak, N.J., Veeriah, S., Van Loo, P., Herrero, J., et al. (2017). Allele-Specific HLA Loss and Immune Escape in Lung Cancer Evolution. Cell 171, 1259-1271.ell.
[0634] 101. Shukla, S. A., Rooney, M. S., Rajasagi, M., Tiao, G., Dixon, P. M., Lawrence, M. S., Stevens, J., Lane, W. J., Dellagatta, J. L., Steelman, S., et al. (2015). Comprehensive analysis of cancer-associated somatic mutations in class I HLA genes. Nat. Biotechnol. 33, 1152-1158.
[0635] 102. Van Loo, P., Nordgard, S. H., Lingjerde, O. C., Russnes, H. G., Rye, I. H., Sun, W., Weigman, V. J., Marynen, P., Zetterberg, A., Naume, B., et al. (2010). Allele-specific copy number analysis of tumors. Proc. Natl. Acad. Sci. U.S.A 107, 16910-16915.
[0636] 103. Van Loo, P., Nordgard, S. H., Lingjerde, O. C., Russnes, H. G., Rye, I. H., Sun, W., Weigman, V. J., Marynen, P., Zetterberg, A., Naume, B., et al. (2010). Allele-specific copy number analysis of tumors. Proc. Natl. Acad. Sci. U.S.A 107, 16910-16915.

1. A composition for delivery of an antigen expression system comprising a self-replicating alphavirus-based expression system, wherein the composition for delivery of the self-replicating alphavirus-based expression system comprises: the self-replicating alphavirus-based expression system, wherein the self-replicating alphavirus-based expression system comprises one or more vectors, wherein the one or more vectors comprise:
(a) an RNA alphavirus backbone, wherein the RNA alphavirus backbone comprises:
(i) at least one promoter nucleotide sequence, and
(ii) at least one polyadenylation (poly(A)) sequence; and
(b) at least two cassettes, wherein each of the cassettes independently comprise:
(i) at least one antigen-encoding nucleic acid sequence comprising:
a. an epitope-encoding nucleic acid sequence,
b. optionally a 5′ linker sequence, and
c. optionally a 3′ linker sequence; and
(ii) optionally, at least one second poly(A) sequence, wherein the second poly(A) sequence is a native poly(A) sequence or an exogenous poly(A) sequence to the alphavirus,
wherein a first of the at least two cassettes, oriented from 5′ to 3′, is operably linked to a promoter nucleotide sequence comprising a first subgenomic alphavirus-derived promoter (SGP1) comprising a core conserved promoter sequence comprising the polynucleotide sequence ctacggcTAAcctgaa(+1)tgga (SEQ ID NO: 27974), and wherein at least a second of the at least two cassettes is operably linked to a promoter nucleotide sequence comprising a second subgenomic alphavirus-derived promoter (SGP2) comprising the core conserved promoter sequence, and
wherein the SGP1 and/or the SGP2 subgenomic promoter comprises an extended 3′ promoter region derived from an alphavirus encoded 3′ of the core conserved promoter sequence.

2. The composition of claim 1, wherein the extended 3′ promoter region of SGP1 is different than the extended 3′ promoter region of SGP2.

3. The composition of claim 1, wherein either the SGP1 or the SGP2 subgenomic promoter, but not both, comprises an extended 3′ promoter region derived from an alphavirus encoded 3′ of the core conserved promoter sequence.

4. The composition of claim 1, wherein the extended 3′ promoter region:
(a) comprises the polynucleotide sequence CTACGACAT (SEQ ID NO: 27997);
(b) comprises the polynucleotide sequence CTACGACATAGTCTAGTCCGCCAAG (SEQ ID NO: 27975);
(c) consists of the polynucleotide sequence CTACGACAT (SEQ ID NO: 27997); or
(d) consists of the polynucleotide sequence CTACGACATAGTCTAGTCCGCCAAG (SEQ ID NO: 27975).

5.-7. (canceled)

8. The composition of claim 1, wherein the extended 3′ promoter region comprises the polynucleotide sequence ATAGTCTAGTCCGCCAAG (SEQ ID NO: 27976).

9. The composition of claim 1, wherein (a) each of the subgenomic promoters comprise an extended 3′ promoter region comprising the polynucleotide sequence CTACGACAT (SEQ ID NO: 27997); and (b) only one of the SGP1 or the SGP2 subgenomic promoters, but not both, comprise an extended 3′ promoter region further comprising the polynucleotide sequence ATAGTCTAGTCCGCCAAG (SEQ ID NO: 27976), wherein the polynucleotide sequence ATAGTCTAGTCCGCCAAG (SEQ ID NO: 27976) is encoded 3′ of the polynucleotide sequence CTACGACAT (SEQ ID NO: 27997).

10. The composition of claim 1, wherein the SGP1 subgenomic promoter, the SGP2 subgenomic promoter, or both comprise an extended 5′ promoter region derived from an alphavirus encoded 5′ of the core conserved promoter sequence, optionally wherein the extended 5′ promoter region is encoded immediately 5′ of the core conserved promoter sequence.

11. The composition of claim 10, wherein the extended 5′ promoter region:
(a) comprises a polynucleotide sequence derived from an alphavirus nonstructural protein 4 (nsp4) and is encoded 5′ of the core conserved promoter sequence;
(b) comprises the polynucleotide sequence ctct encoded immediately 5′ of the core conserved promoter sequence;
(c) comprises the polynucleotide sequence acttccatcatagttatggccatgactactctagctagcagtgttaaatcattcagctacctgagaggggcccctataactct (SEQ ID NO: 27977) encoded immediately 5′ of the core conserved promoter sequence;
(d) comprises the polynucleotide sequence acctgagaggggcccctataactct (SEQ ID NO: 27978) encoded immediately 5′ of the core conserved promoter sequence;
(e) comprises the polynucleotide sequence gggcccctataactct (SEQ ID NO: 27979) encoded immediately 5′ of the core conserved promoter sequence; or
(f) consists of the polynucleotide sequence gggcccctataactct (SEQ ID NO: 27979) encoded immediately 5′ of the core conserved promoter sequence.

12.-17. (canceled)

18. The composition of claim 10, wherein the extended 5′ promoter region of the SGP2 subgenomic promoter:
(a) comprises the polynucleotide sequence acttccatcatagttatggccatgactactctagctagcagtgttaaatcattcagctacctgagaggggcccctataactct (SEQ ID NO: 27977) encoded immediately 5′ of the core conserved promoter sequence;
(b) comprises the polynucleotide sequence acctgagaggggcccctataactct (SEQ ID NO: 27978) encoded immediately 5′ of the core conserved promoter sequence;
(c) comprises the polynucleotide sequence gggcccctataactct (SEQ ID NO: 27979) encoded immediately 5′ of the core conserved promoter sequence; or
(d) consists of the polynucleotide sequence gggcccctataactct (SEQ ID NO: 27979) encoded immediately 5′ of the core conserved promoter sequence.

19.-21. (canceled)

22. The composition of claim 1, wherein the at least one promoter nucleotide sequence of the RNA alphavirus backbone comprises the SGP1 subgenomic promoter.

23. The composition of claim 1, wherein the extended 3′ promoter region and/or the extended 5′ promoter region:
(a) is derived from the same alphavirus as the alphavirus used to derive the core conserved promoter sequence;
(b) is capable of reducing or eliminating recombination between the SGP1 and the SGP2 subgenomic promoter; and/or
(c) comprises one or more transcriptional enhancer elements.

24.-25. (canceled)

26. The composition of claim 1, wherein the SGP2 subgenomic promoter is capable of:
(a) promoting expression of a cassette at least 2-fold greater relative to the same cassette operably linked to the SGP1 subgenomic promoter; and/or
(b) stimulating a stronger immune response to epitopes encoded by the cassette operably linked to the SGP2 subgenomic promoter following administration to a subject relative to the same cassette operably linked to the SGP1 subgenomic promoter.

27. The composition of claim 1, wherein the extended 3′ promoter region and/or the extended 5′ promoter region of SGP2 is capable of:
(a) promoting expression of a cassette at least 2-fold greater relative to the same cassette operably linked to the SGP1 subgenomic promoter; and/or
(b) stimulating a stronger immune response to epitopes encoded by the cassette operably linked to the SGP2 subgenomic promoter following administration to a subject relative to the same cassette operably linked to the SGP1 subgenomic promoter.

28.-29. (canceled)

30. The composition of claim 1, wherein the SGP2 subgenomic promoter is encoded immediately 5′ of the second cassette, optionally immediately 5′ of a Kozak sequence of the second cassette.

31. The composition of claim 1, wherein either the SGP1 or the SGP2 subgenomic promoter comprises the polynucleotide sequence GGGCCCCTATAACTCTCTACGGCTAACCTGAATGGACTACGACATAGTCTAGTC CGCCAAG (SEQ ID NO: 27980);
(b) the SGP2 subgenomic promoter comprises the polynucleotide sequence GGGCCCCTATAACTCTCTACGGCTAACCTGAATGGACTACGACATAGTCTAGTC CGCCAAG (SEQ ID NO: 27980);
(c) the SGP1 subgenomic promoter comprises the polynucleotide sequence GGGCCCCTATAACTCTCTACGGCTAACCTGAATGGACTACGAC (SEQ ID NO: 27981);
(d) either the SGP1 or the SGP2 subgenomic promoter comprises the polynucleotide sequence GGGCCCCTATAACTCTCTACGGCTAACCTGAATGGACTACGACATAGTCTAGTC CGCCAAG (SEQ ID NO: 27980), and the other subgenomic promoter comprises the polynucleotide sequence GGGCCCCTATAACTCTCTACGGCTAACCTGAATGGACTACGAC (SEQ ID NO: 27981) but does not comprise the polynucleotide sequence ATAGTCTAGTCCGCCAAG (SEQ ID NO: 27976); or
(e) the SGP2 subgenomic promoter comprises the polynucleotide sequence GGGCCCCTATAACTCTCTACGGCTAACCTGAATGGACTACGAC (SEQ ID NO: 27981) and the SGP1 subgenomic promoter comprises the polynucleotide sequence GGGCCCCTATAACTCTCTACGGCTAACCTGAATGGACTACGAC (SEQ ID NO: 27981), wherein the SGP1 subgenomic promoter does not comprise the polynucleotide sequence ATAGTCTAGTCCGCCAAG (SEQ ID NO: 27976).

32.-39. (canceled)

40. The composition of claim 1, wherein the epitope-encoding nucleic acid sequence comprises:
at least one alteration that makes the encoded epitope sequence distinct from the corresponding peptide sequence encoded by a wild-type nucleic acid sequence;
a nucleic acid sequence encoding an infectious disease organism peptide selected from the group consisting of: a pathogen-derived peptide, a virus-derived peptide, a bacteria-derived peptide, a fungus-derived peptide, and a parasite-derived peptide, and optionally wherein the epitope-encoding nucleic acid sequence encodes a MHC class I or MHC class II epitope; or
combinations thereof.

41. The composition of claim 1, the composition further comprising a nanoparticulate delivery vehicle.

42.-48. (canceled)

49. The composition of claim 1, wherein the backbone comprises at least sequences for nonstructural protein-mediated amplification and a poly(A) sequence encoded by the nucleotide sequence of a Venezuelan equine encephalitis virus, wherein sequences for nonstructural protein-mediated amplification are selected from the group consisting of: an alphavirus 5′ UTR, a 51-nt CSE, a 24-nt CSE, a 19-nt CSE, an alphavirus 3′ UTR, a 26S subgenomic promoter sequence, optionally wherein the 26S subgenomic promoter sequence comprises the SGP1 and/or the SGP2 subgenomic promoter sequence, or combinations thereof, and/or wherein the backbone does not encode structural virion proteins capsid, E2 and E1.

50.-53. (canceled)

54. The composition of claim 1, wherein the alphavirus comprises the sequence of SEQ ID NO:3 or SEQ ID NO:5 further comprising a deletion between base pair 7544 and 11176, wherein the cassettes are inserted at position 7544 to replace the deletion between base pairs 7544 and 11176 as set forth in the sequence of SEQ ID NO:3 or SEQ ID NO:5.

55.-56. (canceled)

57. The composition of claim 1, wherein one or more of the cassettes are at least 100, 200, 300, 400, 500, 600, 700, 800, 900, 1000, 2000, 3000, 4000, 5000, 6000, 7000, 8000, 9000, or 10000 nucleotides in length.

58. (canceled)

59. The composition of claim 1, wherein the one or more vectors are capable of driving expression of a cassette that is at least 3500 nucleotides in length or 6000 nucleotides in length.

60. (canceled)

61. The composition of claim 1, wherein at least one of the at least one antigen-encoding nucleic acid sequences comprises an epitope-encoding nucleic acid sequence that encodes:
(a) an epitope that is presented by MHC class I;
(b) an epitope that is presented by MHC class II; and/or
(c) a polypeptide sequence or portion thereof capable of stimulating a B cell response, optionally wherein the polypeptide sequence or portion thereof capable of stimulating a B cell response comprises a full-length protein, a protein domain, a protein subunit, or an antigenic fragment predicted or known to be capable of being bound by an antibody.

62.-63. (canceled)

64. The composition of claim 1, wherein the at least one antigen-encoding nucleic acid sequence comprises two or more antigen-encoding nucleic acid sequences.

65. (canceled)

66. The composition of claim 64, wherein each antigen-encoding nucleic acid sequence is linked to a distinct antigen-encoding nucleic acid sequence with a nucleic acid sequence encoding a linker, optionally wherein the linker comprises one or more native sequences flanking the antigen derived from the cognate protein of origin and that is at least 2, 3, 4, 5, 6, 7, 8, 9, 10, 11, 12, 13, 14, 15, 16, 17, 18, 19, 20, or 2-20 amino acid residues in length.

67. (canceled)

68. The composition of claim 1, wherein the at least one antigen-encoding nucleic acid sequence comprises at least 2-10, 2, 3, 4, 5, 6, 7, 8, 9, 10, 11-20, 15-20, 11-100, 11-200, 11-300, 11-400, 11, 12, 13, 14, 15, 16, 17, 18, 19, 20 or up to 400 nucleic acid sequences.

69.-74. (canceled)

75. The composition of claim 1, wherein each MHC class I epitope-encoding nucleic acid sequence encodes a polypeptide sequence between 8 and 35 amino acids in length, optionally 9-17, 9-25, 8, 9, 10, 11, 12, 13, 14, 15, 16, 17, 18, 19, 20, 21, 22, 23, 24, 25, 26, 27, 28, 29, 30, 31, 32, 33, 34 or 35 amino acids in length.

76.-101. (canceled)

102. A method for treating a subject, the method comprising administering to the subject a composition for delivery of an antigen expression system comprising a self-replicating alphavirus-based expression system, wherein the composition for delivery of the self-replicating alphavirus-based expression system comprises:
the self-replicating alphavirus-based expression system, wherein the self-replicating alphavirus-based expression system comprises one or more vectors, wherein the one or more vectors comprise:
(a) an RNA alphavirus backbone, wherein the RNA alphavirus backbone comprises:
(i) at least one promoter nucleotide sequence, and
(ii) at least one polyadenylation (poly(A)) sequence; and
(b) at least two cassettes, wherein each of the cassettes independently comprise:
(i) at least one antigen-encoding nucleic acid sequence comprising:
a. an epitope-encoding nucleic acid sequence,
b. optionally a 5′ linker sequence, and
c. optionally a 3′ linker sequence; and
(ii) optionally, at least one second poly(A) sequence, wherein the second poly(A) sequence is a native poly(A) sequence or an exogenous poly(A) sequence to the alphavirus,
wherein a first of the at least two cassettes, oriented from 5′ to 3′, is operably linked to a promoter nucleotide sequence comprising a first subgenomic alphavirus-derived promoter (SGP1) comprising a core conserved promoter sequence comprising the polynucleotide sequence ctacggcTAAcctgaa(+1)tgga, and wherein at least a second of the at least two cassettes is operably linked to a promoter nucleotide sequence comprising a second subgenomic alphavirus-derived promoter (SGP2) comprising the core conserved promoter sequence, and
wherein the SGP1 and/or the SGP2 subgenomic promoter comprises an extended 3′ promoter region derived from an alphavirus encoded 3′ of the core conserved promoter sequence.

103. (canceled)

104. The method of claim 102, wherein the subject expresses at least one HLA allele predicted or known to present a MHC class I or MHC class II epitope encoded by the epitope-encoding nucleic acid sequence of the at least one antigen-encoding nucleic acid sequence.

105. A composition for delivery of a payload comprising a self-replicating alphavirus-based expression system, wherein the composition for delivery of the self-replicating alphavirus-based expression system comprises:
the self-replicating alphavirus-based expression system, wherein the self-replicating alphavirus-based expression system comprises one or more vectors, wherein the one or more vectors comprise:
(a) an RNA alphavirus backbone, wherein the RNA alphavirus backbone comprises:
(i) at least one promoter nucleotide sequence, and
(ii) at least one polyadenylation (poly(A)) sequence; and
(b) at least two cassettes, wherein each of the cassettes independently comprise:
(i) at least one payload-encoding nucleic acid sequence; and
(ii) optionally, at least one second poly(A) sequence, wherein the second poly(A) sequence is a native poly(A) sequence or an exogenous poly(A) sequence to the alphavirus,
wherein a first of the at least two cassettes, oriented from 5′ to 3′, is operably linked to a promoter nucleotide sequence comprising a first subgenomic alphavirus-derived promoter (SGP1) comprising a core conserved promoter sequence comprising the polynucleotide sequence ctacggcTAAcctgaa(+1)tgga (SEQ ID NO: 27974), and wherein at least a second of the at least two cassettes is operably linked to a promoter nucleotide sequence comprising a second subgenomic alphavirus-derived promoter (SGP2) comprising the core conserved promoter sequence, and
wherein the SGP1 and/or the SGP2 subgenomic promoter comprises an extended 3′ promoter region derived from an alphavirus encoded 3′ of the core conserved promoter sequence.

The application's sequence listing, which the Patent Office published only in electronic form, follows.

SEQUENCE LISTING (27996 sequences)

SEQ ID NO: 1 - DNA, 36519 bp, synthetic construct
  misc_feature 1..36519: note = Description of Artificial Sequence: Synthetic polynucleotide
  source 1..36519: mol_type = other DNA
ccatcttcaataatatacctcaaactttttgtgcgcgttaatatgcaaatgaggcgtttgaatttggggaggaagggcggtgattggtcgagggatgagcgaccgttaggggcggggcgagtgacgttttgatgacgtggttgcgaggaggagccagtttgcaagttctcgtgggaaaagtgacgtcaaacgaggtgtggtttgaacacggaaatactcaattttcccgcgctctctgacaggaaatgaggtgtttctgggcggatgcaagtgaaaacgggccattttcgcgcgaaaactgaatgaggaagtgaaaatctgagtaatttcgcgtttatggcagggaggagtatttgccgagggccgagtagactttgaccgattacgtgggggtttcgattaccgtgtttttcacctaaatttccgcgtacggtgtcaaagtccggtgtttttacgtaggtgtcagctgatcgccagggtatttaaacctgcgctctccagtcaagaggccactcttgagtgccagcgagaagagttttctcctccgcgccgcgagtcagatctacactttgaaagatgaggcacctgagagacctgcccgatgagaaaatcatcatcgcttccgggaacgagattctggaactggtggtaaatgccatgatgggcgacgaccctccggagccccccaccccatttgagacaccttcgctgcacgatttgtatgatctggaggtggatgtgcccgaggacgatcccaatgaggaggcggtaaatgatttttttagcgatgccgcgctgctagctgccgaggaggcttcgagctctagctcagacagcgactcttcactgcatacccctagacccggcagaggtgagaaaaagatccccgagcttaaaggggaagagatggacttgcgctgctatgaggaatgcttgcccccgagcgatgatgaggacgagcaggcgatccagaacgcagcgagccagggagtgcaagccgccagcgagagctttgcgctggactgcccgcctctgcccggacacggctgtaagtcttgtgaatttcatcgcatgaatactggagataaagctgtgttgtgtgcactttgctatatgagagcttacaaccattgtgtttacagtaagtgtgattaagttgaactttagagggaggcagagagcagggtgactgggcgatgactggtttatttatgtatatatgttctttatataggtcccgtctctgacgcagatgatgagacccccactacaaagtccacttcgtcacccccagaaattggcacatctccacctgagaatattgttagaccagttcctgttagagccactgggaggagagcagctgtggaatgtttggatgacttgctacagggtggggttgaacctttggacttgtgtacccggaaacgccccaggcactaagtgccacacatgtgtgtttacttgaggtgatgtcagtatttatagggtgtggagtgcaataaaaaatgtgttgactttaagtgcgtggtttatgactcaggggtggggactgtgagtatataagcaggtgcagacctgtgtggttagctcagagcggcatggagatttggacggtcttggaagactttcacaagactagacagctgctagagaacgcctcgaacggagtctcttacctgtggagattctgcttcggtggcgacctagctaggctagtctacagggccaaacaggattatagtgaacaatttgaggttattttgagagagtgttctggtctttttgacgctcttaacttgggccatcagtctcactttaaccagaggatttcgagagcccttgattttactactcctggcagaaccactgcagcagtagccttttttgcttttattcttgacaaatggagtcaagaaacccatttcagcagggattaccagctggatttcttagcagtagctttgtggagaacatggaagtgccagcgcctgaatgcaatctccggctacttgccggtacagccgctagacactctgaggatcctgaatctccaggagagtcccagggcacgccaacgtcgccagcagcagcagcaggaggaggatcaagaagagaacccgagagccggcctggaccctccggcggaggaggaggagtagctgacctgtttcctgaactgcgccgggtgctgactaggtcttcgagtggtcgggagagggggattaagcgggagaggcatgatgagactaatcacagaactgaactgactgtgggtctgatgagtcgcaagcgcccagaaacagtgtggtggcatgaggtgcagtcgactggcacagatgaggtgtcggtgatgcatgagaggttttctctagaacaagtcaagacttgttggttagagcctgaggatgattgggaggtagccatcaggaattatgccaagctggctctgaggccagacaagaagtacaagattactaagctgataaatatcagaaatgcctgctacatctcagggaatggggctgaagtggagatctgtctccaggaaagggtggctttcagatgctgcatgatgaatatgtacccgggagtggtgggcatggatggggttacctttatgaacatgaggttcaggggagatgggtataatggcacggtctttatggccaataccaagctgacagtccatggctgctccttctttgggtttaataacacctgcatcgaggcctggggtcaggtcggtgtgaggggctgcagtttttcagccaactggatgggggtcgtgggcaggaccaagagtatgctgtccgtgaagaaatgcttgtttgagaggtgccacctgggggtgatgagcgagggcgaagccagaatccgccactgcgcctctaccgagacgggctgctttgtgctgtgcaagggcaatgctaagatcaagcataatatgatctgtggagcctcggacgagcgcggctaccagatgctgacctgcgccggcgggaacagccatatgctggccaccgtacatgtggcttcccatgctcgcaagccctggcccgagttcgagcacaatgtcatgaccaggtgcaatatgcatctggggtcccgccgaggcatgttcatgccctaccagtgcaacctgaattatgtgaaggtgctgctggagcccgatgccatgtccagagtgagcctgacgggggtgtttgacatgaatgtggaggtgtggaagattctgagatatgatgaatccaagaccaggtgccgagcctgcgagtgcggagggaagcatgccaggttccagcccgtgtgtgtggatgtgacggaggacctgcgacccgatcatttggtgttgccctgcaccgggacggagttcggttccagcggggaagaatctgactagagtgagtagtgttctggggcgggggaggacctgcatgagggccagaataactgaaatctgtgcttttctgtgtgttgcagcagcatgagcggaagcggctcctttgagggaggggtattcagcccttatctgacggggcgtctcccctcctgggcgggagtgcgtcagaatgtgatgggatccacggtggacggccggcccgtgcagcccgcgaactcttcaaccctgacctatgcaaccctgagctcttcgtcgttggacgcagctgccgccgcagctgctgcatctgccgccagcgccgtgcgcggaatggccatgggcgccggctactacggcactctggtggccaactcgagttccaccaataatcccgccagcctgaacgaggagaagctgttgctgctgatggcccagctcgaggccttgacccagcgcctgggcgagctgacccagcaggtggctcagctgcaggagcagacgcgggccgcggttgccacggtgaaatccaaataaaaaatgaatcaataaataaacggagacggttgttgattttaacacagagtctgaatctttatttgatttttcgcgcgcggtaggccctggaccaccggtctcgatcattgagcacccggtggatcttttccaggacccggtagaggtgggcttggatgttgaggtacatgggcatgagcccgtcccgggggtggaggtagctccattgcagggcctcgtgctcgggggtggtgttgtaaatcacccagtcatagcaggggcgcagggcatggtgttgcacaatatctttgaggaggagactgatggccacgggcagccctttggtgtaggtgtttacaaatctgttgagctgggagggatgcatgcggggggagatgaggtgcatcttggcctggatcttgagattggcgatgttaccgcccagatcccgcctggggttcatgttgtgcaggaccaccagcacggtgtatccggtgcacttggggaatttatcatgcaacttggaagggaaggcgtgaaagaatttggcgacgcctttgtgcccgcccaggttttccatgcactcatccatgatgatggcgatgggcccgtgggcggcggcctgggcaaagacgtttcgggggtcggacacatcatagttgtggtcctgggtgaggtcatcataggccattttaatgaatttggggcggagggtgccggactgggggacaaaggtaccctcgatcccgggggcgtagttcccctcacagatctgcatctcccaggctttgagctcggagggggggatcatgtccacctgcggggcgataaagaacacggtttccggggcgggggagatgagctgggccgaaagcaagttccggagcagctgggacttgccgcagccggtggggccgtagatgaccccgatgaccggctgcaggtggtagttgagggagagacagctgccgtcctcccggaggaggggggccacctcgttcatcatctcgcgcacgtgcatgttctcgcgcaccagttccgccaggaggcgctctccccccagggataggagctcctggagcgaggcgaagtttttcagcggcttgagtccgtcggccatgggcattttggagagggtttgttgcaagagttccaggcggtcccagagctcggtgatgtgctctacggcatctcgatccagcagacctcctcgtttcgcgggttgggacggctgcgggagtagggcaccagacgatgggcgtccagcgcagccagggtccggtccttccagggtcgcagcgtccgcgtcagggtggtctccgtcacggtgaaggggtgcgcgccgggctgggcgcttgcgagggtgcgcttcaggctcatccggctggtcgaaaaccgctcccgatcggcgccctgcgcgtcggccaggtagcaattgaccatgagttcgtagttgagcgcctcggccgcgtggcctttggcgcggagcttacctttggaagtctgcccgcaggcgggacagaggagggacttgagggcgtagagcttgggggcgaggaagacggactcgggggcgtaggcgtccgcgccgcagtgggcgcagacggtctcgcactccacgagccaggtgaggtcgggctggtcggggtcaaaaaccagtttcccgccgttctttttgatgcgtttcttacctttggtctccatgagctcgtgtccccgctgggtgacaaagaggctgtccgtgtccccgtagaccgactttatgggccggtcctcgagcggtgtgccgcggtcctcctcgtagaggaaccccgcccactccgagacgaaagcccgggtccaggccagcacgaaggaggccacgtgggacgggtagcggtcgttgtccaccagcgggtccaccttttccagggtatgcaaacacatgtccccctcgtccacatccaggaaggtgattggcttgtaagtgtaggccacgtgaccgggggtcccggccgggggggtataaaagggtgcgggtccctgctcgtcctcactgtcttccggatcgctgtccaggagcgccagctgttggggtaggtattccctctcgaaggcgggcatgacctcggcactcaggttgtcagtttctagaaacgaggaggatttgatattgacggtgccggcggagatgcctttcaagagcccctcgtccatctggtcagaaaagacgatctttttgttgtcgagcttggtggcgaaggagccgtagagggcgttggagaggagcttggcgatggagcgcatggtctggtttttttccttgtcggcgcgctccttggcggcgatgttgagctgcacgtactcgcgcgccacgcacttccattcggggaagacggtggtcagctcgtcgggcacgattctgacctgccagccccgattatgcagggtgatgaggtccacactggtggccacctcgccgcgcaggggctcattagtccagcagaggcgtccgcccttgcgcgagcagaaggggggcagggggtccagcatgacctcgtcgggggggtcggcatcgatggtgaagatgccgggcaggaggtcggggtcaaagtagctgatggaagtggccagatcgtccagggcagcttgccattcgcgcacggccagcgcgcgctcgtagggactgaggggcgtgccccagggcatgggatgggtaagcgcggaggcgtacatgccgcagatgtcgtagacgtagaggggctcctcgaggatgccgatgtaggtggggtagcagcgccccccgcggatgctggcgcgcacgtagtcatacagctcgtgcgagggggcgaggagccccgggcccaggttggtgcgactgggcttttcggcgcggtagacgatctggcggaaaatggcatgcgagttggaggagatggtgggcctttggaagatgttgaagtgggcgtggggcagtccgaccgagtcgcggatgaagtgggcgtaggagtcttgcagcttggcgacgagctcggcggtgactaggacgtccagagcgcagtagtcgagggtctcctggatgatgtcatacttgagctgtcccttttgtttccacagctcgcggttgagaaggaactcttcgcggtccttccagtactcttcgagggggaacccgtcctgatctgcacggtaagagcctagcatgtagaactggttgacggccttgtaggcgcagcagcccttctccacggggagggcgtaggcctgggcggccttgcgcagggaggtgtgcgtgagggcgaaagtgtccctgaccatgaccttgaggaactggtgcttgaagtcgatatcgtcgcagcccccctgctcccagagctggaagtccgtgcgcttcttgtaggcggggttgggcaaagcgaaagtaacatcgttgaagaggatcttgcccgcgcggggcataaagttgcgagtgatgcggaaaggttggggcacctcggcccggttgttgatgacctgggcggcgagcacgatctcgtcgaagccgttgatgttgtggcccacgatgtagagttccacgaatcgcggacggcccttgacgtggggcagtttcttgagctcctcgtaggtgagctcgtcggggtcgctgagcccgtgctgctcgagcgcccagtcggcgagatgggggttggcgcggaggaaggaagtccagagatccacggccagggcggtttgcagacggtcccggtactgacggaactgctgcccgacggccattttttcgggggtgacgcagtagaaggtgcgggggtccccgtgccagcgatcccatttgagctggagggcgagatcgagggcgagctcgacgagccggtcgtccccggagagtttcatgaccagcatgaaggggacgagctgcttgccgaaggaccccatccaggtgtaggtttccacatcgtaggtgaggaagagcctttcggtgcgaggatgcgagccgatggggaagaactggatctcctgccaccaattggaggaatggctgttgatgtgatggaagtagaaatgccgacggcgcgccgaacactcgtgcttgtgtttatacaagcggccacagtgctcgcaacgctgcacgggatgcacgtgctgcacgagctgtacctgagttcctttgacgaggaatttcagtgggaagtggagtcgtggcgcctgcatctcgtgctgtactacgtcgtggtggtcggcctggccctcttctgcctcgatggtggtcatgctgacgagcccgcgcgggaggcaggtccagacctcggcgcgagcgggtcggagagcgaggacgagggcgcgcaggccggagctgtccagggtcctgagacgctgcggagtcaggtcagtgggcagcggcggcgcgcggttgacttgcaggagtttttccagggcgcgcgggaggtccagatggtacttgatctccaccgcgccattggtggcgacgtcgatggcttgcagggtcccgtgcccctggggtgtgaccaccgtcccccgtttcttcttgggcggctggggcgacgggggcggtgcctcttccatggttagaagcggcggcgaggacgcgcgccgggcggcaggggcggctcggggcccggaggcaggggcggcaggggcacgtcggcgccgcgcgcgggtaggttctggtactgcgcccggagaagactggcgtgagcgacgacgcgacggttgacgtcctggatctgacgcctctgggtgaaggccacgggacccgtgagtttgaacctgaaagagagttcgacagaatcaatctcggtatcgttgacggcggcctgccgcaggatctcttgcacgtcgcccgagttgtcctggtaggcgatctcggtcatgaactgctcgatctcctcctcttgaaggtctccgcggccggcgcgctccacggtggccgcgaggtcgttggagatgcggcccatgagctgcgagaaggcgttcatgcccgcctcgttccagacgcggctgtagaccacgacgccctcgggatcgcgggcgcgcatgaccacctgggcgaggttgagctccacgtggcgcgtgaagaccgcgtagttgcagaggcgctggtagaggtagttgagcgtggtggcgatgtgctcggtgacgaagaaatacatgatccagcggcggagcggcatctcgctgacgtcgcccagcgcctccaaacgttccatggcctcgtaaaagtccacggcgaagttgaaaaactgggagttgcgcgccgagacggtcaactcctcctccagaagacggatgagctcggcgatggtggcgcgcacctcgcgctcgaaggcccccgggagttcctccacttcctcttcttcctcctccactaacatctcttctacttcctcctcaggcggcagtggtggcgggggagggggcctgcgtcgccggcggcgcacgggcagacggtcgatgaagcgctcgatggtctcgccgcgccggcgtcgcatggtctcggtgacggcgcgcccgtcctcgcggggccgcagcgtgaagacgccgccgcgcatctccaggtggccgggggggtccccgttgggcagggagagggcgctgacgatgcatcttatcaattgccccgtagggactccgcgcaaggacctgagcgtctcgagatccacgggatctgaaaaccgctgaacgaaggcttcgagccagtcgcagtcgcaaggtaggctgagcacggtttcttctggcgggtcatgttggttgggagcggggcgggcgatgctgctggtgatgaagttgaaataggcggttctgagacggcggatggtggcgaggagcaccaggtctttgggcccggcttgctggatgcgcagacggtcggccatgccccaggcgtggtcctgacacctggccaggtccttgtagtagtcctgcatgagccgctccacgggcacctcctcctcgcccgcgcggccgtgcatgcgcgtgagcccgaagccgcgctggggctggacgagcgccaggtcggcgacgacgcgctcggcgaggatggcttgctggatctgggtgagggtggtctggaagtcatcaaagtcgacgaagcggtggtaggctccggtgttgatggtgtaggagcagttggccatgacggaccagttgacggtctggtggcccggacgcacgagctcgtggtacttgaggcgcgagtaggcgcgcgtgtcgaagatgtagtcgttgcaggtgcgcaccaggtactggtagccgatgaggaagtgcggcggcggctggcggtagagcggccatcgctcggtggcgggggcgccgggcgcgaggtcctcgagcatggtgcggtggtagccgtagatgtacctggacatccaggtgatgccggcggcggtggtggaggcgcgcgggaactcgcggacgcggttccagatgttgcgcagcggcaggaagtagttcatggtgggcacggtctggcccgtgaggcgcgcgcagtcgtggatgctctatacgggcaaaaacgaaagcggtcagcggctcgactccgtggcctggaggctaagcgaacgggttgggctgcgcgtgtaccccggttcgaatctcgaatcaggctggagccgcagctaacgtggtattggcactcccgtctcgacccaagcctgcaccaaccctccaggatacggaggcgggtcgttttgcaacttttttttggaggccggatgagactagtaagcgcggaaagcggccgaccgcgatggctcgctgccgtagtctggagaagaatcgccagggttgcgttgcggtgtgccccggttcgaggccggccggattccgcggctaacgagggcgtggctgccccgtcgtttccaagaccccatagccagccgacttctccagttacggagcgagcccctcttttgttttgtttgtttttgccagatgcatcccgtactgcggcagatgcgcccccaccaccctccaccgcaacaacagccccctccacagccggcgcttctgcccccgccccagcagcaacttccagccacgaccgccgcggccgccgtgagcggggctggacagagttatgatcaccagctggccttggaagagggcgaggggctggcgcgcctgggggcgtcgtcgccggagcggcacccgcgcgtgcagatgaaaagggacgctcgcgaggcctacgtgcccaagcagaacctgttcagagacaggagcggcgaggagcccgaggagatgcgcgcggcccggttccacgcggggcgggagctgcggcgcggcctggaccgaaagagggtgctgagggacgaggatttcgaggcggacgagctgacggggatcagccccgcgcgcgcgcacgtggccgcggccaacctggtcacggcgtacgagcagaccgtgaaggaggagagcaacttccaaaaatccttcaacaaccacgtgcgcaccctgatcgcgcgcgaggaggtgaccctgggcctgatgcacctgtgggacctgctggaggccatcgtgcagaaccccaccagcaagccgctgacggcgcagctgttcctggtggtgcagcatagtcgggacaacgaagcgttcagggaggcgctgctgaatatcaccgagcccgagggccgctggctcctggacctggtgaacattctgcagagcatcgtggtgcaggagcgcgggctgccgctgtccgagaagctggcggccatcaacttctcggtgctgagtttgggcaagtactacgctaggaagatctacaagaccccgtacgtgcccatagacaaggaggtgaagatcgacgggttttacatgcgcatgaccctgaaagtgctgaccctgagcgacgatctgggggtgtaccgcaacgacaggatgcaccgtgcggtgagcgccagcaggcggcgcgagctgagcgaccaggagctgatgcatagtctgcagcgggccctgaccggggccgggaccgagggggagagctactttgacatgggcgcggacctgcactggcagcccagccgccgggccttggaggcggcggcaggaccctacgtagaagaggtggacgatgaggtggacgaggagggcgagtacctggaagactgatggcgcgaccgtatttttgctagatgcaacaacaacagccacctcctgatcccgcgatgcgggcggcgctgcagagccagccgtccggcattaactcctcggacgattggacccaggccatgcaacgcatcatggcgctgacgacccgcaaccccgaagcctttagacagcagccccaggccaaccggctctcggccatcctggaggccgtggtgccctcgcgctccaaccccacgcacgagaaggtcctggccatcgtgaacgcgctggtggagaacaaggccatccgcggcgacgaggccggcctggtgtacaacgcgctgctggagcgcgtggcccgctacaacagcaccaacgtgcagaccaacctggaccgcatggtgaccgacgtgcgcgaggccgtggcccagcgcgagcggttccaccgcgagtccaacctgggatccatggtggcgctgaacgccttcctcagcacccagcccgccaacgtgccccggggccaggaggactacaccaacttcatcagcgccctgcgcctgatggtgaccgaggtgccccagagcgaggtgtaccagtccgggccggactacttcttccagaccagtcgccagggcttgcagaccgtgaacctgagccaggctttcaagaacttgcagggcctgtggggcgtgcaggccccggtcggggaccgcgcgacggtgtcgagcctgctgacgccgaactcgcgcctgctgctgctgctggtggcccccttcacggacagcggcagcatcaaccgcaactcgtacctgggctacctgattaacctgtaccgcgaggccatcggccaggcgcacgtggacgagcagacctaccaggagatcacccacgtgagccgcgccctgggccaggacgacccgggcaacctggaagccaccctgaactttttgctgaccaaccggtcgcagaagatcccgccccagtacgcgctcagcaccgaggaggagcgcatcctgcgttacgtgcagcagagcgtgggcctgttcctgatgcaggagggggccacccccagcgccgcgctcgacatgaccgcgcgcaacatggagcccagcatgtacgccagcaaccgcccgttcatcaataaactgatggactacttgcatcgggcggccgccatgaactctgactatttcaccaacgccatcctgaatccccactggctcccgccgccggggttctacacgggcgagtacgacatgcccgaccccaatgacgggttcctgtgggacgatgtggacagcagcgtgttctccccccgaccgggtgctaacgagcgccccttgtggaagaaggaaggcagcgaccgacgcccgtcctcggcgctgtccggccgcgagggtgctgccgcggcggtgcccgaggccgccagtcctttcccgagcttgcccttctcgctgaacagtatccgcagcagcgagctgggcaggatcacgcgcccgcgcttgctgggcgaagaggagtacttgaatgactcgctgttgagacccgagcgggagaagaacttccccaataacgggatagaaagcctggtggacaagatgagccgctggaagacgtatgcgcaggagcacagggacgatccccgggcgtcgcagggggccacgagccggggcagcgccgcccgtaaacgccggtggcacgacaggcagcggggacagatgtgggacgatgaggactccgccgacgacagcagcgtgttggacttgggtgggagtggtaacccgttcgctcacctgcgcccccgtatcgggcgcatgatgtaagagaaaccgaaaataaatgatactcaccaaggccatggcgaccagcgtgcgttcgtttcttctctgttgttgttgtatctagtatgatgaggcgtgcgtacccggagggtcctcctccctcgtacgagagcgtgatgcagcaggcgatggcggcggcggcgatgcagcccccgctggaggctccttacgtgcccccgcggtacctggcgcctacggaggggcggaacagcattcgttactcggagctggcacccttgtacgataccacccggttgtacctggtggacaacaagtcggcggacatcgcctcgctgaactaccagaacgaccacagcaacttcctgaccaccgtggtgcagaacaatgacttcacccccacggaggccagcacccagaccatcaactttgacgagcgctcgcggtggggcggccagctgaaaaccatcatgcacaccaacatgcccaacgtgaacgagttcatgtacagcaacaagttcaaggcgcgggtgatggtctcccgcaagacccccaatggggtgacagtgacagaggattatgatggtagtcaggatgagctgaagtatgaatgggtggaatttgagctgcccgaaggcaacttctcggtgaccatgaccatcgacctgatgaacaacgccatcatcgacaattacttggcggtggggcggcagaacggggtgctggagagcgacatcggcgtgaagttcgacactaggaacttcaggctgggctgggaccccgtgaccgagctggtcatgcccggggtgtacaccaacgaggctttccatcccgatattgtcttgctgcccggctgcggggtggacttcaccgagagccgcctcagcaacctgctgggcattcgcaagaggcagcccttccaggaaggcttccagatcatgtacgaggatctggaggggggcaacatccccgcgctcctggatgtcgacgcctatgagaaaagcaaggaggatgcagcagctgaagcaactgcagccgtagctaccgcctctaccgaggtcaggggcgataattttgcaagcgccgcagcagtggcagcggccgaggcggctgaaaccgaaagtaagatagtcattcagccggtggagaaggatagcaagaacaggagctacaacgtactaccggacaagataaacaccgcctaccgcagctggtacctagcctacaactatggcgaccccgagaagggcgtgcgctcctggacgctgctcaccacctcggacgtcacctgcggcgtggagcaagtctactggtcgctgcccgacatgatgcaagacccggtcaccttccgctccacgcgtcaagttagcaactacccggtggtgggcgccgagctcctgcccgtctactccaagagcttcttcaacgagcaggccgtctactcgcagcagctgcgcgccttcacctcgcttacgcacgtcttcaaccgcttccccgagaaccagatcctcgtccgcccgcccgcgcccaccattaccaccgtcagtgaaaacgttcctgctctcacagatcacgggaccctgccgctgcgcagcagtatccggggagtccagcgcgtgaccgttactgacgccagacgccgcacctgcccctacgtctacaaggccctgggcatagtcgcgccgcgcgtcctctcgagccgcaccttctaaatgtccattctcatctcgcccagtaataacaccggttggggcctgcgcgcgcccagcaagatgtacggaggcgctcgccaacgctccacgcaacaccccgtgcgcgtgcgcgggcacttccgcgctccctggggcgccctcaagggccgcgtgcggtcgcgcaccaccgtcgacgacgtgatcgaccaggtggtggccgacgcgcgcaactacacccccgccgccgcgcccgtctccaccgtggacgccgtcatcgacagcgtggtggccgacgcgcgccggtacgcccgcgccaagagccggcggcggcgcatcgcccggcggcaccggagcacccccgccatgcgcgcggcgcgagccttgctgcgcagggccaggcgcacgggacgcagggccatgctcagggcggccagacgcgcggcttcaggcgccagcgccggcaggacccggagacgcgcggccacggcggcggcagcggccatcgccagcatgtcccgcccgcggcgagggaacgtgtactgggtgcgcgacgccgccaccggtgtgcgcgtgcccgtgcgcacccgcccccctcgcacttgaagatgttcacttcgcgatgttgatgtgtcccagcggcgaggaggatgtccaagcgcaaattcaaggaagagatgctccaggtcatcgcgcctgagatctacggccctgcggtggtgaaggaggaaagaaagccccgcaaaatcaagcgggtcaaaaaggacaaaaaggaagaagaaagtgatgtggacggattggtggagtttgtgcgcgagttcgccccccggcggcgcgtgcagtggcgcgggcggaaggtgcaaccggtgctgagacccggcaccaccgtggtcttcacgcccggcgagcgctccggcaccgcttccaagcgctcctacgacgaggtgtacggggatgatgatattctggagcaggcggccgagcgcctgggcgagtttgcttacggcaagcgcagccgttccgcaccgaaggaagaggcggtgtccatcccgctggaccacggcaaccccacgccgagcctcaagcccgtgaccttgcagcaggtgctgccgaccgcggcgccgcgccgggggttcaagcgcgagggcgaggatctgtaccccaccatgcagctgatggtgcccaagcgccagaagctggaagacgtgctggagaccatgaaggtggacccggacgtgcagcccgaggtcaaggtgcggcccatcaagcaggtggccccgggcctgggcgtgcagaccgtggacatcaagattcccacggagcccatggaaacgcagaccgagcccatgatcaagcccagcaccagcaccatggaggtgcagacggatccctggatgccatcggctcctagtcgaagaccccggcgcaagtacggcgcggccagcctgctgatgcccaactacgcgctgcatccttccatcatccccacgccgggctaccgcggcacgcgcttctaccgcggtcataccagcagccgccgccgcaagaccaccactcgccgccgccgtcgccgcaccgccgctgcaaccacccctgccgccctggtgcggagagtgtaccgccgcggccgcgcacctctgaccctgccgcgcgcgcgctaccacccgagcatcgccatttaaactttcgcctgctttgcagatcaatggccctcacatgccgccttcgcgttcccattacgggctaccgaggaagaaaaccgcgccgtagaaggctggcggggaacgggatgcgtcgccaccaccaccggcggcggcgcgccatcagcaagcggttggggggaggcttcctgcccgcgctgatccccatcatcgccgcggcgatcggggcgatccccggcattgcttccgtggcggtgcaggcctctcagcgccactgagacacacttggaaacatcttgtaataaaccaatggactctgacgctcctggtcctgtgatgtgttttcgtagacagatggaagacatcaatttttcgtccctggctccgcgacacggcacgcggccgttcatgggcacctggagcgacatcggcaccagccaactgaacgggggcgccttcaattggagcagtctctggagcgggcttaagaatttcgggtccacgcttaaaacctatggcagcaaggcgtggaacagcaccacagggcaggcgctgagggataagctgaaagagcagaacttccagcagaaggtggtcgatgggctcgcctcgggcatcaacggggtggtggacctggccaaccaggccgtgcagcggcagatcaacagccgcctggacccggtgccgcccgccggctccgtggagatgccgcaggtggaggaggagctgcctcccctggacaagcggggcgagaagcgaccccgccccgatgcggaggagacgctgctgacgcacacggacgagccgcccccgtacgaggaggcggtgaaactgggtctgcccaccacgcggcccatcgcgcccctggccaccggggtgctgaaacccgaaaagcccgcgaccctggacttgcctcctccccagccttcccgcccctctacagtggctaagcccctgccgccggtggccgtggcccgcgcgcgacccgggggcaccgcccgccctcatgcgaactggcagagcactctgaacagcatcgtgggtctgggagtgcagagtgtgaagcgccgccgctgctattaaacctaccgtagcgcttaacttgcttgtctgtgtgtgtatgtattatgtcgccgccgccgctgtccaccagaaggaggagtgaagaggcgcgtcgccgagttgcaagatggccaccccatcgatgctgccccagtgggcgtacatgcacatcgccggacaggacgcttcggagtacctgagtccgggtctggtgcagtttgcccgcgccacagacacctacttcagtctggggaacaagtttaggaaccccacggtggcgcccacgcacgatgtgaccaccgaccgcagccagcggctgacgctgcgcttcgtgcccgtggaccgcgaggacaacacctactcgtacaaagtgcgctacacgctggccgtgggcgacaaccgcgtgctggacatggccagcacctactttgacatccgcggcgtgctggatcggggccctagcttcaaaccctactccggcaccgcctacaacagtctggcccccaagggagcacccaacacttgtcagtggacatataaagccgatggtgaaactgccacagaaaaaacctatacatatggaaatgcacccgtgcagggcattaacatcacaaaagatggtattcaacttggaactgacaccgatgatcagccaatctacgcagataaaacctatcagcctgaacctcaagtgggtgatgctgaatggcatgacatcactggtactgatgaaaagtatggaggcagagctcttaagcctgataccaaaatgaagccttgttatggttcttttgccaagcctactaataaagaaggaggtcaggcaaatgtgaaaacaggaacaggcactactaaagaatatgacatagacatggctttctttgacaacagaagtgcggctgctgctggcctagctccagaaattgttttgtatactgaaaatgtggatttggaaactccagatacccatattgtatacaaagcaggcacagatgacagcagctcttctattaatttgggtcagcaagccatgcccaacagacctaactacattggtttcagagacaactttatcgggctcatgtactacaacagcactggcaatatgggggtgctggccggtcaggcttctcagctgaatgctgtggttgacttgcaagacagaaacaccgagctgtcctaccagctcttgcttgactctctgggtgacagaacccggtatttcagtatgtggaatcaggcggtggacagctatgatcctgatgtgcgcattattgaaaatcatggtgtggaggatgaacttcccaactattgtttccctctggatgctgttggcagaacagatacttatcagggaattaaggctaatggaactgatcaaaccacatggaccaaagatgacagtgtcaatgatgctaatgagataggcaagggtaatccattcgccatggaaatcaacatccaagccaacctgtggaggaacttcctctacgccaacgtggccctgtacctgcccgactcttacaagtacacgccggccaatgttaccctgcccaccaacaccaacacctacgattacatgaacggccgggtggtggcgccctcgctggtggactcctacatcaacatcggggcgcgctggtcgctggatcccatggacaacgtgaaccccttcaaccaccaccgcaatgcggggctgcgctaccgctccatgctcctgggcaacgggcgctacgtgcccttccacatccaggtgccccagaaatttttcgccatcaagagcctcctgctcctgcccgggtcctacacctacgagtggaacttccgcaaggacgtcaacatgatcctgcagagctccctcggcaacgacctgcgcacggacggggcctccatctccttcaccagcatcaacctctacgccaccttcttccccatggcgcacaacacggcctccacgctcgaggccatgctgcgcaacgacaccaacgaccagtccttcaacgactacctctcggcggccaacatgctctaccccatcccggccaacgccaccaacgtgcccatctccatcccctcgcgcaactgggccgccttccgcggctggtccttcacgcgtctcaagaccaaggagacgccctcgctgggctccgggttcgacccctacttcgtctactcgggctccatcccctacctcgacggcaccttctacctcaaccacaccttcaagaaggtctccatcaccttcgactcctccgtcagctggcccggcaacgaccggctcctgacgcccaacgagttcgaaatcaagcgcaccgtcgacggcgagggctacaacgtggcccagtgcaacatgaccaaggactggttcctggtccagatgctggcccactacaacatcggctaccagggcttctacgtgcccgagggctacaaggaccgcatgtactccttcttccgcaacttccagcccatgagccgccaggtggtggacgaggtcaactacaaggactaccaggccgtcaccctggcctaccagcacaacaactcgggcttcgtcggctacctcgcgcccaccatgcgccagggccagccctaccccgccaactacccctacccgctcatcggcaagagcgccgtcaccagcgtcacccagaaaaagttcctctgcgacagggtcatgtggcgcatccccttctccagcaacttcatgtccatgggcgcgctcaccgacctcggccagaacatgctctatgccaactccgcccacgcgctagacatgaatttcgaagtcgaccccatggatgagtccacccttctctatgttgtcttcgaagtcttcgacgtcgtccgagtgcaccagccccaccgcggcgtcatcgaggccgtctacctgcgcacccccttctcggccggtaacgccaccacctaagctcttgcttcttgcaagccatggccgcgggctccggcgagcaggagctcagggccatcatccgcgacctgggctgcgggccctacttcctgggcaccttcgataagcgcttcccgggattcatggccccgcacaagctggcctgcgccatcgtcaacacggccggccgcgagaccgggggcgagcactggctggccttcgcctggaacccgcgctcgaacacctgctacctcttcgaccccttcgggttctcggacgagcgcctcaagcagatctaccagttcgagtacgagggcctgctgcgccgcagcgccctggccaccgaggaccgctgcgtcaccctggaaaagtccacccagaccgtgcagggtccgcgctcggccgcctgcgggctcttctgctgcatgttcctgcacgccttcgtgcactggcccgaccgccccatggacaagaaccccaccatgaacttgctgacgggggtgcccaacggcatgctccagtcgccccaggtggaacccaccctgcgccgcaaccaggaggcgctctaccgcttcctcaactcccactccgcctactttcgctcccaccgcgcgcgcatcgagaaggccaccgccttcgaccgcatgaatcaagacatgtaaaccgtgtgtgtatgttaaatgtctttaataaacagcactttcatgttacacatgcatctgagatgatttatttagaaatcgaaagggttctgccgggtctcggcatggcccgcgggcagggacacgttgcggaactggtacttggccagccacttgaactcggggatcagcagtttgggcagcggggtgtcggggaaggagtcggtccacagcttccgcgtcagttgcagggcgcccagcaggtcgggcgcggagatcttgaaatcgcagttgggacccgcgttctgcgcgcgggagttgcggtacacggggttgcagcactggaacaccatcagggccgggtgcttcacgctcgccagcaccgtcgcgtcggtgatgctctccacgtcgaggtcctcggcgttggccatcccgaagggggtcatcttgcaggtctgccttcccatggtgggcacgcacccgggcttgtggttgcaatcgcagtgcagggggatcagcatcatctgggcctggtcggcgttcatccccgggtacatggccttcatgaaagcctccaattgcctgaacgcctgctgggccttggctccctcggtgaagaagaccccgcaggacttgctagagaactggttggtggcgcacccggcgtcgtgcacgcagcagcgcgcgtcgttgttggccagctgcaccacgctgcgcccccagcggttctgggtgatcttggcccggtcggggttctccttcagcgcgcgctgcccgttctcgctcgccacatccatctcgatcatgtgctccttctggatcatggtggtcccgtgcaggcaccgcagcttgccctcggcctcggtgcacccgtgcagccacagcgcgcacccggtgcactcccagttcttgtgggcgatctgggaatgcgcgtgcacgaagccctgcaggaagcggcccatcatggtggtcagggtcttgttgctagtgaaggtcagcggaatgccgcggtgctcctcgttgatgtacaggtggcagatgcggcggtacacctcgccctgctcgggcatcagctggaagttggctttcaggtcggtctccacgcggtagcggtccatcagcatagtcatgatttccatacccttctcccaggccgagacgatgggcaggctcatagggttcttcaccatcatcttagcgctagcagccgcggccagggggtcgctctcgtccagggtctcaaagctccgcttgccgtccttctcggtgatccgcaccggggggtagctgaagcccacggccgccagctcctcctcggcctgtctttcgtcctcgctgtcctggctgacgtcctgcaggaccacatgcttggtcttgcggggtttcttcttgggcggcagcggcggcggagatgttggagatggcgagggggagcgcgagttctcgctcaccactactatctcttcctcttcttggtccgaggccacgcggcggtaggtatgtctcttcgggggcagaggcggaggcgacgggctctcgccgccgcgacttggcggatggctggcagagccccttccgcgttcgggggtgcgctcccggcggcgctctgactgacttcctccgcggccggccattgtgttctcctagggaggaacaacaagcatggagactcagccatcgccaacctcgccatctgcccccaccgccgacgagaagcagcagcagcagaatgaaagcttaaccgccccgccgcccagccccgccacctccgacgcggccgtcccagacatgcaagagatggaggaatccatcgagattgacctgggctatgtgacgcccgcggagcacgaggaggagctggcagtgcgcttttcacaagaagagatacaccaagaacagccagagcaggaagcagagaatgagcagagtcaggctgggctcgagcatgacggcgactacctccacctgagcgggggggaggacgcgctcatcaagcatctggcccggcaggccaccatcgtcaaggatgcgctgctcgaccgcaccgaggtgcccctcagcgtggaggagctcagccgcgcctacgagttgaacctcttctcgccgcgcgtgccccccaagcgccagcccaatggcacctgcgagcccaacccgcgcctcaacttctacccggtcttcgcggtgcccgaggccctggccacctaccacatctttttcaagaaccaaaagatccccgtctcctgccgcgccaaccgcacccgcgccgacgcccttttcaacctgggtcccggcgcccgcctacctgatatcgcctccttggaagaggttcccaagatcttcgagggtctgggcagcgacgagactcgggccgcgaacgctctgcaaggagaaggaggagagcatgagcaccacagcgccctggtcgagttggaaggcgacaacgcgcggctggcggtgctcaaacgcacggtcgagctgacccatttcgcctacccggctctgaacctgccccccaaagtcatgagcgcggtcatggaccaggtgctcatcaagcgcgcgtcgcccatctccgaggacgagggcatgcaagactccgaggagggcaagcccgtggtcagcgacgagcagctggcccggtggctgggtcctaatgctagtccccagagtttggaagagcggcgcaaactcatgatggccgtggtcctggtgaccgtggagctggagtgcctgcgccgcttcttcgccgacgcggagaccctgcgcaaggtcgaggagaacctgcactacctcttcaggcacgggttcgtgcgccaggcctgcaagatctccaacgtggagctgaccaacctggtctcctacatgggcatcttgcacgagaaccgcctggggcagaacgtgctgcacaccaccctgcgcggggaggcccggcgcgactacatccgcgactgcgtctacctctacctctgccacacctggcagacgggcatgggcgtgtggcagcagtgtctggaggagcagaacctgaaagagctctgcaagctcctgcagaagaacctcaagggtctgtggaccgggttcgacgagcgcaccaccgcctcggacctggccgacctcattttccccgagcgcctcaggctgacgctgcgcaacggcctgcccgactttatgagccaaagcatgttgcaaaactttcgctctttcatcctcgaacgctccggaatcctgcccgccacctgctccgcgctgccctcggacttcgtgccgctgaccttccgcgagtgccccccgccgctgtggagccactgctacctgctgcgcctggccaactacctggcctaccactcggacgtgatcgaggacgtcagcggcgagggcctgctcgagtgccactgccgctgcaacctctgcacgccgcaccgctccctggcctgcaacccccagctgctgagcgagacccagatcatcggcaccttcgagttgcaagggcccagcgaaggcgagggttcagccgccaaggggggtctgaaactcaccccggggctgtggacctcggcctacttgcgcaagttcgtgcccgaggactaccatcccttcgagatcaggttctacgaggaccaatcccatccgcccaaggccgagctgtcggcctgcgtcatcacccagggggcgatcctggcccaattgcaagccatccagaaatcccgccaagaattcttgctgaaaaagggccgcggggtctacctcgacccccagaccggtgaggagctcaaccccggcttcccccaggatgccccgaggaaacaagaagctgaaagtggagctgccgcccgtggaggatttggaggaagactgggagaacagcagtcaggcagaggaggaggagatggaggaagactgggacagcactcaggcagaggaggacagcctgcaagacagtctggaggaagacgaggaggaggcagaggaggaggtggaagaagcagccgccgccagaccgtcgtcctcggcgggggagaaagcaagcagcacggataccatctccgctccgggtcggggtcccgctcgaccacacagtagatgggacgagaccggacgattcccgaaccccaccacccagaccggtaagaaggagcggcagggatacaagtcctggcgggggcacaaaaacgccatcgtctcctgcttgcaggcctgcgggggcaacatctccttcacccggcgctacctgctcttccaccgcggggtgaactttccccgcaacatcttgcattactaccgtcacctccacagcccctactacttccaagaagaggcagcagcagcagaaaaagaccagcagaaaaccagcagctagaaaatccacagcggcggcagcaggtggactgaggatcgcggcgaacgagccggcgcaaacccgggagctgaggaaccggatctttcccaccctctatgccatcttccagcagagtcgggggcaggagcaggaactgaaagtcaagaaccgttctctgcgctcgctcacccgcagttgtctgtatcacaagagcgaagaccaacttcagcgcactctcgaggacgccgaggctctcttcaacaagtactgcgcgctcactcttaaagagtagcccgcgcccgcccagtcgcagaaaaaggcgggaattacgtcacctgtgcccttcgccctagccgcctccacccatcatcatgagcaaagagattcccacgccttacatgtggagctaccagccccagatgggcctggccgccggtgccgcccaggactactccacccgcatgaattggctcagcgccgggcccgcgatgatctcacgggtgaatgacatccgcgcccaccgaaaccagatactcctagaacagtcagcgctcaccgccacgccccgcaatcacctcaatccgcgtaattggcccgccgccctggtgtaccaggaaattccccagcccacgaccgtactacttccgcgagacgcccaggccgaagtccagctgactaactcaggtgtccagctggcgggcggcgccaccctgtgtcgtcaccgccccgctcagggtataaagcggctggtgatccggggcagaggcacacagctcaacgacgaggtggtgagctcttcgctgggtctgcgacctgacggagtcttccaactcgccggatcggggagatcttccttcacgcctcgtcaggccgtcctgactttggagagttcgtcctcgcagccccgctcgggtggcatcggcactctccagttcgtggaggagttcactccctcggtctacttcaaccccttctccggctcccccggccactacccggacgagttcatcccgaacttcgacgccatcagcgagtcggtggacggctacgattgaatgtcccatggtggcgcagctgacctagctcggcttcgacacctggaccactgccgccgcttccgctgcttcgctcgggatctcgccgagtttgcctactttgagctgcccgaggagcaccctcagggcccggcccacggagtgcggatcgtcgtcgaagggggcctcgactcccacctgcttcggatcttcagccagcgtccgatcctggtcgagcgcgagcaaggacagacccttctgactctgtactgcatctgcaaccaccccggcctgcatgaaagtctttgttgtctgctgtgtactgagtataataaaagctgagatcagcgactactccggacttccgtgtgttcctgaatccatcaaccagtctttgttcttcaccgggaacgagaccgagctccagctccagtgtaagccccacaagaagtacctcacctggctgttccagggctccccgatcgccgttgtcaaccactgcgacaacgacggagtcctgctgagcggccctgccaaccttactttttccacccgcagaagcaagctccagctcttccaacccttcctccccgggacctatcagtgcgtctcgggaccctgccatcacaccttccacctgatcccgaataccacagcgtcgctccccgctactaacaaccaaactaacctccaccaacgccaccgtcgcgacctttctgaatctaatactaccacccacaccggaggtgagctccgaggtcaaccaacctctgggatttactacggcccctgggaggtggttgggttaatagcgctaggcctagttgcgggtgggcttttggttctctgctacctatacctcccttgctgttcgtacttagtggtgctgtgttgctggtttaagaaatggggaagatcaccctagtgagctgcggtgcgctggtggcggtgttgctttcgattgtgggactgggcggtgcggctgtagtgaaggagaaggccgatccctgcttgcatttcaatcccaacaaatgccagctgagttttcagcccgatggcaatcggtgcgcggtactgatcaagtgcggatgggaatgcgagaacgtgagaatcgagtacaataacaagactcggaacaatactctcgcgtccgtgtggcagcccggggaccccgagtggtacaccgtctctgtccccggtgctgacggctccccgcgcaccgtgaataatactttcatttttgcgcacatgtgcgacacggtcatgtggatgagcaagcagtacgatatgtggccccccacgaaggagaacatcgtggtcttctccatcgcttacagcctgtgcacggcgctaatcaccgctatcgtgtgcctgagcattcacatgctcatcgctattcgccccagaaataatgccgaaaaagaaaaacagccataacgttttttttcacacctttttcagaccatggcctctgttaaatttttgcttttatttgccagtctcattgccgtcattcatggaatgagtaatgagaaaattactatttacactggcactaatcacacattgaaaggtccagaaaaagccacagaagtttcatggtattgttattttaatgaatcagatgtatctactgaactctgtggaaacaataacaaaaaaaatgagagcattactctcatcaagtttcaatgtggatctgacttaaccctaattaacatcactagagactatgtaggtatgtattatggaactacagcaggcatttcggacatggaattttatcaagtttctgtgtctgaacccaccacgcctagaatgaccacaaccacaaaaactacacctgttaccactatgcagctcactaccaataacatttttgccatgcgtcaaatggtcaacaatagcactcaacccaccccacccagtgaggaaattcccaaatccatgattggcattattgttgctgtagtggtgtgcatgttgatcatcgccttgtgcatggtgtactatgccttctgctacagaaagcacagactgaacgacaagctggaacacttactaagtgttgaattttaattttttagaaccatgaagatcctaggccttttaattttttctatcattacctctgctctatgcaattctgacaatgaggacgttactgtcgttgtcggatcaaattatacactgaaaggtccagcgaagggtatgctttcgtggtattgctattttggatctgacactacagaaactgaattatgcaatcttaagaatggcaaaattcaaaattctaaaattaacaattatatatgcaatggtactgatctgatactcctcaatatcacgaaatcatatgctggcagttacacctgccctggagatgatgctgacagtatgattttttacaaagtaactgttgttgatcccactactccacctccacccaccacaactactcacaccacacacacagatcaaaccgcagcagaggaggcagcaaagttagccttgcaggtccaagacagttcatttgttggcattacccctacacctgatcagcggtgtccggggctgctagtcagcggcattgtcggtgtgctttcgggattagcagtcataatcatctgcatgttcatttttgcttgctgctatagaaggctttaccgacaaaaatcagacccactgctgaacctctatgtttaattttttccagagtcatgaaggcagttagcgctctagttttttgttctttgattggcattgttttttgcaatcctattcctaaagttagctttattaaagatgtgaatgttactgaggggggcaatgtgacactggtaggtgtagagggtgctgaaaacaccacctggacaaaataccacctcaatgggtggaaagatatttgcaattggagtgtattagtttatacatgtgagggagttaatcttaccattgtcaatgccacctcagctcaaaatggtagaattcaaggacaaagtgtcagtgtatctaatgggtattttacccaacatacttttatctatgacgttaaagtcataccactgcctacgcctagcccacctagcactaccacacagacaacccacactacacagacaaccacatacagtacattaaatcagcctaccaccactacagcagcagaggttgccagctcgtctggggtccgagtggcatttttgatgtgggccccatctagcagtcccactgctagtaccaatgagcagactactgaatttttgtccactgtcgagagccacaccacagctacctccagtgccttctctagcaccgccaatctctcctcgctttcctctacaccaatcagtcccgctactactcctagccccgctcctcttcccactcccctgaagcaaacagacggcggcatgcaatggcagatcaccctgctcattgtgatcgggttggtcatcctggccgtgttgctctactacatcttctgccgccgcattcccaacgcgcaccgcaagccggtctacaagcccatcattgtcgggcagccggagccgcttcaggtggaagggggtctaaggaatcttctcttctcttttacagtatggtgattgaactatgattcctagacaattcttgatcactattcttatctgcctcctccaagtctgtgccaccctcgctctggtggccaacgccagtccagactgtattgggcccttcgcctcctacgtgctctttgccttcaccacctgcatctgctgctgtagcatagtctgcctgcttatcaccttcttccagttcattgactggatctttgtgcgcatcgcctacctgcgccaccacccccagtaccgcgaccagcgagtggcgcggctgctcaggctcctctgataagcatgcgggctctgctacttctcgcgcttctgctgttagtgctcccccgtcccgtcgacccccggtcccccacccagtcccccgaggaggtccgcaaatgcaaattccaagaaccctggaaattcctcaaatgctaccgccaaaaatcagacatgcatcccagctggatcatgatcattgggatcgtgaacattctggcctgcaccctcatctcctttgtgatttacccctgctttgactttggttggaactcgccagaggcgctctatctcccgcctgaacctgacacaccaccacagcaacctcaggcacacgcactaccaccactacagcctaggccacaatacatgcccatattagactatgaggccgagccacagcgacccatgctccccgctattagttacttcaatctaaccggcggagatgactgacccactggccaacaacaacgtcaacgaccttctcctggacatggacggccgcgcctcggagcagcgactcgcccaacttcgcattcgccagcagcaggagagagccgtcaaggagctgcaggatgcggtggccatccaccagtgcaagagaggcatcttctgcctggtgaaacaggccaagatctcctacgaggtcactccaaacgaccatcgcctctcctacgagctcctgcagcagcgccagaagttcacctgcctggtcggagtcaaccccatcgtcatcacccagcagtctggcgataccaaggggtgcatccactgctcctgcgactcccccgactgcgtccacactctgatcaagaccctctgcggcctccgcgacctcctccccatgaactaatcacccccttatccagtgaaataaagatcatattgatgatgattttacagaaataaaaaataatcatttgatttgaaataaagatacaatcatattgatgatttgagtttaacaaaaaaataaagaatcacttacttgaaatctgataccaggtctctgtccatgttttctgccaacaccacttcactcccctcttcccagctctggtactgcaggccccggcgggctgcaaacttcctccacacgctgaaggggatgtcaaattcctcctgtccctcaatcttcattttatcttctatcagatgtccaaaaagcgcgtccgggtggatgatgacttcgaccccgtctacccctacgatgcagacaacgcaccgaccgtgcccttcatcaacccccccttcgtctcttcagatggattccaagagaagcccctgggggtgttgtccctgcgactggccgaccccgtcaccaccaagaacggggaaatcaccctcaagctgggagagggggtggacctcgattcctcgggaaaactcatctccaacacggccaccaaggccgccgcccctctcagtttttccaacaacaccatttcccttaacatggatcaccccttttacactaaagatggaaaattatccttacaagtttctccaccattaaatatactgagaacaagcattctaaacacactagctttaggttttggatcaggtttaggactccgtggctctgccttggcagtacagttagtctctccacttacatttgatactgatggaaacataaagcttaccttagacagaggtttgcatgttacaacaggagatgcaattgaaagcaacataagctgggctaaaggtttaaaatttgaagatggagccatagcaaccaacattggaaatgggttagagtttggaagcagtagtacagaaacaggtgttgatgatgcttacccaatccaagttaaacttggatctggccttagctttgacagtacaggagccataatggctggtaacaaagaagacgataaactcactttgtggacaacacctgatccatcaccaaactgtcaaatactcgcagaaaatgatgcaaaactaacactttgcttgactaaatgtggtagtcaaatactggccactgtgtcagtcttagttgtaggaagtggaaacctaaaccccattactggcaccgtaagcagtgctcaggtgtttctacgttttgatgcaaacggtgttcttttaacagaacattctacactaaaaaaatactgggggtataggcagggagatagcatagatggcactccatataccaatgctgtaggattcatgcccaatttaaaagcttatccaaagtcacaaagttctactactaaaaataatatagtagggcaagtatacatgaatggagatgtttcaaaacctatgcttctcactataaccctcaatggtactgatgacagcaacagtacatattcaatgtcattttcatacacctggactaatggaagctatgttggagcaacatttggggctaactcttataccttctcatacatcgcccaagaatgaacactgtatcccaccctgcatgccaacccttcccaccccactctgtggaacaaactctgaaacacaaaataaaataaagttcaagtgttttattgattcaacagttttacaggattcgagcagttatttttcctccaccctcccaggacatggaatacaccaccctctccccccgcacagccttgaacatctgaatgccattggtgatggacatgcttttggtctccacgttccacacagtttcagagcgagccagtctcgggtcggtcagggagatgaaaccctccgggcactcccgcatctgcacctcacagctcaacagctgaggattgtcctcggtggtcgggatcacggttatctggaagaagcagaagagcggcggtgggaatcatagtccgcgaacgggatcggccggtggtgtcgcatcaggccccgcagcagtcgctgccgccgccgctccgtcaagctgctgctcagggggtccgggtccagggactccctcagcatgatgcccacggccctcagcatcagtcgtctggtgcggcgggcgcagcagcgcatgcggatctcgctcaggtcgctgcagtacgtgcaacacagaaccaccaggttgttcaacagtccatagttcaacacgctccagccgaaactcatcgcgggaaggatgctacccacgtggccgtcgtaccagatcctcaggtaaatcaagtggtgccccctccagaacacgctgcccacgtacatgatctccttgggcatgtggcggttcaccacctcccggtaccacatcaccctctggttgaacatgcagccccggatgatcctgcggaaccacagggccagcaccgccccgcccgccatgcagcgaagagaccccgggtcccggcaatggcaatggaggacccaccgctcgtacccgtggatcatctgggagctgaacaagtctatgttggcacagcacaggcatatgctcatgcatctcttcagcactctcaactcctcgggggtcaaaaccatatcccagggcacggggaactcttgcaggacagcgaaccccgcagaacagggcaatcctcgcacagaacttacattgtgcatggacagggtatcgcaatcaggcagcaccgggtgatcctccaccagagaagcgcgggtctcggtctcctcacagcgtggtaagggggccggccgatacgggtgatggcgggacgcggctgatcgtgttcgcgaccgtgtcatgatgcagttgctttcggacattttcgtacttgctgtagcagaacctggtccgggcgctgcacaccgatcgccggcggcggtctcggcgcttggaacgctcggtgttgaaattgtaaaacagccactctctcagaccgtgcagcagatctagggcctcaggagtgatgaagatcccatcatgcctgatggctctgatcacatcgaccaccgtggaatgggccagacccagccagatgatgcaattttgttgggtttcggtgacggcgggggagggaagaacaggaagaaccatgattaacttttaatccaaacggtctcggagtacttcaaaatgaagatcgcggagatggcacctctcgcccccgctgtgttggtggaaaataacagccaggtcaaaggtgatacggttctcgagatgttccacggtggcttccagcaaagcctccacgcgcacatccagaaacaagacaatagcgaaagcgggagggttctctaattcctcaatcatcatgttacactcctgcaccatccccagataattttcatttttccagccttgaatgattcgaactagttcctgaggtaaatccaagccagccatgataaagagctcgcgcagagcgccctccaccggcattcttaagcacaccctcataattccaagatattctgctcctggttcacctgcagcagattgacaagcggaatatcaaaatctctgccgcgatccctgagctcctccctcagcaataactgtaagtactctttcatatcctctccgaaatttttagccataggaccaccaggaataagattagggcaagccacagtacagataaaccgaagtcctccccagtgagcattgccaaatgcaagactgctataagcatgctggctagacccggtgatatcttccagataactggacagaaaatcgcccaggcaatttttaagaaaatcaacaaaagaaaaatcctccaggtggacgtttagagcctcgggaacaacgatgaagtaaatgcaagcggtgcgttccagcatggttagttagctgatctgtagaaaaaacaaaaatgaacattaaaccatgctagcctggcgaacaggtgggtaaatcgttctctccagcaccaggcaggccacggggtctccggcgcgaccctcgtaaaaattgtcgctatgattgaaaaccatcacagagagacgttcccggtggccggcgtgaatgattcgacaagatgaatacacccccggaacattggcgtccgcgagtgaaaaaaagcgcccgaggaagcaataaggcactacaatgctcagtctcaagtccagcaaagcgatgccatgcggatgaagcacaaaattctcaggtgcgtacaaaatgtaattactcccctcctgcacaggcagcaaagcccccgatccctccaggtacacatacaaagcctcagcgtccatagcttaccgagcagcagcacacaacaggcgcaagagtcagagaaaggctgagctctaacctgtccacccgctctctgctcaatatatagcccagatctacactgacgtaaaggccaaagtctaaaaatacccgccaaataatcacacacgcccagcacacgcccagaaaccggtgacacactcaaaaaaatacgcgcacttcctcaaacgcccaaaactgccgtcatttccgggttcccacgctacgtcatcaaaacacgactttcaaattccgtcgaccgttaaaaacgtcacccgccccgcccctaacggtcgcccgtctctcagccaatcagcgccccgcatccccaaattcaaacacctcatttgcatattaacgcgcacaaaaagtttgaggtatattattgatgatgg

SEQ ID NO: 2 - DNA, 31588 bp, synthetic construct
  misc_feature 1..31588: note = Description of Artificial Sequence: Synthetic polynucleotide
  source 1..31588: mol_type = other DNA
ccatcttcaataatatacctcaaactttttgtgcgcgttaatatgcaaatgaggcgtttgaatttggggaggaagggcggtgattggtcgagggatgagcgaccgttaggggcggggcgagtgacgttttgatgacgtggttgcgaggaggagccagtttgcaagttctcgtgggaaaagtgacgtcaaacgaggtgtggtttgaacacggaaatactcaattttcccgcgctctctgacaggaaatgaggtgtttctgggcggatgcaagtgaaaacgggccattttcgcgcgaaaactgaatgaggaagtgaaaatctgagtaatttcgcgtttatggcagggaggagtatttgccgagggccgagtagactttgaccgattacgtgggggtttcgattaccgtgtttttcacctaaatttccgcgtacggtgtcaaagtccggtgtttttacgtaggtgtcagctgatcgccagggtatttaaacctgcgctctccagtcaagaggccactcttgagtgccagcgagaagagttttctcctccgcgccgcgagtcagatctacactttgaaagtagggataacagggtaatgacattgattattgactagttgttaatagtaatcaattacggggtcattagttcatagcccatatatggagttccgcgttacataacttacggtaaatggcccgcctggctgaccgcccaacgacccccgcccattgacgtcaataatgacgtatgttcccatagtaacgccaatagggactttccattgacgtcaatgggtggagtatttacggtaaactgcccacttggcagtacatcaagtgtatcatatgccaagtccgccccctattgacgtcaatgacggtaaatggcccgcctggcattatgcccagtacatgaccttacgggactttcctacttggcagtacatctacgtattagtcatcgctattaccatggtgatgcggttttggcagtacaccaatgggcgtggatagcggtttgactcacggggatttccaagtctccaccccattgacgtcaatgggagtttgttttggcaccaaaatcaacgggactttccaaaatgtcgtaataaccccgccccgttgacgcaaatgggcggtaggcgtgtacggtgggaggtctatataagcagagctcgtttagtgaaccgtcagatcgcctggaacgccatccacgctgttttgacctccatagaagacagcgatcgcgccaccatggccgggatgttccaggcactgtccgaaggctgcacaccctatgatattaaccagatgctgaatgtcctgggagaccaccaggtctctggcctggagcagctggagagcatcatcaacttcgagaagctgaccgagtggacaagctccaatgtgatgcctatcctgtccccactgaccaagggcatcctgggcttcgtgtttaccctgacagtgccttctgagcggggcctgtcttgcatcagcgaggcagacgcaaccacaccagagtccgccaatctgggcgaggagatcctgtctcagctgtacctgtggccccgggtgacatatcactccccttcttacgcctatcaccagttcgagcggagagccaagtacaagagacacttcccaggctttggccagtctctgctgttcggctaccccgtgtacgtgttcggcgattgcgtgcagggcgactgggatgccatccggtttagatactgcgcaccacctggatatgcactgctgaggtgtaacgacaccaattattccgccctgctggcagtgggcgccctggagggccctcgcaatcaggattggctgggcgtgccaaggcagctggtgacacgcatgcaggccatccagaacgcaggcctgtgcaccctggtggcaatgctggaggagacaatcttctggctgcaggcctttctgatggccctgaccgacagcggccccaagacaaacatcatcgtggattcccagtacgtgatgggcatctccaagccttctttccaggagtttgtggactgggagaacgtgagcccagagctgaattccaccgatcagccattctggcaggcaggaatcctggcaaggaacctggtgcctatggtggccacagtgcagggccagaatctgaagtaccagggccagagcctggtcatcagcgcctccatcatcgtgtttaacctgctggagctggagggcgactatcgggacgatggcaacgtgtgggtgcacaccccactgagccccagaacactgaacgcctgggtgaaggccgtggaggagaagaagggcatcccagtgcacctggagctggcctccatgaccaatatggagctgatgtctagcatcgtgcaccagcaggtgaggacatacggacccgtgttcatgtgcctgggaggcctgctgaccatggtggcaggagccgtgtggctgacagtgcgggtgctggagctgttcagagccgcccagctggccaacgatgtggtgctgcagatcatggagctgtgcggagcagcctttcgccaggtgtgccacaccacagtgccatggcccaatgcctccctgacccccaagtggaacaatgagacaacacagcctcagatcgccaactgtagcgtgtacgacttcttcgtgtggctgcactactatagcgtgagggataccctgtggccccgcgtgacataccacatgaataagtacgcctatcacatgctggagaggcgcgccaagtataagagaggccctggcccaggcgcaaagtttgtggcagcatggaccctgaaggccgccgccggccccggccccggccagtatatcaaggctaacagtaagttcattggaatcacagagctgggacccggacctggataatgagtttaaactcccatttaaatgtgagggttaatgcttcgagcagacatgataagatacattgatgagtttggacaaaccacaactagaatgcagtgaaaaaaatgctttatttgtgaaatttgtgatgctattgctttatttgtaaccattataagctgcaataaacaagttaacaacaacaattgcattcattttatgtttcaggttcagggggagatgtgggaggttttttaaagcaagtaaaacctctacaaatgtggtaaaataactataacggtcctaaggtagcgagtgagtagtgttctggggcgggggaggacctgcatgagggccagaataactgaaatctgtgcttttctgtgtgttgcagcagcatgagcggaagcggctcctttgagggaggggtattcagcccttatctgacggggcgtctcccctcctgggcgggagtgcgtcagaatgtgatgggatccacggtggacggccggcccgtgcagcccgcgaactcttcaaccctgacctatgcaaccctgagctcttcgtcgttggacgcagctgccgccgcagctgctgcatctgccgccagcgccgtgcgcggaatggccatgggcgccggctactacggcactctggtggccaactcgagttccaccaataatcccgccagcctgaacgaggagaagctgttgctgctgatggcccagctcgaggccttgacccagcgcctgggcgagctgacccagcaggtggctcagctgcaggagcagacgcgggccgcggttgccacggtgaaatccaaataaaaaatgaatcaataaataaacggagacggttgttgattttaacacagagtctgaatctttatttgatttttcgcgcgcggtaggccctggaccaccggtctcgatcattgagcacccggtggatcttttccaggacccggtagaggtgggcttggatgttgaggtacatgggcatgagcccgtcccgggggtggaggtagctccattgcagggcctcgtgctcgggggtggtgttgtaaatcacccagtcatagcaggggcgcagggcatggtgttgcacaatatctttgaggaggagactgatggccacgggcagccctttggtgtaggtgtttacaaatctgttgagctgggagggatgcatgcggggggagatgaggtgcatcttggcctggatcttgagattggcgatgttaccgcccagatcccgcctggggttcatgttgtgcaggaccaccagcacggtgtatccggtgcacttggggaatttatcatgcaacttggaagggaaggcgtgaaagaatttggcgacgcctttgtgcccgcccaggttttccatgcactcatccatgatgatggcgatgggcccgtgggcggcggcctgggcaaagacgtttcgggggtcggacacatcatagttgtggtcctgggtgaggtcatcataggccattttaatgaatttggggcggagggtgccggactgggggacaaaggtaccctcgatcccgggggcgtagttcccctcacagatctgcatctcccaggctttgagctcggagggggggatcatgtccacctgcggggcgataaagaacacggtttccggggcgggggagatgagctgggccgaaagcaagttccggagcagctgggacttgccgcagccggtggggccgtagatgaccccgatgaccggctgcaggtggtagttgagggagagacagctgccgtcctcccggaggaggggggccacctcgttcatcatctcgcgcacgtgcatgttctcgcgcaccagttccgccaggaggcgctctccccccagggataggagctcctggagcgaggcgaagtttttcagcggcttgagtccgtcggccatgggcattttggagagggtttgttgcaagagttccaggcggtcccagagctcggtgatgtgctctacggcatctcgatccagcagacctcctcgtttcgcgggttgggacggctgcgggagtagggcaccagacgatgggcgtccagcgcagccagggtccggtccttccagggtcgcagcgtccgcgtcagggtggtctccgtcacggtgaaggggtgcgcgccgggctgggcgcttgcgagggtgcgcttcaggctcatccggctggtcgaaaaccgctcccgatcggcgccctgcgcgtcggccaggtagcaattgaccatgagttcgtagttgagcgcctcggccgcgtggcctttggcgcggagcttacctttggaagtctgcccgcaggcgggacagaggagggacttgagggcgtagagcttgggggcgaggaagacggactcgggggcgtaggcgtccgcgccgcagtgggcgcagacggtctcgcactccacgagccaggtgaggtcgggctggtcggggtcaaaaaccagtttcccgccgttctttttgatgcgtttcttacctttggtctccatgagctcgtgtccccgctgggtgacaaagaggctgtccgtgtccccgtagaccgactttatgggccggtcctcgagcggtgtgccgcggtcctcctcgtagaggaaccccgcccactccgagacgaaagcccgggtccaggccagcacgaaggaggccacgtgggacgggtagcggtcgttgtccaccagcgggtccaccttttccagggtatgcaaacacatgtccccctcgtccacatccaggaaggtgattggcttgtaagtgtaggccacgtgaccgggggtcccggccgggggggtataaaagggtgcgggtccctgctcgtcctcactgtcttccggatcgctgtccaggagcgccagctgttggggtaggtattccctctcgaaggcgggcatgacctcggcactcaggttgtcagtttctagaaacgaggaggatttgatattgacggtgccggcggagatgcctttcaagagcccctcgtccatctggtcagaaaagacgatctttttgttgtcgagcttggtggcgaaggagccgtagagggcgttggagaggagcttggcgatggagcgcatggtctggtttttttccttgtcggcgcgctccttggcggcgatgttgagctgcacgtactcgcgcgccacgcacttccattcggggaagacggtggtcagctcgtcgggcacgattctgacctgccagccccgattatgcagggtgatgaggtccacactggtggccacctcgccgcgcaggggctcattagtccagcagaggcgtccgcccttgcgcgagcagaaggggggcagggggtccagcatgacctcgtcgggggggtcggcatcgatggtgaagatgccgggcaggaggtcggggtcaaagtagctgatggaagtggccagatcgtccagggcagcttgccattcgcgcacggccagcgcgcgctcgtagggactgaggggcgtgccccagggcatgggatgggtaagcgcggaggcgtacatgccgcagatgtcgtagacgtagaggggctcctcgaggatgccgatgtaggtggggtagcagcgccccccgcggatgctggcgcgcacgtagtcatacagctcgtgcgagggggcgaggagccccgggcccaggttggtgcgactgggcttttcggcgcggtagacgatctggcggaaaatggcatgcgagttggaggagatggtgggcctttggaagatgttgaagtgggcgtggggcagtccgaccgagtcgcggatgaagtgggcgtaggagtcttgcagcttggcgacgagctcggcggtgactaggacgtccagagcgcagtagtcgagggtctcctggatgatgtcatacttgagctgtcccttttgtttccacagctcgcggttgagaaggaactcttcgcggtccttccagtactcttcgagggggaacccgtcctgatctgcacggtaagagcctagcatgtagaactggttgacggccttgtaggcgcagcagcccttctccacggggagggcgtaggcctgggcggccttgcgcagggaggtgtgcgtgagggcgaaagtgtccctgaccatgaccttgaggaactggtgcttgaagtcgatatcgtcgcagcccccctgctcccagagctggaagtccgtgcgcttcttgtaggcggggttgggcaaagcgaaagtaacatcgttgaagaggatcttgcccgcgcggggcataaagttgcgagtgatgcggaaaggttggggcacctcggcccggttgttgatgacctgggcggcgagcacgatctcgtcgaagccgttgatgttgtggcccacgatgtagagttccacgaatcgcggacggcccttgacgtggggcagtttcttgagctcctcgtaggtgagctcgtcggggtcgctgagcccgtgctgctcgagcgcccagtcggcgagatgggggttggcgcggaggaaggaagtccagagatccacggccagggcggtttgcagacggtcccggtactgacggaactgctgcccgacggccattttttcgggggtgacgcagtagaaggtgcgggggtccccgtgccagcgatcccatttgagctggagggcgagatcgagggcgagctcgacgagccggtcgtccccggagagtttcatgaccagcatgaaggggacgagctgcttgccgaaggaccccatccaggtgtaggtttccacatcgtaggtgaggaagagcctttcggtgcgaggatgcgagccgatggggaagaactggatctcctgccaccaattggaggaatggctgttgatgtgatggaagtagaaatgccgacggcgcgccgaacactcgtgcttgtgtttatacaagcggccacagtgctcgcaacgctgcacgggatgcacgtgctgcacgagctgtacctgagttcctttgacgaggaatttcagtgggaagtggagtcgtggcgcctgcatctcgtgctgtactacgtcgtggtggtcggcctggccctcttctgcctcgatggtggtcatgctgacgagcccgcgcgggaggcaggtccagacctcggcgcgagcgggtcggagagcgaggacgagggcgcgcaggccggagctgtccagggtcctgagacgctgcggagtcaggtcagtgggcagcggcggcgcgcggttgacttgcaggagtttttccagggcgcgcgggaggtccagatggtacttgatctccaccgcgccattggtggcgacgtcgatggcttgcagggtcccgtgcccctggggtgtgaccaccgtcccccgtttcttcttgggcggctggggcgacgggggcggtgcctcttccatggttagaagcggcggcgaggacgcgcgccgggcggcaggggcggctcggggcccggaggcaggggcggcaggggcacgtcggcgccgcgcgcgggtaggttctggtactgcgcccggagaagactggcgtgagcgacgacgcgacggttgacgtcctggatctgacgcctctgggtgaaggccacgggacccgtgagtttgaacctgaaagagagttcgacagaatcaatctcggtatcgttgacggcggcctgccgcaggatctcttgcacgtcgcccgagttgtcctggtaggcgatctcggtcatgaactgctcgatctcctcctcttgaaggtctccgcggccggcgcgctccacggtggccgcgaggtcgttggagatgcggcccatgagctgcgagaaggcgttcatgcccgcctcgttccagacgcggctgtagaccacgacgccctcgggatcgcgggcgcgcatgaccacctgggcgaggttgagctccacgtggcgcgtgaagaccgcgtagttgcagaggcgctggtagaggtagttgagcgtggtggcgatgtgctcggtgacgaagaaatacatgatccagcggcggagcggcatctcgctgacgtcgcccagcgcctccaaacgttccatggcctcgtaaaagtccacggcgaagttgaaaaactgggagttgcgcgccgagacggtcaactcctcctccagaagacggatgagctcggcgatggtggcgcgcacctcgcgctcgaaggcccccgggagttcctccacttcctcttcttcctcctccactaacatctcttctacttcctcctcaggcggcagtggtggcgggggagggggcctgcgtcgccggcggcgcacgggcagacggtcgatgaagcgctcgatggtctcgccgcgccggcgtcgcatggtctcggtgacggcgcgcccgtcctcgcggggccgcagcgtgaagacgccgccgcgcatctccaggtggccgggggggtccccgttgggcagggagagggcgctgacgatgcatcttatcaattgccccgtagggactccgcgcaaggacctgagcgtctcgagatccacgggatctgaaaaccgctgaacgaaggcttcgagccagtcgcagtcgcaaggtaggctgagcacggtttcttctggcgggtcatgttggttgggagcggggcgggcgatgctgctggtgatgaagttgaaataggcggttctgagacggcggatggtggcgaggagcaccaggtctttgggcccggcttgctggatgcgcagacggtcggccatgccccaggcgtggtcctgacacctggccaggtccttgtagtagtcctgcatgagccgctccacgggcacctcctcctcgcccgcgcggccgtgcatgcgcgtgagcccgaagccgcgctggggctggacgagcgccaggtcggcgacgacgcgctcggcgaggatggcttgctggatctgggtgagggtggtctggaagtcatcaaagtcgacgaagcggtggtaggctccggtgttgatggtgtaggagcagttggccatgacggaccagttgacggtctggtggcccggacgcacgagctcgtggtacttgaggcgcgagtaggcgcgcgtgtcgaagatgtagtcgttgcaggtgcgcaccaggtactggtagccgatgaggaagtgcggcggcggctggcggtagagcggccatcgctcggtggcgggggcgccgggcgcgaggtcctcgagcatggtgcggtggtagccgtagatgtacctggacatccaggtgatgccggcggcggtggtggaggcgcgcgggaactcgcggacgcggttccagatgttgcgcagcggcaggaagtagttcatggtgggcacggtctggcccgtgaggcgcgcgcagtcgtggatgctctatacgggcaaaaacgaaagcggtcagcggctcgactccgtggcctggaggctaagcgaacgggttgggctgcgcgtgtaccccggttcgaatctcgaatcaggctggagccgcagctaacgtggtattggcactcccgtctcgacccaagcctgcaccaaccctccaggatacggaggcgggtcgttttgcaacttttttttggaggccggatgagactagtaagcgcggaaagcggccgaccgcgatggctcgctgccgtagtctggagaagaatcgccagggttgcgttgcggtgtgccccggttcgaggccggccggattccgcggctaacgagggcgtggctgccccgtcgtttccaagaccccatagccagccgacttctccagttacggagcgagcccctcttttgttttgtttgtttttgccagatgcatcccgtactgcggcagatgcgcccccaccaccctccaccgcaacaacagccccctccacagccggcgcttctgcccccgccccagcagcaacttccagccacgaccgccgcggccgccgtgagcggggctggacagagttatgatcaccagctggccttggaagagggcgaggggctggcgcgcctgggggcgtcgtcgccggagcggcacccgcgcgtgcagatgaaaagggacgctcgcgaggcctacgtgcccaagcagaacctgttcagagacaggagcggcgaggagcccgaggagatgcgcgcggcccggttccacgcggggcgggagctgcggcgcggcctggaccgaaagagggtgctgagggacgaggatttcgaggcggacgagctgacggggatcagccccgcgcgcgcgcacgtggccgcggccaacctggtcacggcgtacgagcagaccgtgaaggaggagagcaacttccaaaaatccttcaacaaccacgtgcgcaccctgatcgcgcgcgaggaggtgaccctgggcctgatgcacctgtgggacctgctggaggccatcgtgcagaaccccaccagcaagccgctgacggcgcagctgttcctggtggtgcagcatagtcgggacaacgaagcgttcagggaggcgctgctgaatatcaccgagcccgagggccgctggctcctggacctggtgaacattctgcagagcatcgtggtgcaggagcgcgggctgccgctgtccgagaagctggcggccatcaacttctcggtgctgagtttgggcaagtactacgctaggaagatctacaagaccccgtacgtgcccatagacaaggaggtgaagatcgacgggttttacatgcgcatgaccctgaaagtgctgaccctgagcgacgatctgggggtgtaccgcaacgacaggatgcaccgtgcggtgagcgccagcaggcggcgcgagctgagcgaccaggagctgatgcatagtctgcagcgggccctgaccggggccgggaccgagggggagagctactttgacatgggcgcggacctgcactggcagcccagccgccgggccttggaggcggcggcaggaccctacgtagaagaggtggacgatgaggtggacgaggagggcgagtacctggaagactgatggcgcgaccgtatttttgctagatgcaacaacaacagccacctcctgatcccgcgatgcgggcggcgctgcagagccagccgtccggcattaactcctcggacgattggacccaggccatgcaacgcatcatggcgctgacgacccgcaaccccgaagcctttagacagcagccccaggccaaccggctctcggccatcctggaggccgtggtgccctcgcgctccaaccccacgcacgagaaggtcctggccatcgtgaacgcgctggtggagaacaaggccatccgcggcgacgaggccggcctggtgtacaacgcgctgctggagcgcgtggcccgctacaacagcaccaacgtgcagaccaacctggaccgcatggtgaccgacgtgcgcgaggccgtggcccagcgcgagcggttccaccgcgagtccaacctgggatccatggtggcgctgaacgccttcctcagcacccagcccgccaacgtgccccggggccaggaggactacaccaacttcatcagcgccctgcgcctgatggtgaccgaggtgccccagagcgaggtgtaccagtccgggccggactacttcttccagaccagtcgccagggcttgcagaccgtgaacctgagccaggctttcaagaacttgcagggcctgtggggcgtgcaggccccggtcggggaccgcgcgacggtgtcgagcctgctgacgccgaactcgcgcctgctgctgctgctggtggcccccttcacggacagcggcagcatcaaccgcaactcgtacctgggctacctgattaacctgtaccgcgaggccatcggccaggcgcacgtggacgagcagacctaccaggagatcacccacgtgagccgcgccctgggccaggacgacccgggcaacctggaagccaccctgaactttttgctgaccaaccggtcgcagaagatcccgccccagtacgcgctcagcaccgaggaggagcgcatcctgcgttacgtgcagcagagcgtgggcctgttcctgatgcaggagggggccacccccagcgccgcgctcgacatgaccgcgcgcaacatggagcccagcatgtacgccagcaaccgcccgttcatcaataaactgatggactacttgcatcgggcggccgccatgaactctgactatttcaccaacgccatcctgaatccccactggctcccgccgccggggttctacacgggcgagtacgacatgcccgaccccaatgacgggttcctgtgggacgatgtggacagcagcgtgttctccccccgaccgggtgctaacgagcgccccttgtggaagaaggaaggcagcgaccgacgcccgtcctcggcgctgtccggccgcgagggtgctgccgcggcggtgcccgaggccgccagtcctttcccgagcttgcccttctcgctgaacagtatccgcagcagcgagctgggcaggatcacgcgcccgcgcttgctgggcgaagaggagtacttgaatgactcgctgttgagacccgagcgggagaagaacttccccaataacgggatagaaagcctggtggacaagatgagccgctggaagacgtatgcgcaggagcacagggacgatccccgggcgtcgcagggggccacgagccggggcagcgccgcccgtaaacgccggtggcacgacaggcagcggggacagatgtgggacgatgaggactccgccgacgacagcagcgtgttggacttgggtgggagtggtaacccgttcgctcacctgcgcccccgtatcgggcgcatgatgtaagagaaaccgaaaataaatgatactcaccaaggccatggcgaccagcgtgcgttcgtttcttctctgttgttgttgtatctagtatgatgaggcgtgcgtacccggagggtcctcctccctcgtacgagagcgtgatgcagcaggcgatggcggcggcggcgatgcagcccccgctggaggctccttacgtgcccccgcggtacctggcgcctacggaggggcggaacagcattcgttactcggagctggcacccttgtacgataccacccggttgtacctggtggacaacaagtcggcggacatcgcctcgctgaactaccagaacgaccacagcaacttcctgaccaccgtggtgcagaacaatgacttcacccccacggaggccagcacccagaccatcaactttgacgagcgctcgcggtggggcggccagctgaaaaccatcatgcacaccaacatgcccaacgtgaacgagttcatgtacagcaacaagttcaaggcgcgggtgatggtctcccgcaagacccccaatggggtgacagtgacagaggattatgatggtagtcaggatgagctgaagtatgaatgggtggaatttgagctgcccgaaggcaacttctcggtgaccatgaccatcgacctgatgaacaacgccatcatcgacaattacttggcggtggggcggcagaacggggtgctggagagcgacatcggcgtgaagttcgacactaggaacttcaggctgggctgggaccccgtgaccgagctggtcatgcccggggtgtacaccaacgaggctttccatcccgatattgtcttgctgcccggctgcggggtggacttcaccgagagccgcctcagcaacctgctgggcattcgcaagaggcagcccttccaggaaggcttccagatcatgtacgaggatctggaggggggcaacatccccgcgctcctggatgtcgacgcctatgagaaaagcaaggaggatgcagcagctgaagcaactgcagccgtagctaccgcctctaccgaggtcaggggcgataattttgcaagcgccgcagcagtggcagcggccgaggcggctgaaaccgaaagtaagatagtcattcagccggtggagaaggatagcaagaacaggagctacaacgtactaccggacaagataaacaccgcctaccgcagctggtacctagcctacaactatggcgaccccgagaagggcgtgcgctcctggacgctgctcaccacctcggacgtcacctgcggcgtggagcaagtctactggtcgctgcccgacatgatgcaagacccggtcaccttccgctccacgcgtcaagttagcaactacccggtggtgggcgccgagctcctgcccgtctactccaagagcttcttcaacgagcaggccgtctactcgcagcagctgcgcgccttcacctcgcttacgcacgtcttcaaccgcttccccgagaaccagatcctcgtccgcccgcccgcgcccaccattaccaccgtcagtgaaaacgttcctgctctcacagatcacgggaccctgccgctgcgcagcagtatccggggagtccagcgcgtgaccgttactgacgccagacgccgcacctgcccctacgtctacaaggccctgggcatagtcgcgccgcgcgtcctctcgagccgcaccttctaaatgtccattctcatctcgcccagtaataacaccggttggggcctgcgcgcgcccagcaagatgtacggaggcgctcgccaacgctccacgcaacaccccgtgcgcgtgcgcgggcacttccgcgctccctggggcgccctcaagggccgcgtgcggtcgcgcaccaccgtcgacgacgtgatcgaccaggtggtggccgacgcgcgcaactacacccccgccgccgcgcccgtctccaccgtggacgccgtcatcgacagcgtggtggccgacgcgcgccggtacgcccgcgccaagagccggcggcggcgcatcgcccggcggcaccggagcacccccgccatgcgcgcggcgcgagccttgctgcgcagggccaggcgcacgggacgcagggccatgctcagggcggccagacgcgcggcttcaggcgccagcgccggcaggacccggagacgcgcggccacggcggcggcagcggccatcgccagcatgtcccgcccgcggcgagggaacgtgtactgggtgcgcgacgccgccaccggtgtgcgcgtgcccgtgcgcacccgcccccctcgcacttgaagatgttcacttcgcgatgttgatgtgtcccagcggcgaggaggatgtccaagcgcaaattcaaggaagagatgctccaggtcatcgcgcctgagatctacggccctgcggtggtgaaggaggaaagaaagccccgcaaaatcaagcgggtcaaaaaggacaaaaaggaagaagaaagtgatgtggacggattggtggagtttgtgcgcgagttcgccccccggcggcgcgtgcagtggcgcgggcggaaggtgcaaccggtgctgagacccggcaccaccgtggtcttcacgcccggcgagcgctccggcaccgcttccaagcgctcctacgacgaggtgtacggggatgatgatattctggagcaggcggccgagcgcctgggcgagtttgcttacggcaagcgcagccgttccgcaccgaaggaagaggcggtgtccatcccgctggaccacggcaaccccacgccgagcctcaagcccgtgaccttgcagcaggtgctgccgaccgcggcgccgcgccgggggttcaagcgcgagggcgaggatctgtaccccaccatgcagctgatggtgcccaagcgccagaagctggaagacgtgctggagaccatgaaggtggacccggacgtgcagcccgaggtcaaggtgcggcccatcaagcaggtggccccgggcctgggcgtgcagaccgtggacatcaagattcccacggagcccatggaaacgcagaccgagcccatgatcaagcccagcaccagcaccatggaggtgcagacggatccctggatgccatcggctcctagtcgaagaccccggcgcaagtacggcgcggccagcctgctgatgcccaactacgcgctgcatccttccatcatccccacgccgggctaccgcggcacgcgcttctaccgcggtcataccagcagccgccgccgcaagaccaccactcgccgccgccgtcgccgcaccgccgctgcaaccacccctgccgccctggtgcggagagtgtaccgccgcggccgcgcacctctgaccctgccgcgcgcgcgctaccacccgagcatcgccatttaaactttcgcctgctttgcagatcaatggccctcacatgccgccttcgcgttcccattacgggctaccgaggaagaaaaccgcgccgtagaaggctggcggggaacgggatgcgtcgccaccaccaccggcggcggcgcgccatcagcaagcggttggggggaggcttcctgcccgcgctgatccccatcatcgccgcggcgatcggggcgatccccggcattgcttccgtggcggtgcaggcctctcagcgccactgagacacacttggaaacatcttgtaataaaccaatggactctgacgctcctggtcctgtgatgtgttttcgtagacagatggaagacatcaatttttcgtccctggctccgcgacacggcacgcggccgttcatgggcacctggagcgacatcggcaccagccaactgaacgggggcgccttcaattggagcagtctctggagcgggcttaagaatttcgggtccacgcttaaaacctatggcagcaaggcgtggaacagcaccacagggcaggcgctgagggataagctgaaagagcagaacttccagcagaaggtggtcgatgggctcgcctcgggcatcaacggggtggtggacctggccaaccaggccgtgcagcggcagatcaacagccgcctggacccggtgccgcccgccggctccgtggagatgccgcaggtggaggaggagctgcctcccctggacaagcggggcgagaagcgaccccgccccgatgcggaggagacgctgctgacgcacacggacgagccgcccccgtacgaggaggcggtgaaactgggtctgcccaccacgcggcccatcgcgcccctggccaccggggtgctgaaacccgaaaagcccgcgaccctggacttgcctcctccccagccttcccgcccctctacagtggctaagcccctgccgccggtggccgtggcccgcgcgcgacccgggggcaccgcccgccctcatgcgaactggcagagcactctgaacagcatcgtgggtctgggagtgcagagtgtgaagcgccgccgctgctattaaacctaccgtagcgcttaacttgcttgtctgtgtgtgtatgtattatgtcgccgccgccgctgtccaccagaaggaggagtgaagaggcgcgtcgccgagttgcaagatggccaccccatcgatgctgccccagtgggcgtacatgcacatcgccggacaggacgcttcggagtacctgagtccgggtctggtgcagtttgcccgcgccacagacacctacttcagtctggggaacaagtttaggaaccccacggtggcgcccacgcacgatgtgaccaccgaccgcagccagcggctgacgctgcgcttcgtgcccgtggaccgcgaggacaacacctactcgtacaaagtgcgctacacgctggccgtgggcgacaaccgcgtgctggacatggccagcacctactttgacatccgcggcgtgctggatcggggccctagcttcaaaccctactccggcaccgcctacaacagtctggcccccaagggagcacccaacacttgtcagtggacatataaagccgatggtgaaactgccacagaaaaaacctatacatatggaaatgcacccgtgcagggcattaacatcacaaaagatggtattcaacttggaactgacaccgatgatcagccaatctacgcagataaaacctatcagcctgaacctcaagtgggtgatgctgaatggcatgacatcactggtactgatgaaaagtatggaggcagagctcttaagcctgataccaaaatgaagccttgttatggttcttttgccaagcctactaataaagaaggaggtcaggcaaatgtgaaaacaggaacaggcactactaaagaatatgacatagacatggctttctttgacaacagaagtgcggctgctgctggcctagctccagaaattgttttgtatactgaaaatgtggatttggaaactccagatacccatattgtatacaaagcaggcacagatgacagcagctcttctattaatttgggtcagcaagccatgcccaacagacctaactacattggtttcagagacaactttatcgggctcatgtactacaacagcactggcaatatgggggtgctggccggtcaggcttctcagctgaatgctgtggttgacttgcaagacagaaacaccgagctgtcctaccagctcttgcttgactctctgggtgacagaacccggtatttcagtatgtggaatcaggcggtggacagctatgatcctgatgtgcgcattattgaaaatcatggtgtggaggatgaacttcccaactattgtttccctctggatgctgttggcagaacagatacttatcagggaattaaggctaatggaactgatcaaaccacatggaccaaagatgacagtgtcaatgatgctaatgagataggcaagggtaatccattcgccatggaaatcaacatccaagccaacctgtggaggaacttcctctacgccaacgtggccctgtacctgcccgactcttacaagtacacgccggccaatgttaccctgcccaccaacaccaacacctacgattacatgaacggccgggtggtggcgccctcgctggtggactcctacatcaacatcggggcgcgctggtcgctggatcccatggacaacgtgaaccccttcaaccaccaccgcaatgcggggctgcgctaccgctccatgctcctgggcaacgggcgctacgtgcccttccacatccaggtgccccagaaatttttcgccatcaagagcctcctgctcctgcccgggtcctacacctacgagtggaacttccgcaaggacgtcaacatgatcctgcagagctccctcggcaacgacctgcgcacggacggggcctccatctccttcaccagcatcaacctctacgccaccttcttccccatggcgcacaacacggcctccacgctcgaggccatgctgcgcaacgacaccaacgaccagtccttcaacgactacctctcggcggccaacatgctctaccccatcccggccaacgccaccaacgtgcccatctccatcccctcgcgcaactgggccgccttccgcggctggtccttcacgcgtctcaagaccaaggagacgccctcgctgggctccgggttcgacccctacttcgtctactcgggctccatcccctacctcgacggcaccttctacctcaaccacaccttcaagaaggtctccatcaccttcgactcctccgtcagctggcccggcaacgaccggctcctgacgcccaacgagttcgaaatcaagcgcaccgtcgacggcgagggctacaacgtggcccagtgcaacatgaccaaggactggttcctggtccagatgctggcccactacaacatcggctaccagggcttctacgtgcccgagggctacaaggaccgcatgtactccttcttccgcaacttccagcccatgagccgccaggtggtggacgaggtcaactacaaggactaccaggccgtcaccctggcctaccagcacaacaactcgggcttcgtcggctacctcgcgcccaccatgcgccagggccagccctaccccgccaactacccctacccgctcatcggcaagagcgccgtcaccagcgtcacccagaaaaagttcctctgcgacagggtcatgtggcgcatccccttctccagcaacttcatgtccatgggcgcgctcaccgacctcggccagaacatgctctatgccaactccgcccacgcgctagacatgaatttcgaagtcgaccccatggatgagtccacccttctctatgttgtcttcgaagtcttcgacgtcgtccgagtgcaccagccccaccgcggcgtcatcgaggccgtctacctgcgcacccccttctcggccggtaacgccaccacctaagctcttgcttcttgcaagccatggccgcgggctccggcgagcaggagctcagggccatcatccgcgacctgggctgcgggccctacttcctgggcaccttcgataagcgcttcccgggattcatggccccgcacaagctggcctgcgccatcgtcaacacggccggccgcgagaccgggggcgagcactggctggccttcgcctggaacccgcgctcgaacacctgctacctcttcgaccccttcgggttctcggacgagcgcctcaagcagatctaccagttcgagtacgagggcctgctgcgccgcagcgccctggccaccgaggaccgctgcgtcaccctggaaaagtccacccagaccgtgcagggtccgcgctcggccgcctgcgggctcttctgctgcatgttcctgcacgccttcgtgcactggcccgaccgccccatggacaagaaccccaccatgaacttgctgacgggggtgcccaacggcatgctccagtcgccccaggtggaacccaccctgcgccgcaaccaggaggcgctctaccgcttcctcaactcccactccgcctactttcgctcccaccgcgcgcgcatcgagaaggccaccgccttcgaccgcatgaatcaagacatgtaaaccgtgtgtgtatgttaaatgtctttaataaacagcactttcatgttacacatgcatctgagatgatttatttagaaatcgaaagggttctgccgggtctcggcatggcccgcgggcagggacacgttgcggaactggtacttggccagccacttgaactcggggatcagcagtttgggcagcggggtgtcggggaaggagtcggtccacagcttccgcgtcagttgcagggcgcccagcaggtcgggcgcggagatcttgaaatcgcagttgggacccgcgttctgcgcgcgggagttgcggtacacggggttgcagcactggaacaccatcagggccgggtgcttcacgctcgccagcaccgtcgcgtcggtgatgctctccacgtcgaggtcctcggcgttggccatcccgaagggggtcatcttgcaggtctgccttcccatggtgggcacgcacccgggcttgtggttgcaatcgcagtgcagggggatcagcatcatctgggcctggtcggcgttcatccccgggtacatggccttcatgaaagcctccaattgcctgaacgcctgctgggccttggctccctcggtgaagaagaccccgcaggacttgctagagaactggttggtggcgcacccggcgtcgtgcacgcagcagcgcgcgtcgttgttggccagctgcaccacgctgcgcccccagcggttctgggtgatcttggcccggtcggggttctccttcagcgcgcgctgcccgttctcgctcgccacatccatctcgatcatgtgctccttctggatcatggtggtcccgtgcaggcaccgcagcttgccctcggcctcggtgcacccgtgcagccacagcgcgcacccggtgcactcccagttcttgtgggcgatctgggaatgcgcgtgcacgaagccctgcaggaagcggcccatcatggtggtcagggtcttgttgctagtgaaggtcagcggaatgccgcggtgctcctcgttgatgtacaggtggcagatgcggcggtacacctcgccctgctcgggcatcagctggaagttggctttcaggtcggtctccacgcggtagcggtccatcagcatagtcatgatttccatacccttctcccaggccgagacgatgggcaggctcatagggttcttcaccatcatcttagcgctagcagccgcggccagggggtcgctctcgtccagggtctcaaagctccgcttgccgtccttctcggtgatccgcaccggggggtagctgaagcccacggccgccagctcctcctcggcctgtctttcgtcctcgctgtcctggctgacgtcctgcaggaccacatgcttggtcttgcggggtttcttcttgggcggcagcggcggcggagatgttggagatggcgagggggagcgcgagttctcgctcaccactactatctcttcctcttcttggtccgaggccacgcggcggtaggtatgtctcttcgggggcagaggcggaggcgacgggctctcgccgccgcgacttggcggatggctggcagagccccttccgcgttcgggggtgcgctcccggcggcgctctgactgacttcctccgcggccggccattgtgttctcctagggaggaacaacaagcatggagactcagccatcgccaacctcgccatctgcccccaccgccgacgagaagcagcagcagcagaatgaaagcttaaccgccccgccgcccagccccgccacctccgacgcggccgtcccagacatgcaagagatggaggaatccatcgagattgacctgggctatgtgacgcccgcggagcacgaggaggagctggcagtgcgcttttcacaagaagagatacaccaagaacagccagagcaggaagcagagaatgagcagagtcaggctgggctcgagcatgacggcgactacctccacctgagcgggggggaggacgcgctcatcaagcatctggcccggcaggccaccatcgtcaaggatgcgctgctcgaccgcaccgaggtgcccctcagcgtggaggagctcagccgcgcctacgagttgaacctcttctcgccgcgcgtgccccccaagcgccagcccaatggcacctgcgagcccaacccgcgcctcaacttctacccggtcttcgcggtgcccgaggccctggccacctaccacatctttttcaagaaccaaaagatccccgtctcctgccgcgccaaccgcacccgcgccgacgcccttttcaacctgggtcccggcgcccgcctacctgatatcgcctccttggaagaggttcccaagatcttcgagggtctgggcagcgacgagactcgggccgcgaacgctctgcaaggagaaggaggagagcatgagcaccacagcgccctggtcgagttggaaggcgacaacgcgcggctggcggtgctcaaacgcacggtcgagctgacccatttcgcctacccggctctgaacctgccccccaaagtcatgagcgcggtcatggaccaggtgctcatcaagcgcgcgtcgcccatctccgaggacgagggcatgcaagactccgaggagggcaagcccgtggtcagcgacgagcagctggcccggtggctgggtcctaatgctagtccccagagtttggaagagcggcgcaaactcatgatggccgtggtcctggtgaccgtggagctggagtgcctgcgccgcttcttcgccgacgcggagaccctgcgcaaggtcgaggagaacctgcactacctcttcaggcacgggttcgtgcgccaggcctgcaagatctccaacgtggagctgaccaacctggtctcctacatgggcatcttgcacgagaaccgcctggggcagaacgtgctgcacaccaccctgcgcggggaggcccggcgcgactacatccgcgactgcgtctacctctacctctgccacacctggcagacgggcatgggcgtgtggcagcagtgtctggaggagcagaacctgaaagagctctgcaagctcctgcagaagaacctcaagggtctgtggaccgggttcgacgagcgcaccaccgcctcggacctggccgacctcattttccccgagcgcctcaggctgacgctgcgcaacggcctgcccgactttatgagccaaagcatgttgcaaaactttcgctctttcatcctcgaacgctccggaatcctgcccgccacctgctccgcgctgccctcggacttcgtgccgctgaccttccgcgagtgccccccgccgctgtggagccactgctacctgctgcgcctggccaactacctggcctaccactcggacgtgatcgaggacgtcagcggcgagggcctgctcgagtgccactgccgctgcaacctctgcacgccgcaccgctccctggcctgcaacccccagctgctgagcgagacccagatcatcggcaccttcgagttgcaagggcccagcgaaggcgagggttcagccgccaaggggggtctgaaactcaccccggggctgtggacctcggcctacttgcgcaagttcgtgcccgaggactaccatcccttcgagatcaggttctacgaggaccaatcccatccgcccaaggccgagctgtcggcctgcgtcatcacccagggggcgatcctggcccaattgcaagccatccagaaatcccgccaagaattcttgctgaaaaagggccgcggggtctacctcgacccccagaccggtgaggagctcaaccccggcttcccccaggatgccccgaggaaacaagaagctgaaagtggagctgccgcccgtggaggatttggaggaagactgggagaacagcagtcaggcagaggaggaggagatggaggaagactgggacagcactcaggcagaggaggacagcctgcaagacagtctggaggaagacgaggaggaggcagaggaggaggtggaagaagcagccgccgccagaccgtcgtcctcggcgggggagaaagcaagcagcacggataccatctccgctccgggtcggggtcccgctcgaccacacagtagatgggacgagaccggacgattcccgaaccccaccacccagaccggtaagaaggagcggcagggatacaagtcctggcgggggcacaaaaacgccatcgtctcctgcttgcaggcctgcgggggcaacatctccttcacccggcgctacctgctcttccaccgcggggtgaactttccccgcaacatcttgcattactaccgtcacctccacagcccctactacttccaagaagaggcagcagcagcagaaaaagaccagcagaaaaccagcagctagaaaatccacagcggcggcagcaggtggactgaggatcgcggcgaacgagccggcgcaaacccgggagctgaggaaccggatctttcccaccctctatgccatcttccagcagagtcgggggcaggagcaggaactgaaagtcaagaaccgttctctgcgctcgctcacccgcagttgtctgtatcacaagagcgaagaccaacttcagcgcactctcgaggacgccgaggctctcttcaacaagtactgcgcgctcactcttaaagagtagcccgcgcccgcccagtcgcagaaaaaggcgggaattacgtcacctgtgcccttcgccctagccgcctccacccatcatcatgagcaaagagattcccacgccttacatgtggagctaccagccccagatgggcctggccgccggtgccgcccaggactactccacccgcatgaattggctcagcgccgggcccgcgatgatctcacgggtgaatgacatccgcgcccaccgaaaccagatactcctagaacagtcagcgctcaccgccacgccccgcaatcacctcaatccgcgtaattggcccgccgccctggtgtaccaggaaattccccagcccacgaccgtactacttccgcgagacgcccaggccgaagtccagctgactaactcaggtgtccagctggcgggcggcgccaccctgtgtcgtcaccgccccgctcagggtataaagcggctggtgatccggggcagaggcacacagctcaacgacgaggtggtgagctcttcgctgggtctgcgacctgacggagtcttccaactcgccggatcggggagatcttccttcacgcctcgtcaggccgtcctgactttggagagttcgtcctcgcagccccgctcgggtggcatcggcactctccagttcgtggaggagttcactccctcggtctacttcaaccccttctccggctcccccggccactacccggacgagttcatcccgaacttcgacgccatcagcgagtcggtggacggctacgattgaaactaatcacccccttatccagtgaaataaagatcatattgatgatgattttacagaaataaaaaataatcatttgatttgaaataaagatacaatcatattgatgatttgagtttaacaaaaaaataaagaatcacttacttgaaatctgataccaggtctctgtccatgttttctgccaacaccacttcactcccctcttcccagctctggtactgcaggccccggcgggctgcaaacttcctccacacgctgaaggggatgtcaaattcctcctgtccctcaatcttcattttatcttctatcagatgtccaaaaagcgcgtccgggtggatgatgacttcgaccccgtctacccctacgatgcagacaacgcaccgaccgtgcccttcatcaacccccccttcgtctcttcagatggattccaagagaagcccctgggggtgttgtccctgcgactggccgaccccgtcaccaccaagaacggggaaatcaccctcaagctgggagagggggtggacctcgattcctcgggaaaactcatctccaacacggccaccaaggccgccgcccctctcagtttttccaacaacaccatttcccttaacatggatcaccccttttacactaaagatggaaaattatccttacaagtttctccaccattaaatatactgagaacaagcattctaaacacactagctttaggttttggatcaggtttaggactccgtggctctgccttggcagtacagttagtctctccacttacatttgatactgatggaaacataaagcttaccttagacagaggtttgcatgttacaacaggagatgcaattgaaagcaacataagctgggctaaaggtttaaaatttgaagatggagccatagcaaccaacattggaaatgggttagagtttggaagcagtagtacagaaacaggtgttgatgatgcttacccaatccaagttaaacttggatctggccttagctttgacagtacaggagccataatggctggtaacaaagaagacgataaactcactttgtggacaacacctgatccatcaccaaactgtcaaatactcgcagaaaatgatgcaaaactaacactttgcttgactaaatgtggtagtcaaatactggccactgtgtcagtcttagttgtaggaagtggaaacctaaaccccattactggcaccgtaagcagtgctcaggtgtttctacgttttgatgcaaacggtgttcttttaacagaacattctacactaaaaaaatactgggggtataggcagggagatagcatagatggcactccatataccaatgctgtaggattcatgcccaatttaaaagcttatccaaagtcacaaagttctactactaaaaataatatagtagggcaagtatacatgaatggagatgtttcaaaacctatgcttctcactataaccctcaatggtactgatgacagcaacagtacatattcaatgtcattttcatacacctggactaatggaagctatgttggagcaacatttggggctaactcttataccttctcatacatcgcccaagaatgaacactgtatcccaccctgcatgccaacccttcccaccccactctgtggaacaaactctgaaacacaaaataaaataaagttcaagtgttttattgattcaacagttttacaggattcgagcagttatttttcctccaccctcccaggacatggaatacaccaccctctccccccgcacagccttgaacatctgaatgccattggtgatggacatgcttttggtctccacgttccacacagtttcagagcgagccagtctcgggtcggtcagggagatgaaaccctccgggcactcccgcatctgcacctcacagctcaacagctgaggattgtcctcggtggtcgggatcacggttatctggaagaagcagaagagcggcggtgggaatcatagtccgcgaacgggatcggccggtggtgtcgcatcaggccccgcagcagtcgctgccgccgccgctccgtcaagctgctgctcagggggtccgggtccagggactccctcagcatgatgcccacggccctcagcatcagtcgtctggtgcggcgggcgcagcagcgcatgcggatctcgctcaggtcgctgcagtacgtgcaacacagaaccaccaggttgttcaacagtccatagttcaacacgctccagccgaaactcatcgcgggaaggatgctacccacgtggccgtcgtaccagatcctcaggtaaatcaagtggtgccccctccagaacacgctgcccacgtacatgatctccttgggcatgtggcggttcaccacctcccggtaccacatcaccctctggttgaacatgcagccccggatgatcctgcggaaccacagggccagcaccgccccgcccgccatgcagcgaagagaccccgggtcccggcaatggcaatggaggacccaccgctcgtacccgtggatcatctgggagctgaacaagtctatgttggcacagcacaggcatatgctcatgcatctcttcagcactctcaactcctcgggggtcaaaaccatatcccagggcacggggaactcttgcaggacagcgaaccccgcagaacagggcaatcctcgcacagaacttacattgtgcatggacagggtatcgcaatcaggcagcaccgggtgatcctccaccagagaagcgcgggtctcggtctcctcacagcgtggtaagggggccggccgatacgggtgatggcgggacgcggctgatcgtgttcgcgaccgtgtcatgatgcagttgctttcggacattttcgtacttgctgtagcagaacctggtccgggcgctgcacaccgatcgccggcggcggtctcggcgcttggaacgctcggtgttgaaattgtaaaacagccactctctcagaccgtgcagcagatctagggcctcaggagtgatgaagatcccatcatgcctgatggctctgatcacatcgaccaccgtggaatgggccagacccagccagatgatgcaattttgttgggtttcggtgacggcgggggagggaagaacaggaagaaccatgattaacttttaatccaaacggtctcggagtacttcaaaatgaagatcgcggagatggcacctctcgcccccgctgtgttggtggaaaataacagccaggtcaaaggtgatacggttctcgagatgttccacggtggcttccagcaaagcctccacgcgcacatccagaaacaagacaatagcgaaagcgggagggttctctaattcctcaatcatcatgttacactcctgcaccatccccagataattttcatttttccagccttgaatgattcgaactagttcctgaggtaaatccaagccagccatgataaagagctcgcgcagagcgccctccaccggcattcttaagcacaccctcataattccaagatattctgctcctggttcacctgcagcagattgacaagcggaatatcaaaatctctgccgcgatccctgagctcctccctcagcaataactgtaagtactctttcatatcctctccgaaatttttagccataggaccaccaggaataagattagggcaagccacagtacagataaaccgaagtcctccccagtgagcattgccaaatgcaagactgctataagcatgctggctagacccggtgatatcttccagataactggacagaaaatcgcccaggcaatttttaagaaaatcaacaaaagaaaaatcctccaggtggacgtttagagcctcgggaacaacgatgaagtaaatgcaagcggtgcgttccagcatggttagttagctgatctgtagaaaaaacaaaaatgaacattaaaccatgctagcctggcgaacaggtgggtaaatcgttctctccagcaccaggcaggccacggggtctccggcgcgaccctcgtaaaaattgtcgctatgattgaaaaccatcacagagagacgttcccggtggccggcgtgaatgattcgacaagatgaatacacccccggaacattggcgtccgcgagtgaaaaaaagcgcccgaggaagcaataaggcactacaatgctcagtctcaagtccagcaaagcgatgccatgcggatgaagcacaaaattctcaggtgcgtacaaaatgtaattactcccctcctgcacaggcagcaaagcccccgatccctccaggtacacatacaaagcctcagcgtccatagcttaccgagcagcagcacacaacaggcgcaagagtcagagaaaggctgagctctaacctgtccacccgctctctgctcaatatatagcccagatctacactgacgtaaaggccaaagtctaaaaatacccgccaaataatcacacacgcccagcacacgcccagaaaccggtgacacactcaaaaaaatacgcgcacttcctcaaacgcccaaaactgccgtcatttccgggttcccacgctacgtcatcaaaacacgactttcaaattccgtcgaccgttaaaaacgtcacccgccccgcccctaacggtcgcccgtctctcagccaatcagcgccccgcatccccaaattcaaacacctcatttgcatattaacgcgcacaaaaagtttgagg

SEQ ID NO: 3 - DNA, 11447 bp, Venezuelan equine encephalitis virus
  source 1..11447: mol_type = other DNA
atgggcggcgcatgagagaagcccagaccaattacctacccaaaatggagaaagttcacgttgacatcgaggaagacagcccattcctcagagctttgcagcggagcttcccgcagtttgaggtagaagccaagcaggtcactgataatgaccatgctaatgccagagcgttttcgcatctggcttcaaaactgatcgaaacggaggtggacccatccgacacgatccttgacattggaagtgcgcccgcccgcagaatgtattctaagcacaagtatcattgtatctgtccgatgagatgtgcggaagatccggacagattgtataagtatgcaactaagctgaagaaaaactgtaaggaaataactgataaggaattggacaagaaaatgaaggagctcgccgccgtcatgagcgaccctgacctggaaactgagactatgtgcctccacgacgacgagtcgtgtcgctacgaagggcaagtcgctgtttaccaggatgtatacgcggttgacggaccgacaagtctctatcaccaagccaataagggagttagagtcgcctactggataggctttgacaccaccccttttatgtttaagaacttggctggagcatatccatcatactctaccaactgggccgacgaaaccgtgttaacggctcgtaacataggcctatgcagctctgacgttatggagcggtcacgtagagggatgtccattcttagaaagaagtatttgaaaccatccaacaatgttctattctctgttggctcgaccatctaccacgagaagagggacttactgaggagctggcacctgccgtctgtatttcacttacgtggcaagcaaaattacacatgtcggtgtgagactatagttagttgcgacgggtacgtcgttaaaagaatagctatcagtccaggcctgtatgggaagccttcaggctatgctgctacgatgcaccgcgagggattcttgtgctgcaaagtgacagacacattgaacggggagagggtctcttttcccgtgtgcacgtatgtgccagctacattgtgtgaccaaatgactggcatactggcaacagatgtcagtgcggacgacgcgcaaaaactgctggttgggctcaaccagcgtatagtcgtcaacggtcgcacccagagaaacaccaataccatgaaaaattaccttttgcccgtagtggcccaggcatttgctaggtgggcaaaggaatataaggaagatcaagaagatgaaaggccactaggactacgagatagacagttagtcatggggtgttgttgggcttttagaaggcacaagataacatctatttataagcgcccggatacccaaaccatcatcaaagtgaacagcgatttccactcattcgtgctgcccaggataggcagtaacacattggagatcgggctgagaacaagaatcaggaaaatgttagaggagcacaaggagccgtcacctctcattaccgccgaggacgtacaagaagctaagtgcgcagccgatgaggctaaggaggtgcgtgaagccgaggagttgcgcgcagctctaccacctttggcagctgatgttgaggagcccactctggaagccgatgtcgacttgatgttacaagaggctggggccggctcagtggagacacctcgtggcttgataaaggttaccagctacgctggcgaggacaagatcggctcttacgctgtgctttctccgcaggctgtactcaagagtgaaaaattatcttgcatccaccctctcgctgaacaagtcatagtgataacacactctggccgaaaagggcgttatgccgtggaaccataccatggtaaagtagtggtgccagagggacatgcaatacccgtccaggactttcaagctctgagtgaaagtgccaccattgtgtacaacgaacgtgagttcgtaaacaggtacctgcaccatattgccacacatggaggagcgctgaacactgatgaagaatattacaaaactgtcaagcccagcgagcacgacggcgaatacctgtacgacatcgacaggaaacagtgcgtcaagaaagaactagtcactgggctagggctcacaggcgagctggtggatcctcccttccatgaattcgcctacgagagtctgagaacacgaccagccgctccttaccaagtaccaaccataggggtgtatggcgtgccaggatcaggcaagtctggcatcattaaaagcgcagtcaccaaaaaagatctagtggtgagcgccaagaaagaaaactgtgcagaaattataagggacgtcaagaaaatgaaagggctggacgtcaatgccagaactgtggactcagtgctcttgaatggatgcaaacaccccgtagagaccctgtatattgacgaagcttttgcttgtcatgcaggtactctcagagcgctcatagccattataagacctaaaaaggcagtgctctgcggggatcccaaacagtgcggtttttttaacatgatgtgcctgaaagtgcattttaaccacgagatttgcacacaagtcttccacaaaagcatctctcgccgttgcactaaatctgtgacttcggtcgtctcaaccttgttttacgacaaaaaaatgagaacgacgaatccgaaagagactaagattgtgattgacactaccggcagtaccaaacctaagcaggacgatctcattctcacttgtttcagagggtgggtgaagcagttgcaaatagattacaaaggcaacgaaataatgacggcagctgcctctcaagggctgacccgtaaaggtgtgtatgccgttcggtacaaggtgaatgaaaatcctctgtacgcacccacctcagaacatgtgaacgtcctactgacccgcacggaggaccgcatcgtgtggaaaacactagccggcgacccatggataaaaacactgactgccaagtaccctgggaatttcactgccacgatagaggagtggcaagcagagcatgatgccatcatgaggcacatcttggagagaccggaccctaccgacgtcttccagaataaggcaaacgtgtgttgggccaaggctttagtgccggtgctgaagaccgctggcatagacatgaccactgaacaatggaacactgtggattattttgaaacggacaaagctcactcagcagagatagtattgaaccaactatgcgtgaggttctttggactcgatctggactccggtctattttctgcacccactgttccgttatccattaggaataatcactgggataactccccgtcgcctaacatgtacgggctgaataaagaagtggtccgtcagctctctcgcaggtacccacaactgcctcgggcagttgccactggaagagtctatgacatgaacactggtacactgcgcaattatgatccgcgcataaacctagtacctgtaaacagaagactgcctcatgctttagtcctccaccataatgaacacccacagagtgacttttcttcattcgtcagcaaattgaagggcagaactgtcctggtggtcggggaaaagttgtccgtcccaggcaaaatggttgactggttgtcagaccggcctgaggctaccttcagagctcggctggatttaggcatcccaggtgatgtgcccaaatatgacataatatttgttaatgtgaggaccccatataaataccatcactatcagcagtgtgaagaccatgccattaagcttagcatgttgaccaagaaagcttgtctgcatctgaatcccggcggaacctgtgtcagcataggttatggttacgctgacagggccagcgaaagcatcattggtgctatagcgcggcagttcaagttttcccgggtatgcaaaccgaaatcctcacttgaagagacggaagttctgtttgtattcattgggtacgatcgcaaggcccgtacgcacaatccttacaagctttcatcaaccttgaccaacatttatacaggttccagactccacgaagccggatgtgcaccctcatatcatgtggtgcgaggggatattgccacggccaccgaaggagtgattataaatgctgctaacagcaaaggacaacctggcggaggggtgtgcggagcgctgtataagaaattcccggaaagcttcgatttacagccgatcgaagtaggaaaagcgcgactggtcaaaggtgcagctaaacatatcattcatgccgtaggaccaaacttcaacaaagtttcggaggttgaaggtgacaaacagttggcagaggcttatgagtccatcgctaagattgtcaacgataacaattacaagtcagtagcgattccactgttgtccaccggcatcttttccgggaacaaagatcgactaacccaatcattgaaccatttgctgacagctttagacaccactgatgcagatgtagccatatactgcagggacaagaaatgggaaatgactctcaaggaagcagtggctaggagagaagcagtggaggagatatgcatatccgacgactcttcagtgacagaacctgatgcagagctggtgagggtgcatccgaagagttctttggctggaaggaagggctacagcacaagcgatggcaaaactttctcatatttggaagggaccaagtttcaccaggcggccaaggatatagcagaaattaatgccatgtggcccgttgcaacggaggccaatgagcaggtatgcatgtatatcctcggagaaagcatgagcagtattaggtcgaaatgccccgtcgaagagtcggaagcctccacaccacctagcacgctgccttgcttgtgcatccatgccatgactccagaaagagtacagcgcctaaaagcctcacgtccagaacaaattactgtgtgctcatcctttccattgccgaagtatagaatcactggtgtgcagaagatccaatgctcccagcctatattgttctcaccgaaagtgcctgcgtatattcatccaaggaagtatctcgtggaaacaccaccggtagacgagactccggagccatcggcagagaaccaatccacagaggggacacctgaacaaccaccacttataaccgaggatgagaccaggactagaacgcctgagccgatcatcatcgaagaggaagaagaggatagcataagtttgctgtcagatggcccgacccaccaggtgctgcaagtcgaggcagacattcacgggccgccctctgtatctagctcatcctggtccattcctcatgcatccgactttgatgtggacagtttatccatacttgacaccctggagggagctagcgtgaccagcggggcaacgtcagccgagactaactcttacttcgcaaagagtatggagtttctggcgcgaccggtgcctgcgcctcgaacagtattcaggaaccctccacatcccgctccgcgcacaagaacaccgtcacttgcacccagcagggcctgctcgagaaccagcctagtttccaccccgccaggcgtgaatagggtgatcactagagaggagctcgaggcgcttaccccgtcacgcactcctagcaggtcggtctcgagaaccagcctggtctccaacccgccaggcgtaaatagggtgattacaagagaggagtttgaggcgttcgtagcacaacaacaatgacggtttgatgcgggtgcatacatcttttcctccgacaccggtcaagggcatttacaacaaaaatcagtaaggcaaacggtgctatccgaagtggtgttggagaggaccgaattggagatttcgtatgccccgcgcctcgaccaagaaaaagaagaattactacgcaagaaattacagttaaatcccacacctgctaacagaagcagataccagtccaggaaggtggagaacatgaaagccataacagctagacgtattctgcaaggcctagggcattatttgaaggcagaaggaaaagtggagtgctaccgaaccctgcatcctgttcctttgtattcatctagtgtgaaccgtgccttttcaagccccaaggtcgcagtggaagcctgtaacgccatgttgaaagagaactttccgactgtggcttcttactgtattattccagagtacgatgcctatttggacatggttgacggagcttcatgctgcttagacactgccagtttttgccctgcaaagctgcgcagctttccaaagaaacactcctatttggaacccacaatacgatcggcagtgccttcagcgatccagaacacgctccagaacgtcctggcagctgccacaaaaagaaattgcaatgtcacgcaaatgagagaattgcccgtattggattcggcggcctttaatgtggaatgcttcaagaaatatgcgtgtaataatgaatattgggaaacgtttaaagaaaaccccatcaggcttactgaagaaaacgtggtaaattacattaccaaattaaaaggaccaaaagctgctgctctttttgcgaagacacataatttgaatatgttgcaggacataccaatggacaggtttgtaatggacttaaagagagacgtgaaagtgactccaggaacaaaacatactgaagaacggcccaaggtacaggtgatccaggctgccgatccgctagcaacagcgtatctgtgcggaatccaccgagagctggttaggagattaaatgcggtcctgcttccgaacattcatacactgtttgatatgtcggctgaagactttgacgctattatagccgagcacttccagcctggggattgtgttctggaaactgacatcgcgtcgtttgataaaagtgaggacgacgccatggctctgaccgcgttaatgattctggaagacttaggtgtggacgcagagctgttgacgctgattgaggcggctttcggcgaaatttcatcaatacatttgcccactaaaactaaatttaaattcggagccatgatgaaatctggaatgttcctcacactgtttgtgaacacagtcattaacattgtaatcgcaagcagagtgttgagagaacggctaaccggatcaccatgtgcagcattcattggagatgacaatatcgtgaaaggagtcaaatcggacaaattaatggcagacaggtgcgccacctggttgaatatggaagtcaagattatagatgctgtggtgggcgagaaagcgccttatttctgtggagggtttattttgtgtgactccgtgaccggcacagcgtgccgtgtggcagaccccctaaaaaggctgtttaagcttggcaaacctctggcagcagacgatgaacatgatgatgacaggagaagggcattgcatgaagagtcaacacgctggaaccgagtgggtattctttcagagctgtgcaaggcagtagaatcaaggtatgaaaccgtaggaacttccatcatagttatggccatgactactctagctagcagtgttaaatcattcagctacctgagaggggcccctataactctctacggctaacctgaatggactacgacatagtctagtccgccaagatgttcccgttccagccaatgtatccgatgcagccaatgccctatcgcaacccgttcgcggccccgcgcaggccctggttccccagaaccgacccttttctggcgatgcaggtgcaggaattaacccgctcgatggctaacctgacgttcaagcaacgccgggacgcgccacctgaggggccatccgctaagaaaccgaagaaggaggcctcgcaaaaacagaaagggggaggccaagggaagaagaagaagaaccaagggaagaagaaggctaagacagggccgcctaatccgaaggcacagaatggaaacaagaagaagaccaacaagaaaccaggcaagagacagcgcatggtcatgaaattggaatctgacaagacgttcccaatcatgttggaagggaagataaacggctacgcttgtgtggtcggagggaagttattcaggccgatgcatgtggaaggcaagatcgacaacgacgttctggccgcgcttaagacgaagaaagcatccaaatacgatcttgagtatgcagatgtgccacagaacatgcgggccgatacattcaaatacacccatgagaaaccccaaggctattacagctggcatcatggagcagtccaatatgaaaatgggcgtttcacggtgccgaaaggagttggggccaagggagacagcggacgacccattctggataaccagggacgggtggtcgctattgtgctgggaggtgtgaatgaaggatctaggacagccctttcagtcgtcatgtggaacgagaagggagttaccgtgaagtatactccggagaactgcgagcaatggtcactagtgaccaccatgtgtctgctcgccaatgtgacgttcccatgtgctcaaccaccaatttgctacgacagaaaaccagcagagactttggccatgctcagcgttaacgttgacaacccgggctacgatgagctgctggaagcagctgttaagtgccccggaaggaaaaggagatccaccgaggagctgtttaaggagtataagctaacgcgcccttacatggccagatgcatcagatgtgcagttgggagctgccatagtccaatagcaatcgaggcagtaaagagcgacgggcacgacggttatgttagacttcagacttcctcgcagtatggcctggattcctccggcaacttaaagggcaggaccatgcggtatgacatgcacgggaccattaaagagataccactacatcaagtgtcactccatacatctcgcccgtgtcacattgtggatgggcacggttatttcctgcttgccaggtgcccggcaggggactccatcaccatggaatttaagaaagattccgtcacacactcctgctcggtgccgtatgaagtgaaatttaatcctgtaggcagagaactctatactcatcccccagaacacggagtagagcaagcgtgccaagtctacgcacatgatgcacagaacagaggagcttatgtcgagatgcacctcccgggctcagaagtggacagcagtttggtttccttgagcggcagttcagtcaccgtgacacctcctgttgggactagcgccctggtggaatgcgagtgtggcggcacaaagatctccgagaccatcaacaagacaaaacagttcagccagtgcacaaagaaggagcagtgcagagcatatcggctgcagaacgataagtgggtgtataattctgacaaactgcccaaagcagcgggagccaccttaaaaggaaaactgcatgtcccattcttgctggcagacggcaaatgcaccgtgcctctagcaccagaacctatgataacctttggtttcagatcagtgtcactgaaactgcaccctaagaatcccacatatctaaccacccgccaacttgctgatgagcctcactacacgcacgagctcatatctgaaccagctgttaggaattttaccgtcaccgaaaaagggtgggagtttgtatggggaaaccacccgccgaaaaggttttgggcacaggaaacagcacccggaaatccacatgggctaccgcacgaggtgataactcattattaccacagataccctatgtccaccatcctgggtttgtcaatttgtgccgccattgcaaccgtttccgttgcagcgtctacctggctgttttgcagatctagagttgcgtgcctaactccttaccggctaacacctaacgctaggataccattttgtctggctgtgctttgctgcgcccgcactgcccgggccgagaccacctgggagtccttggatcacctatggaacaataaccaacagatgttctggattcaattgctgatccctctggccgccttgatcgtagtgactcgcctgctcaggtgcgtgtgctgtgtcgtgccttttttagtcatggccggcgccgcaggcgccggcgcctacgagcacgcgaccacgatgccgagccaagcgggaatctcgtataacactatagtcaacagagcaggctacgcaccactccctatcagcataacaccaacaaagatcaagctgatacctacagtgaacttggagtacgtcacctgccactacaaaacaggaatggattcaccagccatcaaatgctgcggatctcaggaatgcactccaacttacaggcctgatgaacagtgcaaagtcttcacaggggtttacccgttcatgtggggtggtgcatattgcttttgcgacactgagaacacccaagtcagcaaggcctacgtaatgaaatctgacgactgccttgcggatcatgctgaagcatataaagcgcacacagcctcagtgcaggcgttcctcaacatcacagtgggagaacactctattgtgactaccgtgtatgtgaatggagaaactcctgtgaatttcaatggggtcaaattaactgcaggtccgctttccacagcttggacaccctttgatcgcaaaatcgtgcagtatgccggggagatctataattatgattttcctgagtatggggcaggacaaccaggagcatttggagatatacaatccagaacagtctcaagctcagatctgtatgccaataccaacctagtgctgcagagacccaaagcaggagcgatccacgtgccatacactcaggcaccttcgggttttgagcaatggaagaaagataaagctccatcattgaaatttaccgcccctttcggatgcgaaatatatacaaaccccattcgcgccgaaaactgtgctgtagggtcaattccattagcctttgacattcccgacgccttgttcaccagggtgtcagaaacaccgacactttcagcggccgaatgcactcttaacgagtgcgtgtattcttccgactttggtgggatcgccacggtcaagtactcggccagcaagtcaggcaagtgcgcagtccatgtgccatcagggactgctaccctaaaagaagcagcagtcgagctaaccgagcaagggtcggcgactatccatttctcgaccgcaaatatccacccggagttcaggctccaaatatgcacatcatatgttacgtgcaaaggtgattgtcaccccccgaaagaccatattgtgacacaccctcagtatcacgcccaaacatttacagccgcggtgtcaaaaaccgcgtggacgtggttaacatccctgctgggaggatcagccgtaattattataattggcttggtgctggctactattgtggccatgtacgtgctgaccaaccagaaacataattgaatacagcagcaattggcaagctgcttacatagaactcgcggcgattggcatgccgccttaaaatttttattttattttttcttttcttttccgaatcggattttgtttttaatatttc

SEQ ID NO: 4 - DNA, 9577 bp, synthetic construct
  misc_feature 1..9577: note = Description of Artificial Sequence: Synthetic polynucleotide
  source 1..9577: mol_type = other DNA
atgggcggcgcatgagagaagcccagaccaattacctacccaaaatggagaaagttcacgttgacatcgaggaagacagcccattcctcagagctttgcagcggagcttcccgcagtttgaggtagaagccaagcaggtcactgataatgaccatgctaatgccagagcgttttcgcatctggcttcaaaactgatcgaaacggaggtggacccatccgacacgatccttgacattggaagtgcgcccgcccgcagaatgtattctaagcacaagtatcattgtatctgtccgatgagatgtgcggaagatccggacagattgtataagtatgcaactaagctgaagaaaaactgtaaggaaataactgataaggaattggacaagaaaatgaaggagctcgccgccgtcatgagcgaccctgacctggaaactgagactatgtgcctccacgacgacgagtcgtgtcgctacgaagggcaagtcgctgtttaccaggatgtatacgcggttgacggaccgacaagtctctatcaccaagccaataagggagttagagtcgcctactggataggctttgacaccaccccttttatgtttaagaacttggctggagcatatccatcatactctaccaactgggccgacgaaaccgtgttaacggctcgtaacataggcctatgcagctctgacgttatggagcggtcacgtagagggatgtccattcttagaaagaagtatttgaaaccatccaacaatgttctattctctgttggctcgaccatctaccacgagaagagggacttactgaggagctggcacctgccgtctgtatttcacttacgtggcaagcaaaattacacatgtcggtgtgagactatagttagttgcgacgggtacgtcgttaaaagaatagctatcagtccaggcctgtatgggaagccttcaggctatgctgctacgatgcaccgcgagggattcttgtgctgcaaagtgacagacacattgaacggggagagggtctcttttcccgtgtgcacgtatgtgccagctacattgtgtgaccaaatgactggcatactggcaacagatgtcagtgcggacgacgcgcaaaaactgctggttgggctcaaccagcgtatagtcgtcaacggtcgcacccagagaaacaccaataccatgaaaaattaccttttgcccgtagtggcccaggcatttgctaggtgggcaaaggaatataaggaagatcaagaagatgaaaggccactaggactacgagatagacagttagtcatggggtgttgttgggcttttagaaggcacaagataacatctatttataagcgcccggatacccaaaccatcatcaaagtgaacagcgatttccactcattcgtgctgcccaggataggcagtaacacattggagatcgggctgagaacaagaatcaggaaaatgttagaggagcacaaggagccgtcacctctcattaccgccgaggacgtacaagaagctaagtgcgcagccgatgaggctaaggaggtgcgtgaagccgaggagttgcgcgcagctctaccacctttggcagctgatgttgaggagcccactctggaagccgatgtcgacttgatgttacaagaggctggggccggctcagtggagacacctcgtggcttgataaaggttaccagctacgctggcgaggacaagatcggctcttacgctgtgctttctccgcaggctgtactcaagagtgaaaaattatcttgcatccaccctctcgctgaacaagtcatagtgataacacactctggccgaaaagggcgttatgccgtggaaccataccatggtaaagtagtggtgccagagggacatgcaatacccgtccaggactttcaagctctgagtgaaagtgccaccattgtgtacaacgaacgtgagttcgtaaacaggtacctgcaccatattgccacacatggaggagcgctgaacactgatgaagaatattacaaaactgtcaagcccagcgagcacgacggcgaatacctgtacgacatcgacaggaaacagtgcgtcaagaaagaactagtcactgggctagggctcacaggcgagctggtggatcctcccttccatgaattcgcctacgagagtctgagaacacgaccagccgctccttaccaagtaccaaccataggggtgtatggcgtgccaggatcaggcaagtctggcatcattaaaagcgcagtcaccaaaaaagatctagtggtgagcgccaagaaagaaaactgtgcagaaattataagggacgtcaagaaaatgaaagggctggacgtcaatgccagaactgtggactcagtgctcttgaatggatgcaaacaccccgtagagaccctgtatattgacgaagcttttgcttgtcatgcaggtactctcagagcgctcatagccattataagacctaaaaaggcagtgctctgcggggatcccaaacagtgcggtttttttaacatgatgtgcctgaaagtgcattttaaccacgagatttgcacacaagtcttccacaaaagcatctctcgccgttgcactaaatctgtgacttcggtcgtctcaaccttgttttacgacaaaaaaatgagaacgacgaatccgaaagagactaagattgtgattgacactaccggcagtaccaaacctaagcaggacgatctcattctcacttgtttcagagggtgggtgaagcagttgcaaatagattacaaaggcaacgaaataatgacggcagctgcctctcaagggctgacccgtaaaggtgtgtatgccgttcggtacaaggtgaatgaaaatcctctgtacgcacccacctcagaacatgtgaacgtcctactgacccgcacggaggaccgcatcgtgtggaaaacactagccggcgacccatggataaaaacactgactgccaagtaccctgggaatttcactgccacgatagaggagtggcaagcagagcatgatgccatcatgaggcacatcttggagagaccggaccctaccgacgtcttccagaataaggcaaacgtgtgttgggccaaggctttagtgccggtgctgaagaccgctggcatagacatgaccactgaacaatggaacactgtggattattttgaaacggacaaagctcactcagcagagatagtattgaaccaactatgcgtgaggttctttggactcgatctggactccggtctattttctgcacccactgttccgttatccattaggaataatcactgggataactccccgtcgcctaacatgtacgggctgaataaagaagtggtccgtcagctctctcgcaggtacccacaactgcctcgggcagttgccactggaagagtctatgacatgaacactggtacactgcgcaattatgatccgcgcataaacctagtacctgtaaacagaagactgcctcatgctttagtcctccaccataatgaacacccacagagtgacttttcttcattcgtcagcaaattgaagggcagaactgtcctggtggtcggggaaaagttgtccgtcccaggcaaaatggttgactggttgtcagaccggcctgaggctaccttcagagctcggctggatttaggcatcccaggtgatgtgcccaaatatgacataatatttgttaatgtgaggaccccatataaataccatcactatcagcagtgtgaagaccatgccattaagcttagcatgttgaccaagaaagcttgtctgcatctgaatcccggcggaacctgtgtcagcataggttatggttacgctgacagggccagcgaaagcatcattggtgctatagcgcggcagttcaagttttcccgggtatgcaaaccgaaatcctcacttgaagagacggaagttctgtttgtattcattgggtacgatcgcaaggcccgtacgcacaatccttacaagctttcatcaaccttgaccaacatttatacaggttccagactccacgaagccggatgtgcaccctcatatcatgtggtgcgaggggatattgccacggccaccgaaggagtgattataaatgctgctaacagcaaaggacaacctggcggaggggtgtgcggagcgctgtataagaaattcccggaaagcttcgatttacagccgatcgaagtaggaaaagcgcgactggtcaaaggtgcagctaaacatatcattcatgccgtaggaccaaacttcaacaaagtttcggaggttgaaggtgacaaacagttggcagaggcttatgagtccatcgctaagattgtcaacgataacaattacaagtcagtagcgattccactgttgtccaccggcatcttttccgggaacaaagatcgactaacccaatcattgaaccatttgctgacagctttagacaccactgatgcagatgtagccatatactgcagggacaagaaatgggaaatgactctcaaggaagcagtggctaggagagaagcagtggaggagatatgcatatccgacgactcttcagtgacagaacctgatgcagagctggtgagggtgcatccgaagagttctttggctggaaggaagggctacagcacaagcgatggcaaaactttctcatatttggaagggaccaagtttcaccaggcggccaaggatatagcagaaattaatgccatgtggcccgttgcaacggaggccaatgagcaggtatgcatgtatatcctcggagaaagcatgagcagtattaggtcgaaatgccccgtcgaagagtcggaagcctccacaccacctagcacgctgccttgcttgtgcatccatgccatgactccagaaagagtacagcgcctaaaagcctcacgtccagaacaaattactgtgtgctcatcctttccattgccgaagtatagaatcactggtgtgcagaagatccaatgctcccagcctatattgttctcaccgaaagtgcctgcgtatattcatccaaggaagtatctcgtggaaacaccaccggtagacgagactccggagccatcggcagagaaccaatccacagaggggacacctgaacaaccaccacttataaccgaggatgagaccaggactagaacgcctgagccgatcatcatcgaagaggaagaagaggatagcataagtttgctgtcagatggcccgacccaccaggtgctgcaagtcgaggcagacattcacgggccgccctctgtatctagctcatcctggtccattcctcatgcatccgactttgatgtggacagtttatccatacttgacaccctggagggagctagcgtgaccagcggggcaacgtcagccgagactaactcttacttcgcaaagagtatggagtttctggcgcgaccggtgcctgcgcctcgaacagtattcaggaaccctccacatcccgctccgcgcacaagaacaccgtcacttgcacccagcagggcctgctcgagaaccagcctagtttccaccccgccaggcgtgaatagggtgatcactagagaggagctcgaggcgcttaccccgtcacgcactcctagcaggtcggtctcgagaaccagcctggtctccaacccgccaggcgtaaatagggtgattacaagagaggagtttgaggcgttcgtagcacaacaacaatgacggtttgatgcgggtgcatacatcttttcctccgacaccggtcaagggcatttacaacaaaaatcagtaaggcaaacggtgctatccgaagtggtgttggagaggaccgaattggagatttcgtatgccccgcgcctcgaccaagaaaaagaagaattactacgcaagaaattacagttaaatcccacacctgctaacagaagcagataccagtccaggaaggtggagaacatgaaagccataacagctagacgtattctgcaaggcctagggcattatttgaaggcagaaggaaaagtggagtgctaccgaaccctgcatcctgttcctttgtattcatctagtgtgaaccgtgccttttcaagccccaaggtcgcagtggaagcctgtaacgccatgttgaaagagaactttccgactgtggcttcttactgtattattccagagtacgatgcctatttggacatggttgacggagcttcatgctgcttagacactgccagtttttgccctgcaaagctgcgcagctttccaaagaaacactcctatttggaacccacaatacgatcggcagtgccttcagcgatccagaacacgctccagaacgtcctggcagctgccacaaaaagaaattgcaatgtcacgcaaatgagagaattgcccgtattggattcggcggcctttaatgtggaatgcttcaagaaatatgcgtgtaataatgaatattgggaaacgtttaaagaaaaccccatcaggcttactgaagaaaacgtggtaaattacattaccaaattaaaaggaccaaaagctgctgctctttttgcgaagacacataatttgaatatgttgcaggacataccaatggacaggtttgtaatggacttaaagagagacgtgaaagtgactccaggaacaaaacatactgaagaacggcccaaggtacaggtgatccaggctgccgatccgctagcaacagcgtatctgtgcggaatccaccgagagctggttaggagattaaatgcggtcctgcttccgaacattcatacactgtttgatatgtcggctgaagactttgacgctattatagccgagcacttccagcctggggattgtgttctggaaactgacatcgcgtcgtttgataaaagtgaggacgacgccatggctctgaccgcgttaatgattctggaagacttaggtgtggacgcagagctgttgacgctgattgaggcggctttcggcgaaatttcatcaatacatttgcccactaaaactaaatttaaattcggagccatgatgaaatctggaatgttcctcacactgtttgtgaacacagtcattaacattgtaatcgcaagcagagtgttgagagaacggctaaccggatcaccatgtgcagcattcattggagatgacaatatcgtgaaaggagtcaaatcggacaaattaatggcagacaggtgcgccacctggttgaatatggaagtcaagattatagatgctgtggtgggcgagaaagcgccttatttctgtggagggtttattttgtgtgactccgtgaccggcacagcgtgccgtgtggcagaccccctaaaaaggctgtttaagcttggcaaacctctggcagcagacgatgaacatgatgatgacaggagaagggcattgcatgaagagtcaacacgctggaaccgagtgggtattctttcagagctgtgcaaggcagtagaatcaaggtatgaaaccgtaggaacttccatcatagttatggccatgactactctagctagcagtgttaaatcattcagctacctgagaggggcccctataactctctacggctaacctgaatggactacgactctagaatagtctttaattaagccaccatggcaggcatgtttcaggcgctgagcgaaggctgcaccccgtatgatattaaccagatgctgaacgtgctgggcgatcatcaggtctcaggccttgagcagcttgagagtataatcaactttgaaaaactgactgaatggaccagttctaatgttatgcctatcctgtctcctctgacaaagggcatcctgggcttcgtgtttaccctgaccgtgccttctgagagaggacttagctgcattagcgaagcggatgcgaccaccccggaaagcgcgaacctgggcgaagaaattctgagccagctgtatctttggccaagggtgacctaccattcccctagttatgcttaccaccaatttgaaagacgagccaaatataaaagacacttccccggctttggccagagcctgctgtttggctaccctgtgtacgtgttcggcgattgcgtgcagggcgattgggatgcgattcgctttcgctattgcgcgccgccgggctatgcgctgctgcgctgcaacgataccaactatagcgctctgctggctgtgggggccctagaaggacccaggaatcaggactggcttggtgtcccaagacaacttgtaactcggatgcaggctattcagaatgccggcctgtgtaccctggtggccatgctggaagagacaatcttctggctgcaagcgtttctgatggcgctgaccgatagcggcccgaaaaccaacattattgtggatagccagtatgtgatgggcattagcaaaccgagctttcaggaatttgtggattgggaaaacgtgagcccggaactgaacagcaccgatcagccgttttggcaagccggaatcctggccagaaatctggtgcctatggtggccacagtgcagggccagaacctgaagtaccagggtcagtcactagtcatctctgcttctatcattgtcttcaacctgctggaactggaaggtgattatcgagatgatggcaacgtgtgggtgcataccccgctgagcccgcgcaccctgaacgcgtgggtgaaagcggtggaagaaaaaaaaggtattccagttcacctagagctggccagtatgaccaacatggagctcatgagcagtattgtgcatcagcaggtcagaacatacggccccgtgttcatgtgtctcggcggactgcttacaatggtggctggtgctgtgtggctgacagtgcgagtgctcgagctgttccgggccgcgcagctggccaacgacgtggtcctccagatcatggagctttgtggtgcagcgtttcgccaggtgtgccataccaccgtgccgtggccgaacgcgagcctgaccccgaaatggaacaacgaaaccacccagccccagatcgccaactgcagcgtgtatgacttttttgtgtggctccattattattctgttcgagacacactttggccaagggtgacctaccatatgaacaaatatgcgtatcatatgctggaaagacgagccaaatataaaagaggaccaggacctggcgctaaatttgtggccgcctggacactgaaagccgctgctggtcctggacctggccagtacatcaaggccaacagcaagttcatcggcatcaccgaactcggacccggaccaggctgatgattcgaacggccgtatcacgcccaaacatttacagccgcggtgtcaaaaaccgcgtggacgtggttaacatccctgctgggaggatcagccgtaattattataattggcttggtgctggctactattgtggccatgtacgtgctgaccaaccagaaacataattgaatacagcagcaattggcaagctgcttacatagaactcgcggcgattggcatgccgccttaaaatttttattttattttttcttttcttttccgaatcggattttgtttttaatatttcaaaaaaaaaaaaaaaaaaaaaaaaaaaaaaaaaaaaaaaaaaaaaaaaaaaaaaaaaaaaaaaaaaaaaaaaaaaaaaaa

SEQ ID NO: 5 - DNA, 11447 bp, Venezuelan equine encephalitis virus; identical to SEQ ID NO: 3
  source 1..11447: mol_type = other DNA

SEQ ID NO: 6 - DNA, 7894 bp, synthetic construct
  misc_feature 1..7894: note = Description of Artificial Sequence: Synthetic polynucleotide
  source 1..7894: mol_type = other DNA
atgggcggcgcatgagagaagcccagaccaattacctacccaaaatggagaaagttcacgttgacatcgaggaagacagcccattcctcagagctttgcagcggagcttcccgcagtttgaggtagaagccaagcaggtcactgataatgaccatgctaatgccagagcgttttcgcatctggcttcaaaactgatcgaaacggaggtggacccatccgacacgatccttgacattggaagtgcgcccgcccgcagaatgtattctaagcacaagtatcattgtatctgtccgatgagatgtgcggaagatccggacagattgtataagtatgcaactaagctgaagaaaaactgtaaggaaataactgataaggaattggacaagaaaatgaaggagctcgccgccgtcatgagcgaccctgacctggaaactgagactatgtgcctccacgacgacgagtcgtgtcgctacgaagggcaagtcgctgtttaccaggatgtatacgcggttgacggaccgacaagtctctatcaccaagccaataagggagttagagtcgcctactggataggctttgacaccaccccttttatgtttaagaacttggctggagcatatccatcatactctaccaactgggccgacgaaaccgtgttaacggctcgtaacataggcctatgcagctctgacgttatggagcggtcacgtagagggatgtccattcttagaaagaagtatttgaaaccatccaacaatgttctattctctgttggctcgaccatctaccacgagaagagggacttactgaggagctggcacctgccgtctgtatttcacttacgtggcaagcaaaattacacatgtcggtgtgagactatagttagttgcgacgggtacgtcgttaaaagaatagctatcagtccaggcctgtatgggaagccttcaggctatgctgctacgatgcaccgcgagggattcttgtgctgcaaagtgacagacacattgaacggggagagggtctcttttcccgtgtgcacgtatgtgccagctacattgtgtgaccaaatgactggcatactggcaacagatgtcagtgcggacgacgcgcaaaaactgctggttgggctcaaccagcgtatagtcgtcaacggtcgcacccagagaaacaccaataccatgaaaaattaccttttgcccgtagtggcccaggcatttgctaggtgggcaaaggaatataaggaagatcaagaagatgaaaggccactaggactacgagatagacagttagtcatggggtgttgttgggcttttagaaggcacaagataacatctatttataagcgcccggatacccaaaccatcatcaaagtgaacagcgatttccactcattcgtgctgcccaggataggcagtaacacattggagatcgggctgagaacaagaatcaggaaaatgttagaggagcacaaggagccgtcacctctcattaccgccgaggacgtacaagaagctaagtgcgcagccgatgaggctaaggaggtgcgtgaagccgaggagttgcgcgcagctctaccacctttggcagctgatgttgaggagcccactctggaagccgatgtcgacttgatgttacaagaggctggggccggctcagtggagacacctcgtggcttgataaaggttaccagctacgctggcgaggacaagatcggctcttacgctgtgctttctccgcaggctgtactcaagagtgaaaaattatcttgcatccaccctctcgctgaacaagtcatagtgataacacactctggccgaaaagggcgttatgccgtggaaccataccatggtaaagtagtggtgccagagggacatgcaatacccgtccaggactttcaagctctgagtgaaagtgccaccattgtgtacaacgaacgtgagttcgtaaacaggtacctgcaccatattgccacacatggaggagcgctgaacactgatgaagaatattacaaaactgtcaagcccagcgagcacgacggcgaatacctgtacgacatcgacaggaaacagtgcgtcaagaaagaactagtcactgggctagggctcacaggcgagctggtggatcctcccttccatgaattcgcctacgagagtctgagaacacgaccagccgctccttaccaagtaccaaccataggggtgtatggcgtgccaggatcaggcaagtctggcatcattaaaagcgcagtcaccaaaaaagatctagtggtgagcgccaagaaagaaaactgtgcagaaattataagggacgtcaagaaaatgaaagggctggacgtcaatgccagaactgtggactcagtgctcttgaatggatgcaaacaccccgtagagaccctgtatattgacgaagcttttgcttgtcatgcaggtactctcagagcgctcatagccattataagacctaaaaaggcagtgctctgcggggatcccaaacagtgcggtttttttaacatgatgtgcctgaaagtgcattttaaccacgagatttgcacacaagtcttccacaaaagcatctctcgccgttgcactaaatctgtgacttcggtcgtctcaaccttgttttacgacaaaaaaatgagaacgacgaatccgaaagagactaagattgtgattgacactaccggcagtaccaaacctaagcaggacgatctcattctcacttgtttcagagggtgggtgaagcagttgcaaatagattacaaaggcaacgaaataatgacggcagctgcctctcaagggctgacccgtaaaggtgtgtatgccgttcggtacaaggtgaatgaaaatcctctgtacgcacccacctcagaacatgtgaacgtcctactgacccgcacggaggaccgcatcgtgtggaaaacactagccggcgacccatggataaaaacactgactgccaagtaccctgggaatttcactgccacgatagaggagtggcaagcagagcatgatgccatcatgaggcacatcttggagagaccggaccctaccgacgtcttccagaataaggcaaacgtgtgttgggccaaggctttagtgccggtgctgaagaccgctggcatagacatgaccactgaacaatggaacactgtggattattttgaaacggacaaagctcactcagcagagatagtattgaaccaactatgcgtgaggttctttggactcgatctggactccggtctattttctgcacccactgttccgttatccattaggaataatcactgggataactccccgtcgcctaacatgtacgggctgaataaagaagtggtccgtcagctctctcgcaggtacccacaactgcctcgggcagttgccactggaagagtctatgacatgaacactggtacactgcgcaattatgatccgcgcataaacctagtacctgtaaacagaagactgcctcatgctttagtcctccaccataatgaacacccacagagtgacttttcttcattcgtcagcaaattgaagggcagaactgtcctggtggtcggggaaaagttgtccgtcccaggcaaaatggttgactggttgtcagaccggcctgaggctaccttcagagctcggctggatttaggcatcccaggtgatgtgcccaaatatgacataatatttgttaatgtgaggaccccatataaataccatcactatcagcagtgtgaagaccatgccattaagcttagcatgttgaccaagaaagcttgtctgcatctgaatcccggcggaacctgtgtcagcataggttatggttacgctgacagggccagcgaaagcatcattggtgctatagcgcggcagttcaagttttcccgggtatgcaaaccgaaatcctcacttgaagagacggaagttctgtttgtattcattgggtacgatcgcaaggcccgtacgcacaatccttacaagctttcatcaaccttgaccaacatttatacaggttccagactccacgaagccggatgtgcaccctcatatcatgtggtgcgaggggatattgccacggccaccgaaggagtgattataaatgctgctaacagcaaaggacaacctggcggaggggtgtgcggagcgctgtataagaaattcccggaaagcttcgatttacagccgatcgaagtaggaaaagcgcgactggtcaaaggtgcagctaaacatatcattcatgccgtaggaccaaacttcaacaaagtttcggaggttgaaggtgacaaacagttggcagaggcttatgagtccatcgctaagattgtcaacgataacaattacaagtcagtagcgattccactgttgtccaccggcatcttttccgggaacaaagatcgactaacccaatcattgaaccatttgctgacagctttagacaccactgatgcagatgtagccatatactgcagggacaagaaatgggaaatgactctcaaggaagcagtggctaggagagaagcagtggaggagatatgcatatccgacgactcttcagtgacagaacctgatgcagagctggtgagggtgcatccgaagagttctttggctggaaggaagggctacagcacaagcgatggcaaaactttctcatatttggaagggaccaagtttcaccaggcggccaaggatatagcagaaattaatgccatgtggcccgttgcaacggaggccaatgagcaggtatgcatgtatatcctcggagaaagcatgagcagtattaggtcgaaatgccccgtcgaagagtcggaagcctccacaccacctagcacgctgccttgcttgtgcatccatgccatgactccagaaagagtacagcgcctaaaagcctcacgtccagaacaaattactgtgtgctcatcctttccattgccgaagtatagaatcactggtgtgcagaagatccaatgctcccagcctatattgttctcaccgaaagtgcctgcgtatattcatccaaggaagtatctcgtggaaacaccaccggtagacgagactccggagccatcggcagagaaccaatccacagaggggacacctgaacaaccaccacttataaccgaggatgagaccaggactagaacgcctgagccgatcatcatcgaagaggaagaagaggatagcataagtttgctgtcagatggcccgacccaccaggtgctgcaagtcgaggcagacattcacgggccgccctctgtatctagctcatcctggtccattcctcatgcatccgactttgatgtggacagtttatccatacttgacaccctggagggagctagcgtgaccagcggggcaacgtcagccgagactaactcttacttcgcaaagagtatggagtttctggcgcgaccggtgcctgcgcctcgaacagtattcaggaaccctccacatcccgctccgcgcacaagaacaccgtcacttgcacccagcagggcctgctcgagaaccagcctagtttccaccccgccaggcgtgaatagggtgatcactagagaggagctcgaggcgcttaccccgtcacgcactcctagcaggtcggtctcgagaaccagcctggtctccaacccgccaggcgtaaatagggtgattacaagagaggagtttgaggcgttcgtagcacaacaacaatgacggtttgatgcgggtgcatacatcttttcctccgacaccggtcaagggcatttacaacaaaaatcagtaaggcaaacggtgctatccgaagtggtgttggagaggaccgaattggagatttcgtatgccccgcgcctcgaccaagaaaaagaagaattactacgcaagaaattacagttaaatcccacacctgctaacagaagcagataccagtccaggaaggtggagaacatgaaagccataacagctagacgtattctgcaaggcctagggcattatttgaaggcagaaggaaaagtggagtgctaccgaaccctgcatcctgttcctttgtattcatctagtgtgaaccgtgccttttcaagccccaaggtcgcagtggaagcctgtaacgccatgttgaaagagaactttccgactgtggcttcttactgtattattccagagtacgatgcctatttggacatggttgacggagcttcatgctgcttagacactgccagtttttgccctgcaaagctgcgcagctttccaaagaaacactcctatttggaacccacaatacgatcggcagtgccttcagcgatccagaacacgctccagaacgtcctggcagctgccacaaaaagaaattgcaatgtcacgcaaatgagagaattgcccgtattggattcggcggcctttaatgtggaatgcttcaagaaatatgcgtgtaataatgaatattgggaaacgtttaaagaaaaccccatcaggcttactgaagaaaacgtggtaaattacattaccaaattaaaaggaccaaaagctgctgctctttttgcgaagacacataatttgaatatgttgcaggacataccaatggacaggtttgtaatggacttaaagagagacgtgaaagtgactccaggaacaaaacatactgaagaacggcccaaggtacaggtgatccaggctgccgatccgctagcaacagcgtatctgtgcggaatccaccgagagctggttaggagattaaatgcggtcctgcttccgaacattcatacactgtttgatatgtcggctgaagactttgacgctattatagccgagcacttccagcctggggattgtgttctggaaactgacatcgcgtcgtttgataaaagtgaggacgacgccatggctctgaccgcgttaatgattctggaagacttaggtgtggacgcagagctgttgacgctgattgaggcggctttcggcgaaatttcatcaatacatttgcccactaaaactaaatttaaattcggagccatgatgaaatctggaatgttcctcacactgtttgtgaacacagtcattaacattgtaatcgcaagcagagtgttgagagaacggctaaccggatcaccatgtgcagcattcattggagatgacaatatcgtgaaaggagtcaaatcggacaaattaatggcagacaggtgcgccacctggttgaatatggaagtcaagattatagatgctgtggtgggcgagaaagcgccttatttctgtggagggtttattttgtgtgactccgtgaccggcacagcgtgccgtgtggcagaccccctaaaaaggctgtttaagcttggcaaacctctggcagcagacgatgaacatgatgatgacaggagaagggcattgcatgaagagtcaacacgctggaaccgagtgggtattctttcagagctgtgcaaggcagtagaatcaaggtatgaaaccgtaggaacttccatcatagttatggccatgactactctagctagcagtgttaaatcattcagctacctgagaggggcccctataactctctacggctaacctgaatggactacgactatcacgcccaaacatttacagccgcggtgtcaaaaaccgcgtggacgtggttaacatccctgctgggaggatcagccgtaattattataattggcttggtgctggctactattgtggccatgtacgtgctgaccaaccagaaacataattgaatacagcagcaattggcaagctgcttacatagaactcgcggcgattggcatgccgccttaaaatttttattttattttttcttttcttttccgaatcggattttgtttttaatatttcaaaaaaaaaaaaaaaaaaaaaaaaaaaaaaaaaaaaaaaaaaaaaaaaaaaaaaaaaaaaaaaaaaaaaaaaaaaaaaaa

SEQ ID NO: 7 - DNA, 7893 bp, synthetic construct
  misc_feature 1..7893: note = Description of Artificial Sequence: Synthetic polynucleotide
  source 1..7893: mol_type = other DNA
ataggcggcgcatgagagaagcccagaccaattacctacccaaaatggagaaagttcacgttgacatcgaggaagacagcccattcctcagagctttgcagcggagcttcccgcagtttgaggtagaagccaagcaggtcactgataatgaccatgctaatgccagagcgttttcgcatctggcttcaaaactgatcgaaacggaggtggacccatccgacacgatccttgacattggaagtgcgcccgcccgcagaatgtattctaagcacaagtatcattgtatctgtccgatgagatgtgcggaagatccggacagattgtataagtatgcaactaagctgaagaaaaactgtaaggaaataactgataaggaattggacaagaaaatgaaggagctcgccgccgtcatgagcgaccctgacctggaaactgagactatgtgcctccacgacgacgagtcgtgtcgctacgaagggcaagtcgctgtttaccaggatgtatacgcggttgacggaccgacaagtctctatcaccaagccaataagggagttagagtcgcctactggataggctttgacaccaccccttttatgtttaagaacttggctggagcatatccatcatactctaccaactgggccgacgaaaccgtgttaacggctcgtaacataggcctatgcagctctgacgttatggagcggtcacgtagagggatgtccattcttagaaagaagtatttgaaaccatccaacaatgttctattctctgttggctcgaccatctaccacgagaagagggacttactgaggagctggcacctgccgtctgtatttcacttacgtggcaagcaaaattacacatgtcggtgtgagactatagttagttgcgacgggtacgtcgttaaaagaatagctatcagtccaggcctgtatgggaagccttcaggctatgctgctacgatgcaccgcgagggattcttgtgctgcaaagtgacagacacattgaacggggagagggtctcttttcccgtgtgcacgtatgtgccagctacattgtgtgaccaaatgactggcatactggcaacagatgtcagtgcggacgacgcgcaaaaactgctggttgggctcaaccagcgtatagtcgtcaacggtcgcacccagagaaacaccaataccatgaaaaattaccttttgcccgtagtggcccaggcatttgctaggtgggcaaaggaatataaggaagatcaagaagatgaaaggccactaggactacgagatagacagttagtcatggggtgttgttgggcttttagaaggcacaagataacatctatttataagcgcccggatacccaaaccatcatcaaagtgaacagcgatttccactcattcgtgctgcccaggataggcagtaacacattggagatcgggctgagaacaagaatcaggaaaatgttagaggagcacaaggagccgtcacctctcattaccgccgaggacgtacaagaagctaagtgcgcagccgatgaggctaaggaggtgcgtgaagccgaggagttgcgcgcagctctaccacctttggcagctgatgttgaggagcccactctggaagccgatgtcgacttgatgttacaagaggctggggccggctcagtggagacacctcgtggcttgataaaggttaccagctacgatggcgaggacaagatcggctcttacgctgtgctttctccgcaggctgtactcaagagtgaaaaattatcttgcatccaccctctcgctgaacaagtcatagtgataacacactctggccgaaaagggcgttatgccgtggaaccataccatggtaaagtagtggtgccagagggacatgcaatacccgtccaggactttcaagctctgagtgaaagtgccaccattgtgtacaacgaacgtgagttcgtaaacaggtacctgcaccatattgccacacatggaggagcgctgaacactgatgaagaatattacaaaactgtcaagcccagcgagcacgacggcgaatacctgtacgacatcgacaggaaacagtgcgtcaagaaagaactagtcactgggctagggctcacaggcgagctggtggatcctcccttccatgaattcgcctacgagagtctgagaacacgaccagccgctccttaccaagtaccaaccataggggtgtatggcgtgccaggatcaggcaagtctggcatcattaaaagcgcagtcaccaaaaaagatctagtggtgagcgccaagaaagaaaactgtgcagaaattataagggacgtcaagaaaatgaaagggctggacgtcaatgccagaactgtggactcagtgctcttgaatggatgcaaacaccccgtagagaccctgtatattgacgaagcttttgcttgtcatgcaggtactctcagagcgctcatagccattataagacctaaaaaggcagtgctctgcggggatcccaaacagtgcggtttttttaacatgatgtgcctgaaagtgcattttaaccacgagatttgcacacaagtcttccacaaaagcatctctcgccgttgcactaaatctgtgacttcggtcgtctcaaccttgttttacgacaaaaaaatgagaacgacgaatccgaaagagactaagattgtgattgacactaccggcagtaccaaacctaagcaggacgatctcattctcacttgtttcagagggtgggtgaagcagttgcaaatagattacaaaggcaacgaaataatgacggcagctgcctctcaagggctgacccgtaaaggtgtgtatgccgttcggtacaaggtgaatgaaaatcctctgtacgcacccacctcagaacatgtgaacgtcctactgacccgcacggaggaccgcatcgtgtggaaaacactagccggcgacccatggataaaaacactgactgccaagtaccctgggaatttcactgccacgatagaggagtggcaagcagagcatgatgccatcatgaggcacatcttggagagaccggaccctaccgacgtcttccagaataaggcaaacgtgtgttgggccaaggctttagtgccggtgctgaagaccgctggcatagacatgaccactgaacaatggaacactgtggattattttgaaacggacaaagctcactcagcagagatagtattgaaccaactatgcgtgaggttctttggactcgatctggactccggtctattttctgcacccactgttccgttatccattaggaataatcactgggataactccccgtcgcctaacatgtacgggctgaataaagaagtggtccgtcagctctctcgcaggtacccacaactgcctcgggcagttgccactggaagagtctatgacatgaacactggtacactgcgcaattatgatccgcgcataaacctagtacctgtaaacagaagactgcctcatgctttagtcctccaccataatgaacacccacagagtgacttttcttcattcgtcagcaaattgaagggcagaactgtcctggtggtcggggaaaagttgtccgtcccaggcaaaatggttgactggttgtcagaccggcctgaggctaccttcagagctcggctggatttaggcatcccaggtgatgtgcccaaatatgacataatatttgttaatgtgaggaccccatataaataccatcactatcagcagtgtgaagaccatgccattaagcttagcatgttgaccaagaaagcttgtctgcatctgaatcccggcggaacctgtgtcagcataggttatggttacgctgacagggccagcgaaagcatcattggtgctatagcgcggcagttcaagttttcccgggtatgcaaaccgaaatcctcacttgaagagacggaagttctgtttgtattcattgggtacgatcgcaaggcccgtacgcacaatccttacaagctttcatcaaccttgaccaacatttatacaggttccagactccacgaagccggatgtgcaccctcatatcatgtggtgcgaggggatattgccacggccaccgaaggagtgattataaatgctgctaacagcaaaggacaacctggcggaggggtgtgcggagcgctgtataagaaattcccggaaagcttcgatttacagccgatcgaagtaggaaaagcgcgactggtcaaaggtgcagctaaacatatcattcatgccgtaggaccaaacttcaacaaagtttcggaggttgaaggtgacaaacagttggcagaggcttatgagtccatcgctaagattgtcaacgataacaattacaagtcagtagcgattccactgttgtccaccggcatcttttccgggaacaaagatcgactaacccaatcattgaaccatttgctgacagctttagacaccactgatgcagatgtagccatatactgcagggacaagaaatgggaaatgactctcaaggaagcagtggctaggagagaagcagtggaggagatatgcatatccgacgactcttcagtgacagaacctgatgcagagctggtgagggtgcatccgaagagttctttggctggaaggaagggctacagcacaagcgatggcaaaactttctcatatttggaagggaccaagtttcaccaggcggccaaggatatagcagaaattaatgccatgtggcccgttgcaacggaggccaatgagcaggtatgcatgtatatcctcggagaaagcatgagcagtattaggtcgaaatgccccgtcgaagagtcggaagcctccacaccacctagcacgctgccttgcttgtgcatccatgccatgactccagaaagagtacagcgcctaaaagcctcacgtccagaacaaattactgtgtgctcatcctttccattgccgaagtatagaatcactggtgtgcagaagatccaatgctcccagcctatattgttctcaccgaaagtgcctgcgtatattcatccaaggaagtatctcgtggaaacaccaccggtagacgagactccggagccatcggcagagaaccaatccacagaggggacacctgaacaaccaccacttataaccgaggatgagaccaggactagaacgcctgagccgatcatcatcgaagaggaagaagaggatagcataagtttgctgtcagatggcccgacccaccaggtgctgcaagtcgaggcagacattcacgggccgccctctgtatctagctcatcctggtccattcctcatgcatccgactttgatgtggacagtttatccatacttgacaccctggagggagctagcgtgaccagcggggcaacgtcagccgagactaactcttacttcgcaaagagtatggagtttctggcgcgaccggtgcctgcgcctcgaacagtattcaggaaccctccacatcccgctccgcgcacaagaacaccgtcacttgcacccagcagggcctgctcgagaaccagcctagtttccaccccgccaggcgtgaatagggtgatcactagagaggagctcgaggcgcttaccccgtcacgcactcctagcaggtcggtctcgagaaccagcctggtctccaacccgccaggcgtaaatagggtgattacaagagaggagtttgaggcgttcgtagcacaacaacaatgacggtttgatgcgggtgcatacatcttttcctccgacaccggtcaagggcatttacaacaaaaatcagtaaggcaaacggtgctatccgaagtggtgttggagaggaccgaattggagatttcgtatgccccgcgcctcgaccaagaaaaagaagaattactacgcaagaaattacagttaaatcccacacctgctaacagaagcagataccagtccaggaaggtggagaacatgaaagccataacagctagacgtattctgcaaggcctagggcattatttgaaggcagaaggaaaagtggagtgctaccgaaccctgcatcctgttcctttgtattcatctagtgtgaaccgtgccttttcaagccccaaggtcgcagtggaagcctgtaacgccatgttgaaagagaactttccgactgtggcttcttactgtattattccagagtacgatgcctatttggacatggttgacggagcttcatgctgcttagacactgccagtttttgccctgcaaagctgcgcagctttccaaagaaacactcctatttggaacccacaatacgatcggcagtgccttcagcgatccagaacacgctccagaacgtcctggcagctgccacaaaaagaaattgcaatgtcacgcaaatgagagaattgcccgtattggattcggcggcctttaatgtggaatgcttcaagaaatatgcgtgtaataatgaatattgggaaacgtttaaagaaaaccccatcaggcttactgaagaaaacgtggtaaattacattaccaaattaaaaggaccaaaagctgctgctctttttgcgaagacacataatttgaatatgttgcaggacataccaatggacaggtttgtaatggacttaaagagagacgtgaaagtgactccaggaacaaaacatactgaagaacggcccaaggtacaggtgatccaggctgccgatccgctagcaacagcgtatctgtgcggaatccaccgagagctggttaggagattaaatgcggtcctgcttccgaacattcatacactgtttgatatgtcggctgaagactttgacgctattatagccgagcacttccagcctggggattgtgttctggaaactgacatcgcgtcgtttgataaaagtgaggacgacgccatggctctgaccgcgttaatgattctggaagacttaggtgtggacgcagagctgttgacgctgattgaggcggctttcggcgaaatttcatcaatacatttgcccactaaaactaaatttaaattcggagccatgatgaaatctggaatgttcctcacactgtttgtgaacacagtcattaacattgtaatcgcaagcagagtgttgagagaacggctaaccggatcaccatgtgcagcattcattggagatgacaatatcgtgaaaggagtcaaatcggacaaattaatggcagacaggtgcgccacctggttgaatatggaagtcaagattatagatgctgtggtgggcgagaaagcgccttatttctgtggagggtttattttgtgtgactccgtgaccggcacagcgtgccgtgtggcagaccccctaaaaaggctgtttaagcttggcaaacctctggcagcagacgatgaacatgatgatgacaggagaagggcattgcatgaagagtcaacacgctggaaccgagtgggtattctttcagagctgtgcaaggcagtagaatcaaggtatgaaaccgtaggaacttccatcatagttatggccatgactactctagctagcagtgttaaatcattcagctacctgagaggggcccctataactctctacggctaacctgaatggactacgactatcacgcccaaacatttacagccgcggtgtcaaaaaccgcgtggacgtggttaacatccctgctgggaggatcagccgtaattattataattggcttggtgctggctactattgtggccatgtacgtgctgaccaaccagaaacataattgaatacagcagcaattggcaagctgcttacatagaactcgcggcgattggcatgccgccttaaaatttttattttatttttcttttcttttccgaatcggattttgtttttaatatttcaaaaaaaaaaaaaaaaaaaaaaaaaaaaaaaaaaaaaaaaaaaaaaaaaaaaaaaaaaaaaaaaaaaaaaaaaaaaaaaa

SEQ ID NO: 8 - DNA, 7927 bp, synthetic construct
  misc_feature 1..7927: note = Description of Artificial Sequence: Synthetic polynucleotide
  source 1..7927: mol_type = other DNA
taatacgactcactataggatgggcggcgcatgagagaagcccagaccaattacctacccaaaatggagaaagttcacgttgacatcgaggaagacagcccattcctcagagctttgcagcggagcttcccgcagtttgaggtagaagccaagcaggtcactgataatgaccatgctaatgccagagcgttttcgcatctggcttcaaaactgatcgaaacggaggtggacccatccgacacgatccttgacattggaagtgcgcccgcccgcagaatgtattctaagcacaagtatcattgtatctgtccgatgagatgtgcggaagatccggacagattgtataagtatgcaactaagctgaagaaaaactgtaaggaaataactgataaggaattggacaagaaaatgaaggagctcgccgccgtcatgagcgaccctgacctggaaactgagactatgtgcctccacgacgacgagtcgtgtcgctacgaagggcaagtcgctgtttaccaggatgtatacgcggttgacggaccgacaagtctctatcaccaagccaataagggagttagagtcgcctactggataggctttgacaccaccccttttatgtttaagaacttggctggagcatatccatcatactctaccaactgggccgacgaaaccgtgttaacggctcgtaacataggcctatgcagctctgacgttatggagcggtcacgtagagggatgtccattcttagaaagaagtatttgaaaccatccaacaatgttctattctctgttggctcgaccatctaccacgagaagagggacttactgaggagctggcacctgccgtctgtatttcacttacgtggcaagcaaaattacacatgtcggtgtgagactatagttagttgcgacgggtacgtcgttaaaagaatagctatcagtccaggcctgtatgggaagccttcaggctatgctgctacgatgcaccgcgagggattcttgtgctgcaaagtgacagacacattgaacggggagagggtctcttttcccgtgtgcacgtatgtgccagctacattgtgtgaccaaatgactggcatactggcaacagatgtcagtgcggacgacgcgcaaaaactgctggttgggctcaaccagcgtatagtcgtcaacggtcgcacccagagaaacaccaataccatgaaaaattaccttttgcccgtagtggcccaggcatttgctaggtgggcaaaggaatataaggaagatcaagaagatgaaaggccactaggactacgagatagacagttagtcatggggtgttgttgggcttttagaaggcacaagataacatctatttataagcgcccggatacccaaaccatcatcaaagtgaacagcgatttccactcattcgtgctgcccaggataggcagtaacacattggagatcgggctgagaacaagaatcaggaaaatgttagaggagcacaaggagccgtcacctctcattaccgccgaggacgtacaagaagctaagtgcgcagccgatgaggctaaggaggtgcgtgaagccgaggagttgcgcgcagctctaccacctttggcagctgatgttgaggagcccactctggaagccgatgtcgacttgatgttacaagaggctggggccggctcagtggagacacctcgtggcttgataaaggttaccagctacgctggcgaggacaagatcggctcttacgctgtgctttctccgcaggctgtactcaagagtgaaaaattatcttgcatccaccctctcgctgaacaagtcatagtgataacacactctggccgaaaagggcgttatgccgtggaaccataccatggtaaagtagtggtgccagagggacatgcaatacccgtccaggactttcaagctctgagtgaaagtgccaccattgtgtacaacgaacgtgagttcgtaaacaggtacctgcaccatattgccacacatggaggagcgctgaacactgatgaagaatattacaaaactgtcaagcccagcgagcacgacggcgaatacctgtacgacatcgacaggaaacagtgcgtcaagaaagaactagtcactgggctagggctcacaggcgagctggtggatcctcccttccatgaattcgcctacgagagtctgagaacacgaccagccgctccttaccaagtaccaaccataggggtgtatggcgtgccaggatcaggcaagtctggcatcattaaaagcgcagtcaccaaaaaagatctagtggtgagcgccaagaaagaaaactgtgcagaaattataagggacgtcaagaaaatgaaagggctggacgtcaatgccagaactgtggactcagtgctcttgaatggatgcaaacaccccgtagagaccctgtatattgacgaagcttttgcttgtcatgcaggtactctcagagcgctcatagccattataagacctaaaaaggcagtgctctgcggggatcccaaacagtgcggtttttttaacatgatgtgcctgaaagtgcattttaaccacgagatttgcacacaagtcttccacaaaagcatctctcgccgttgcactaaatctgtgacttcggtcgtctcaaccttgttttacgacaaaaaaatgagaacgacgaatccgaaagagactaagattgtgattgacactaccggcagtaccaaacctaagcaggacgatctcattctcacttgtttcagagggtgggtgaagcagttgcaaatagattacaaaggcaacgaaataatgacggcagctgcctctcaagggctgacccgtaaaggtgtgtatgccgttcggtacaaggtgaatgaaaatcctctgtacgcacccacctcagaacatgtgaacgtcctactgacccgcacggaggaccgcatcgtgtggaaaacactagccggcgacccatggataaaaacactgactgccaagtaccctgggaatttcactgccacgatagaggagtggcaagcagagcatgatgccatcatgaggcacatcttggagagaccggaccctaccgacgtcttccagaataaggcaaacgtgtgttgggccaaggctttagtgccggtgctgaagaccgctggcatagacatgaccactgaacaatggaacactgtggattattttgaaacggacaaagctcactcagcagagatagtattgaaccaactatgcgtgaggttctttggactcgatctggactccggtctattttctgcacccactgttccgttatccattaggaataatcactgggataactccccgtcgcctaacatgtacgggctgaataaagaagtggtccgtcagctctctcgcaggtacccacaactgcctcgggcagttgccactggaagagtctatgacatgaacactggtacactgcgcaattatgatccgcgcataaacctagtacctgtaaacagaagactgcctcatgctttagtcctccaccataatgaacacccacagagtgacttttcttcattcgtcagcaaattgaagggcagaactgtcctggtggtcggggaaaagttgtccgtcccaggcaaaatggttgactggttgtcagaccggcctgaggctaccttcagagctcggctggatttaggcatcccaggtgatgtgcccaaatatgacataatatttgttaatgtgaggaccccatataaataccatcactatcagcagtgtgaagaccatgccattaagcttagcatgttgaccaagaaagcttgtctgcatctgaatcccggcggaacctgtgtcagcataggttatggttacgctgacagggccagcgaaagcatcattggtgctatagcgcggcagttcaagttttcccgggtatgcaaaccgaaatcctcacttgaagagacggaagttctgtttgtattcattgggtacgatcgcaaggcccgtacgcacaatccttacaagctttcatcaaccttgaccaacatttatacaggttccagactccacgaagccggatgtgcaccctcatatcatgtggtgcgaggggatattgccacggccaccgaaggagtgattataaatgctgctaacagcaaaggacaacctggcggaggggtgtgcggagcgctgtataagaaattcccggaaagcttcgatttacagccgatcgaagtaggaaaagcgcgactggtcaaaggtgcagctaaacatatcattcatgccgtaggaccaaacttcaacaaagtttcggaggttgaaggtgacaaacagttggcagaggcttatgagtccatcgctaagattgtcaacgataacaattacaagtcagtagcgattccactgttgtccaccggcatcttttccgggaacaaagatcgactaacccaatcattgaaccatttgctgacagctttagacaccactgatgcagatgtagccatatactgcagggacaagaaatgggaaatgactctcaaggaagcagtggctaggagagaagcagtggaggagatatgcatatccgacgactcttcagtgacagaacctgatgcagagctggtgagggtgcatccgaagagttctttggctggaaggaagggctacagcacaagcgatggcaaaactttctcatatttggaagggaccaagtttcaccaggcggccaaggatatagcagaaattaatgccatgtggcccgttgcaacggaggccaatgagcaggtatgcatgtatatcctcggagaaagcatgagcagtattaggtcgaaatgccccgtcgaagagtcggaagcctccacaccacctagcacgctgccttgcttgtgcatccatgccatgactccagaaagagtacagcgcctaaaagcctcacgtccagaacaaattactgtgtgctcatcctttccattgccgaagtatagaatcactggtgtgcagaagatccaatgctcccagcctatattgttctcaccgaaagtgcctgcgtatattcatccaaggaagtatctcgtggaaacaccaccggtagacgagactccggagccatcggcagagaaccaatccacagaggggacacctgaacaaccaccacttataaccgaggatgagaccaggactagaacgcctgagccgatcatcatcgaagaggaagaagaggatagcataagtttgctgtcagatggcccgacccaccaggtgctgcaagtcgaggcagacattcacgggccgccctctgtatctagctcatcctggtccattcctcatgcatccgactttgatgtggacagtttatccatacttgacaccctggagggagctagcgtgaccagcggggcaacgtcagccgagactaactcttacttcgcaaagagtatggagtttctggcgcgaccggtgcctgcgcctcgaacagtattcaggaaccctccacatcccgctccgcgcacaagaacaccgtcacttgcacccagcagggcctgctcgagaaccagcctagtttccaccccgccaggcgtgaatagggtgatcactagagaggagctcgaggcgcttaccccgtcacgcactcctagcaggtcggtctcgagaaccagcctggtctccaacccgccaggcgtaaatagggtgattacaagagaggagtttgaggcgttcgtagcacaacaacaatgacggtttgatgcgggtgcatacatcttttcctccgacaccggtcaagggcatttacaacaaaaatcagtaaggcaaacggtgctatccgaagtggtgttggagaggaccgaattggagatttcgtatgccccgcgcctcgaccaagaaaaagaagaattactacgcaagaaattacagttaaatcccacacctgctaacagaagcagataccagtccaggaaggtggagaacatgaaagccataacagctagacgtattctgcaaggcctagggcattatttgaaggcagaaggaaaagtggagtgctaccgaaccctgcatcctgttcctttgtattcatctagtgtgaaccgtgccttttcaagccccaaggtcgcagtggaagcctgtaacgccatgttgaaagagaactttccgactgtggcttcttactgtattattccagagtacgatgcctatttggacatggttgacggagcttcatgctgcttagacactgccagtttttgccctgcaaagctgcgcagctttccaaagaaacactcctatttggaacccacaatacgatcggcagtgccttcagcgatccagaacacgctccagaacgtcctggcagctgccacaaaaagaaattgcaatgtcacgcaaatgagagaattgcccgtattggattcggcggcctttaatgtggaatgcttcaagaaatatgcgtgtaataatgaatattgggaaacgtttaaagaaaaccccatcaggcttactgaagaaaacgtggtaaattacattaccaaattaaaaggaccaaaagctgctgctctttttgcgaagacacataatttgaatatgttgcaggacataccaatggacaggtttgtaatggacttaaagagagacgtgaaagtgactccaggaacaaaacatactgaagaacggcccaaggtacaggtgatccaggctgccgatccgctagcaacagcgtatctgtgcggaatccaccgagagctggttaggagattaaatgcggtcctgcttccgaacattcatacactgtttgatatgtcggctgaagactttgacgctattatagccgagcacttccagcctggggattgtgttctggaaactgacatcgcgtcgtttgataaaagtgaggacgacgccatggctctgaccgcgttaatgattctggaagacttaggtgtggacgcagagctgttgacgctgattgaggcggctttcggcgaaatttcatcaatacatttgcccactaaaactaaatttaaattcggagccatgatgaaatctggaatgttcctcacactgtttgtgaacacagtcattaacattgtaatcgcaagcagagtgttgagagaacggctaaccggatcaccatgtgcagcattcattggagatgacaatatcgtgaaaggagtcaaatcggacaaattaatggcagacaggtgcgccacctggttgaatatggaagtcaagattatagatgctgtggtgggcgagaaagcgccttatttctgtggagggtttattttgtgtgactccgtgaccggcacagcgtgccgtgtggcagaccccctaaaaaggctgtttaagcttggcaaacctctggcagcagacgatgaacatgatgatgacaggagaagggcattgcatgaagagtcaacacgctggaaccgagtgggtattctttcagagctgtgcaaggcagtagaatcaaggtatgaaaccgtaggaacttccatcatagttatggccatgactactctagctagcagtgttaaatcattcagctacctgagaggggcccctataactctctacggctaacctgaatggactacgactatcacgcccaaacatttacagccgcggtgtcaaaaaccgcgtggacgtggttaacatccctgctgggaggatcagccgtaattattataattggcttggtgctggctactattgtggccatgtacgtgctgaccaaccagaaacataattgaatacagcagcaattggcaagctgcttacatagaactcgcggcgattggcatgccgccttaaaatttttattttattttttcttttcttttccgaatcggattttgtttttaatatttcaaaaaaaaaaaaaaaaaaaaaaaaaaaaaaaaaaaaaaaaaaaaaaaaaaaaaaaaaaaaaaaaaaaaaaaaaaaaaaaatacgtagtttaaac

SEQ ID NO: 9 - DNA, 7926 bp, synthetic construct
  misc_feature 1..7926: note = Description of Artificial Sequence: Synthetic polynucleotide
  source 1..7926: mol_type = other DNA
taatacgactcactataggataggcggcgcatgagagaagcccagaccaattacctacccaaaatggagaaagttcacgttgacatcgaggaagacagcccattcctcagagctttgcagcggagcttcccgcagtttgaggtagaagccaagcaggtcactgataatgaccatgctaatgccagagcgttttcgcatctggcttcaaaactgatcgaaacggaggtggacccatccgacacgatccttgacattggaagtgcgcccgcccgcagaatgtattctaagcacaagtatcattgtatctgtccgatgagatgtgcggaagatccggacagattgtataagtatgcaactaagctgaagaaaaactgtaaggaaataactgataaggaattggacaagaaaatgaaggagctcgccgccgtcatgagcgaccctgacctggaaactgagactatgtgcctccacgacgacgagtcgtgtcgctacgaagggcaagtcgctgtttaccaggatgtatacgcggttgacggaccgacaagtctctatcaccaagccaataagggagttagagtcgcctactggataggctttgacaccaccccttttatgtttaagaacttggctggagcatatccatcatactctaccaactgggccgacgaaaccgtgttaacggctcgtaacataggcctatgcagctctgacgttatggagcggtcacgtagagggatgtccattcttagaaagaagtatttgaaaccatccaacaatgttctattctctgttggctcgaccatctaccacgagaagagggacttactgaggagctggcacctgccgtctgtatttcacttacgtggcaagcaaaattacacatgtcggtgtgagactatagttagttgcgacgggtacgtcgttaaaagaatagctatcagtccaggcctgtatgggaagccttcaggctatgctgctacgatgcaccgcgagggattcttgtgctgcaaagtgacagacacattgaacggggagagggtctcttttcccgtgtgcacgtatgtgccagctacattgtgtgaccaaatgactggcatactggcaacagatgtcagtgcggacgacgcgcaaaaactgctggttgggctcaaccagcgtatagtcgtcaacggtcgcacccagagaaacaccaataccatgaaaaattaccttttgcccgtagtggcccaggcatttgctaggtgggcaaaggaatataaggaagatcaagaagatgaaaggccactaggactacgagatagacagttagtcatggggtgttgttgggcttttagaaggcacaagataacatctatttataagcgcccggatacccaaaccatcatcaaagtgaacagcgatttccactcattcgtgctgcccaggataggcagtaacacattggagatcgggctgagaacaagaatcaggaaaatgttagaggagcacaaggagccgtcacctctcattaccgccgaggacgtacaagaagctaagtgcgcagccgatgaggctaaggaggtgcgtgaagccgaggagttgcgcgcagctctaccacctttggcagctgatgttgaggagcccactctggaagccgatgtcgacttgatgttacaagaggctggggccggctcagtggagacacctcgtggcttgataaaggttaccagctacgatggcgaggacaagatcggctcttacgctgtgctttctccgcaggctgtactcaagagtgaaaaattatcttgcatccaccctctcgctgaacaagtcatagtgataacacactctggccgaaaagggcgttatgccgtggaaccataccatggtaaagtagtggtgccagagggacatgcaatacccgtccaggactttcaagctctgagtgaaagtgccaccattgtgtacaacgaacgtgagttcgtaaacaggtacctgcaccatattgccacacatggaggagcgctgaacactgatgaagaatattacaaaactgtcaagcccagcgagcacgacggcgaatacctgtacgacatcgacaggaaacagtgcgtcaagaaagaactagtcactgggctagggctcacaggcgagctggtggatcctcccttccatgaattcgcctacgagagtctgagaacacgaccagccgctccttaccaagtaccaaccataggggtgtatggcgtgccaggatcaggcaagtctggcatcattaaaagcgcagtcaccaaaaaagatctagtggtgagcgccaagaaagaaaactgtgcagaaattataagggacgtcaagaaaatgaaagggctggacgtcaatgccagaactgtggactcagtgctcttgaatggatgcaaacaccccgtagagaccctgtatattgacgaagcttttgcttgtcatgcaggtactctcagagcgctcatagccattataagacctaaaaaggcagtgctctgcggggatcccaaacagtgcggtttttttaacatgatgtgcctgaaagtgcattttaaccacgagatttgcacacaagtcttccacaaaagcatctctcgccgttgcactaaatctgtgacttcggtcgtctcaaccttgttttacgacaaaaaaatgagaacgacgaatccgaaagagactaagattgtgattgacactaccggcagtaccaaacctaagcaggacgatctcattctcacttgtttcagagggtgggtgaagcagttgcaaatagattacaaaggcaacgaaataatgacggcagctgcctctcaagggctgacccgtaaaggtgtgtatgccgttcggtacaaggtgaatgaaaatcctctgtacgcacccacctcagaacatgtgaacgtcctactgacccgcacggaggaccgcatcgtgtggaaaacactagccggcgacccatggataaaaacactgactgccaagtaccctgggaatttcactgccacgatagaggagtggcaagcagagcatgatgccatcatgaggcacatcttggagagaccggaccctaccgacgtcttccagaataaggcaaacgtgtgttgggccaaggctttagtgccggtgctgaagaccgctggcatagacatgaccactgaacaatggaacactgtggattattttgaaacggacaaagctcactcagcagagatagtattgaaccaactatgcgtgaggttctttggactcgatctggactccggtctattttctgcacccactgttccgttatccattaggaataatcactgggataactccccgtcgcctaacatgtacgggctgaataaagaagtggtccgtcagctctctcgcaggtacccacaactgcctcgggcagttgccactggaagagtctatgacatgaacactggtacactgcgcaattatgatccgcgcataaacctagtacctgtaaacagaagactgcctcatgctttagtcctccaccataatgaacacccacagagtgacttttcttcattcgtcagcaaattgaagggcagaactgtcctggtggtcggggaaaagttgtccgtcccaggcaaaatggttgactggttgtcagaccggcctgaggctaccttcagagctcggctggatttaggcatcccaggtgatgtgcccaaatatgacataatatttgttaatgtgaggaccccatataaataccatcactatcagcagtgtgaagaccatgccattaagcttagcatgttgaccaagaaagcttgtctgcatctgaatcccggcggaacctgtgtcagcataggttatggttacgctgacagggccagcgaaagcatcattggtgctatagcgcggcagttcaagttttcccgggtatgcaaaccgaaatcctcacttgaagagacggaagttctgtttgtattcattgggtacgatcgcaaggcccgtacgcacaatccttacaagctttcatcaaccttgaccaacatttatacaggttccagactccacgaagccggatgtgcaccctcatatcatgtggtgcgaggggatattgccacggccaccgaaggagtgattataaatgctgctaacagcaaaggacaacctggcggaggggtgtgcggagcgctgtataagaaattcccggaaagcttcgatttacagccgatcgaagtaggaaaagcgcgactggtcaaaggtgcagctaaacatatcattcatgccgtaggaccaaacttcaacaaagtttcggaggttgaaggtgacaaacagttggcagaggcttatgagtccatcgctaagattgtcaacgataacaattacaagtcagtagcgattccactgttgtccaccggcatcttttccgggaacaaagatcgactaacccaatcattgaaccatttgctgacagctttagacaccactgatgcagatgtagccatatactgcagggacaagaaatgggaaatgactctcaaggaagcagtggctaggagagaagcagtggaggagatatgcatatccgacgactcttcagtgacagaacctgatgcagagctggtgagggtgcatccgaagagttctttggctggaaggaagggctacagcacaagcgatggcaaaactttctcatatttggaagggaccaagtttcaccaggcggccaaggatatagcagaaattaatgccatgtggcccgttgcaacggaggccaatgagcaggtatgcatgtatatcctcggagaaagcatgagcagtattaggtcgaaatgccccgtcgaagagtcggaagcctccacaccacctagcacgctgccttgcttgtgcatccatgccatgactccagaaagagtacagcgcctaaaagcctcacgtccagaacaaattactgtgtgctcatcctttccattgccgaagtatagaatcactggtgtgcagaagatccaatgctcccagcctatattgttctcaccgaaagtgcctgcgtatattcatccaaggaagtatctcgtggaaacaccaccggtagacgagactccggagccatcggcagagaaccaatccacagaggggacacctgaacaaccaccacttataaccgaggatgagaccaggactagaacgcctgagccgatcatcatcgaagaggaagaagaggatagcataagtttgctgtcagatggcccgacccaccaggtgctgcaagtcgaggcagacattcacgggccgccctctgtatctagctcatcctggtccattcctcatgcatccgactttgatgtggacagtttatccatacttgacaccctggagggagctagcgtgaccagcggggcaacgtcagccgagactaactcttacttcgcaaagagtatggagtttctggcgcgaccggtgcctgcgcctcgaacagtattcaggaaccctccacatcccgctccgcgcacaagaacaccgtcacttgcacccagcagggcctgctcgagaaccagcctagtttccaccccgccaggcgtgaatagggtgatcactagagaggagctcgaggcgcttaccccgtcacgcactcctagcaggtcggtctcgagaaccagcctggtctccaacccgccaggcgtaaatagggtgattacaagagaggagtttgaggcgttcgtagcacaacaacaatgacggtttgatgcgggtgcatacatcttttcctccgacaccggtcaagggcatttacaacaaaaatcagtaaggcaaacggtgctatccgaagtggtgttggagaggaccgaattggagatttcgtatgccccgcgcctcgaccaagaaaaagaagaattactacgcaagaaattacagttaaatcccacacctgctaacagaagcagataccagtccaggaaggtggagaacatgaaagccataacagctagacgtattctgcaaggcctagggcattatttgaaggcagaaggaaaagtggagtgctaccgaaccctgcatcctgttcctttgtattcatctagtgtgaaccgtgccttttcaagccccaaggtcgcagtggaagcctgtaacgccatgttgaaagagaactttccgactgtggcttcttactgtattattccagagtacgatgcctatttggacatggttgacggagcttcatgctgcttagacactgccagtttttgccctgcaaagctgcgcagctttccaaagaaacactcctatttggaacccacaatacgatcggcagtgccttcagcgatccagaacacgctccagaacgtcctggcagctgccacaaaaagaaattgcaatgtcacgcaaatgagagaattgcccgtattggattcggcggcctttaatgtggaatgcttcaagaaatatgcgtgtaataatgaatattgggaaacgtttaaagaaaaccccatcaggcttactgaagaaaacgtggtaaattacattaccaaattaaaaggaccaaaagctgctgctctttttgcgaagacacataatttgaatatgttgcaggacataccaatggacaggtttgtaatggacttaaagagagacgtgaaagtgactccaggaacaaaacatactgaagaacggcccaaggtacaggtgatccaggctgccgatccgctagcaacagcgtatctgtgcggaatccaccgagagctggttaggagattaaatgcggtcctgcttccgaacattcatacactgtttgatatgtcggctgaagactttgacgctattatagccgagcacttccagcctggggattgtgttctggaaactgacatcgcgtcgtttgataaaagtgaggacgacgccatggctctgaccgcgttaatgattctggaagacttaggtgtggacgcagagctgttgacgctgattgaggcggctttcggcgaaatttcatcaatacatttgcccactaaaactaaatttaaattcggagccatgatgaaatctggaatgttcctcacactgtttgtgaacacagtcattaacattgtaatcgcaagcagagtgttgagagaacggctaaccggatcaccatgtgcagcattcattggagatgacaatatcgtgaaaggagtcaaatcggacaaattaatggcagacaggtgcgccacctggttgaatatggaagtcaagattatagatgctgtggtgggcgagaaagcgccttatttctgtggagggtttattttgtgtgactccgtgaccggcacagcgtgccgtgtggcagaccccctaaaaaggctgtttaagcttggcaaacctctggcagcagacgatgaacatgatgatgacaggagaagggcattgcatgaagagtcaacacgctggaaccgagtgggtattctttcagagctgtgcaaggcagtagaatcaaggtatgaaaccgtaggaacttccatcatagttatggccatgactactctagctagcagtgttaaatcattcagctacctgagaggggcccctataactctctacggctaacctgaatggactacgactatcacgcccaaacatttacagccgcggtgtcaaaaaccgcgtggacgtggttaacatccctgctgggaggatcagccgtaattattataattggcttggtgctggctactattgtggccatgtacgtgctgaccaaccagaaacataattgaatacagcagcaattggcaagctgcttacatagaactcgcggcgattggcatgccgccttaaaatttttattttatttttcttttcttttccgaatcggattttgtttttaatatttcaaaaaaaaaaaaaaaaaaaaaaaaaaaaaaaaaaaaaaaaaaaaaaaaaaaaaaaaaaaaaaaaaaaaaaaaaaaaaaaatacgtagtttaaac

SEQ ID NO: 10 - DNA, 36519 bp, synthetic construct
  misc_feature 1..36519: note = Description of Artificial Sequence: Synthetic polynucleotide
  source 1..36519: mol_type = other DNA
ccatcttcaataatatacctcaaactttttgtgcgcgttaatatgcaaatgaggcgtttgaatttggggaggaagggcggtgattggtcgagggatgagcgaccgttaggggcggggcgagtgacgttttgatgacgtggttgcgaggaggagccagtttgcaagttctcgtgggaaaagtgacgtcaaacgaggtgtggtttgaacacggaaatactcaattttcccgcgctctctgacaggaaatgaggtgtttctgggcggatgcaagtgaaaacgggccattttcgcgcgaaaactgaatgaggaagtgaaaatctgagtaatttcgcgtttatggcagggaggagtatttgccgagggccgagtagactttgaccgattacgtgggggtttcgattaccgtgtttttcacctaaatttccgcgtacggtgtcaaagtccggtgtttttacgtaggtgtcagctgatcgccagggtatttaaacctgcgctctccagtcaagaggccactcttgagtgccagcgagaagagttttctcctccgcgccgcgagtcagatctacactttgaaagatgaggcacctgagagacctgcccgatgagaaaatcatcatcgcttccgggaacgagattctggaactggtggtaaatgccatgatgggcgacgaccctccggagccccccaccccatttgagacaccttcgctgcacgatttgtatgatctggaggtggatgtgcccgaggacgatcccaatgaggaggcggtaaatgatttttttagcgatgccgcgctgctagctgccgaggaggcttcgagctctagctcagacagcgactcttcactgcatacccctagacccggcagaggtgagaaaaagatccccgagcttaaaggggaagagatggacttgcgctgctatgaggaatgcttgcccccgagcgatgatgaggacgagcaggcgatccagaacgcagcgagccagggagtgcaagccgccagcgagagctttgcgctggactgcccgcctctgcccggacacggctgtaagtcttgtgaatttcatcgcatgaatactggagataaagctgtgttgtgtgcactttgctatatgagagcttacaaccattgtgtttacagtaagtgtgattaagttgaactttagagggaggcagagagcagggtgactgggcgatgactggtttatttatgtatatatgttctttatataggtcccgtctctgacgcagatgatgagacccccactacaaagtccacttcgtcacccccagaaattggcacatctccacctgagaatattgttagaccagttcctgttagagccactgggaggagagcagctgtggaatgtttggatgacttgctacagggtggggttgaacctttggacttgtgtacccggaaacgccccaggcactaagtgccacacatgtgtgtttacttgaggtgatgtcagtatttatagggtgtggagtgcaataaaaaatgtgttgactttaagtgcgtggtttatgactcaggggtggggactgtgagtatataagcaggtgcagacctgtgtggttagctcagagcggcatggagatttggacggtcttggaagactttcacaagactagacagctgctagagaacgcctcgaacggagtctcttacctgtggagattctgcttcggtggcgacctagctaggctagtctacagggccaaacaggattatagtgaacaatttgaggttattttgagagagtgttctggtctttttgacgctcttaacttgggccatcagtctcactttaaccagaggatttcgagagcccttgattttactactcctggcagaaccactgcagcagtagccttttttgcttttattcttgacaaatggagtcaagaaacccatttcagcagggattaccagctggatttcttagcagtagctttgtggagaacatggaagtgccagcgcctgaatgcaatctccggctacttgccggtacagccgctagacactctgaggatcctgaatctccaggagagtcccagggcacgccaacgtcgccagcagcagcagcaggaggaggatcaagaagagaacccgagagccggcctggaccctccggcggaggaggaggagtagctgacctgtttcctgaactgcgccgggtgctgactaggtcttcgagtggtcgggagagggggattaagcgggagaggcatgatgagactaatcacagaactgaactgactgtgggtctgatgagtcgcaagcgcccagaaacagtgtggtggcatgaggtgcagtcgactggcacagatgaggtgtcggtgatgcatgagaggttttctctagaacaagtcaagacttgttggttagagcctgaggatgattgggaggtagccatcaggaattatgccaagctggctctgaggccagacaagaagtacaagattactaagctgataaatatcagaaatgcctgctacatctcagggaatggggctgaagtggagatctgtctccaggaaagggtggctttcagatgctgcatgatgaatatgtacccgggagtggtgggcatggatggggttacctttatgaacatgaggttcaggggagatgggtataatggcacggtctttatggccaataccaagctgacagtccatggctgctccttctttgggtttaataacacctgcatcgaggcctggggtcaggtcggtgtgaggggctgcagtttttcagccaactggatgggggtcgtgggcaggaccaagagtatgctgtccgtgaagaaatgcttgtttgagaggtgccacctgggggtgatgagcgagggcgaagccagaatccgccactgcgcctctaccgagacgggctgctttgtgctgtgcaagggcaatgctaagatcaagcataatatgatctgtggagcctcggacgagcgcggctaccagatgctgacctgcgccggcgggaacagccatatgctggccaccgtacatgtggcttcccatgctcgcaagccctggcccgagttcgagcacaatgtcatgaccaggtgcaatatgcatctggggtcccgccgaggcatgttcatgccctaccagtgcaacctgaattatgtgaaggtgctgctggagcccgatgccatgtccagagtgagcctgacgggggtgtttgacatgaatgtggaggtgtggaagattctgagatatgatgaatccaagaccaggtgccgagcctgcgagtgcggagggaagcatgccaggttccagcccgtgtgtgtggatgtgacggaggacctgcgacccgatcatttggtgttgccctgcaccgggacggagttcggttccagcggggaagaatctgactagagtgagtagtgttctggggcgggggaggacctgcatgagggccagaataactgaaatctgtgcttttctgtgtgttgcagcagcatgagcggaagcggctcctttgagggaggggtattcagcccttatctgacggggcgtctcccctcctgggcgggagtgcgtcagaatgtgatgggatccacggtggacggccggcccgtgcagcccgcgaactcttcaaccctgacctatgcaaccctgagctcttcgtcgttggacgcagctgccgccgcagctgctgcatctgccgccagcgccgtgcgcggaatggccatgggcgccggctactacggcactctggtggccaactcgagttccaccaataatcccgccagcctgaacgaggagaagctgttgctgctgatggcccagctcgaggccttgacccagcgcctgggcgagctgacccagcaggtggctcagctgcaggagcagacgcgggccgcggttgccacggtgaaatccaaataaaaaatgaatcaataaataaacggagacggttgttgattttaacacagagtctgaatctttatttgatttttcgcgcgcggtaggccctggaccaccggtctcgatcattgagcacccggtggatcttttccaggacccggtagaggtgggcttggatgttgaggtacatgggcatgagcccgtcccgggggtggaggtagctccattgcagggcctcgtgctcgggggtggtgttgtaaatcacccagtcatagcaggggcgcagggcatggtgttgcacaatatctttgaggaggagactgatggccacgggcagccctttggtgtaggtgtttacaaatctgttgagctgggagggatgcatgcggggggagatgaggtgcatcttggcctggatcttgagattggcgatgttaccgcccagatcccgcctggggttcatgttgtgcaggaccaccagcacggtgtatccggtgcacttggggaatttatcatgcaacttggaagggaaggcgtgaaagaatttggcgacgcctttgtgcccgcccaggttttccatgcactcatccatgatgatggcgatgggcccgtgggcggcggcctgggcaaagacgtttcgggggtcggacacatcatagttgtggtcctgggtgaggtcatcataggccattttaatgaatttggggcggagggtgccggactgggggacaaaggtaccctcgatcccgggggcgtagttcccctcacagatctgcatctcccaggctttgagctcggagggggggatcatgtccacctgcggggcgataaagaacacggtttccggggcgggggagatgagctgggccgaaagcaagttccggagcagctgggacttgccgcagccggtggggccgtagatgaccccgatgaccggctgcaggtggtagttgagggagagacagctgccgtcctcccggaggaggggggccacctcgttcatcatctcgcgcacgtgcatgttctcgcgcaccagttccgccaggaggcgctctccccccagggataggagctcctggagcgaggcgaagtttttcagcggcttgagtccgtcggccatgggcattttggagagggtttgttgcaagagttccaggcggtcccagagctcggtgatgtgctctacggcatctcgatccagcagacctcctcgtttcgcgggttgggacggctgcgggagtagggcaccagacgatgggcgtccagcgcagccagggtccggtccttccagggtcgcagcgtccgcgtcagggtggtctccgtcacggtgaaggggtgcgcgccgggctgggcgcttgcgagggtgcgcttcaggctcatccggctggtcgaaaaccgctcccgatcggcgccctgcgcgtcggccaggtagcaattgaccatgagttcgtagttgagcgcctcggccgcgtggcctttggcgcggagcttacctttggaagtctgcccgcaggcgggacagaggagggacttgagggcgtagagcttgggggcgaggaagacggactcgggggcgtaggcgtccgcgccgcagtgggcgcagacggtctcgcactccacgagccaggtgaggtcgggctggtcggggtcaaaaaccagtttcccgccgttctttttgatgcgtttcttacctttggtctccatgagctcgtgtccccgctgggtgacaaagaggctgtccgtgtccccgtagaccgactttatgggccggtcctcgagcggtgtgccgcggtcctcctcgtagaggaaccccgcccactccgagacgaaagcccgggtccaggccagcacgaaggaggccacgtgggacgggtagcggtcgttgtccaccagcgggtccaccttttccagggtatgcaaacacatgtccccctcgtccacatccaggaaggtgattggcttgtaagtgtaggccacgtgaccgggggtcccggccgggggggtataaaagggtgcgggtccctgctcgtcctcactgtcttccggatcgctgtccaggagcgccagctgttggggtaggtattccctctcgaaggcgggcatgacctcggcactcaggttgtcagtttctagaaacgaggaggatttgatattgacggtgccggcggagatgcctttcaagagcccctcgtccatctggtcagaaaagacgatctttttgttgtcgagcttggtggcgaaggagccgtagagggcgttggagaggagcttggcgatggagcgcatggtctggtttttttccttgtcggcgcgctccttggcggcgatgttgagctgcacgtactcgcgcgccacgcacttccattcggggaagacggtggtcagctcgtcgggcacgattctgacctgccagccccgattatgcagggtgatgaggtccacactggtggccacctcgccgcgcaggggctcattagtccagcagaggcgtccgcccttgcgcgagcagaaggggggcagggggtccagcatgacctcgtcgggggggtcggcatcgatggtgaagatgccgggcaggaggtcggggtcaaagtagctgatggaagtggccagatcgtccagggcagcttgccattcgcgcacggccagcgcgcgctcgtagggactgaggggcgtgccccagggcatgggatgggtaagcgcggaggcgtacatgccgcagatgtcgtagacgtagaggggctcctcgaggatgccgatgtaggtggggtagcagcgccccccgcggatgctggcgcgcacgtagtcatacagctcgtgcgagggggcgaggagccccgggcccaggttggtgcgactgggcttttcggcgcggtagacgatctggcggaaaatggcatgcgagttggaggagatggtgggcctttggaagatgttgaagtgggcgtggggcagtccgaccgagtcgcggatgaagtgggcgtaggagtcttgcagcttggcgacgagctcggcggtgactaggacgtccagagcgcagtagtcgagggtctcctggatgatgtcatacttgagctgtcccttttgtttccacagctcgcggttgagaaggaactcttcgcggtccttccagtactcttcgagggggaacccgtcctgatctgcacggtaagagcctagcatgtagaactggttgacggccttgtaggcgcagcagcccttctccacggggagggcgtaggcctgggcggccttgcgcagggaggtgtgcgtgagggcgaaagtgtccctgaccatgaccttgaggaactggtgcttgaagtcgatatcgtcgcagcccccctgctcccagagctggaagtccgtgcgcttcttgtaggcggggttgggcaaagcgaaagtaacatcgttgaagaggatcttgcccgcgcggggcataaagttgcgagtgatgcggaaaggttggggcacctcggcccggttgttgatgacctgggcggcgagcacgatctcgtcgaagccgttgatgttgtggcccacgatgtagagttccacgaatcgcggacggcccttgacgtggggcagtttcttgagctcctcgtaggtgagctcgtcggggtcgctgagcccgtgctgctcgagcgcccagtcggcgagatgggggttggcgcggaggaaggaagtccagagatccacggccagggcggtttgcagacggtcccggtactgacggaactgctgcccgacggccattttttcgggggtgacgcagtagaaggtgcgggggtccccgtgccagcgatcccatttgagctggagggcgagatcgagggcgagctcgacgagccggtcgtccccggagagtttcatgaccagcatgaaggggacgagctgcttgccgaaggaccccatccaggtgtaggtttccacatcgtaggtgaggaagagcctttcggtgcgaggatgcgagccgatggggaagaactggatctcctgccaccaattggaggaatggctgttgatgtgatggaagtagaaatgccgacggcgcgccgaacactcgtgcttgtgtttatacaagcggccacagtgctcgcaacgctgcacgggatgcacgtgctgcacgagctgtacctgagttcctttgacgaggaatttcagtgggaagtggagtcgtggcgcctgcatctcgtgctgtactacgtcgtggtggtcggcctggccctcttctgcctcgatggtggtcatgctgacgagcccgcgcgggaggcaggtccagacctcggcgcgagcgggtcggagagcgaggacgagggcgcgcaggccggagctgtccagggtcctgagacgctgcggagtcaggtcagtgggcagcggcggcgcgcggttgacttgcaggagtttttccagggcgcgcgggaggtccagatggtacttgatctccaccgcgccattggtggcgacgtcgatggcttgcagggtcccgtgcccctggggtgtgaccaccgtcccccgtttcttcttgggcggctggggcgacgggggcggtgcctcttccatggttagaagcggcggcgaggacgcgcgccgggcggcaggggcggctcggggcccggaggcaggggcggcaggggcacgtcggcgccgcgcgcgggtaggttctggtactgcgcccggagaagactggcgtgagcgacgacgcgacggttgacgtcctggatctgacgcctctgggtgaaggccacgggacccgtgagtttgaacctgaaagagagttcgacagaatcaatctcggtatcgttgacggcggcctgccgcaggatctcttgcacgtcgcccgagttgtcctggtaggcgatctcggtcatgaactgctcgatctcctcctcttgaaggtctccgcggccggcgcgctccacggtggccgcgaggtcgttggagatgcggcccatgagctgcgagaaggcgttcatgcccgcctcgttccagacgcggctgtagaccacgacgccctcgggatcgcgggcgcgcatgaccacctgggcgaggttgagctccacgtggcgcgtgaagaccgcgtagttgcagaggcgctggtagaggtagttgagcgtggtggcgatgtgctcggtgacgaagaaatacatgatccagcggcggagcggcatctcgctgacgtcgcccagcgcctccaaacgttccatggcctcgtaaaagtccacggcgaagttgaaaaactgggagttgcgcgccgagacggtcaactcctcctccagaagacggatgagctcggcgatggtggcgcgcacctcgcgctcgaaggcccccgggagttcctccacttcctcttcttcctcctccactaacatctcttctacttcctcctcaggcggcagtggtggcgggggagggggcctgcgtcgccggcggcgcacgggcagacggtcgatgaagcgctcgatggtctcgccgcgccggcgtcgcatggtctcggtgacggcgcgcccgtcctcgcggggccgcagcgtgaagacgccgccgcgcatctccaggtggccgggggggtccccgttgggcagggagagggcgctgacgatgcatcttatcaattgccccgtagggactccgcgcaaggacctgagcgtctcgagatccacgggatctgaaaaccgctgaacgaaggcttcgagccagtcgcagtcgcaaggtaggctgagcacggtttcttctggcgggtcatgttggttgggagcggggcgggcgatgctgctggtgatgaagttgaaataggcggttctgagacggcggatggtggcgaggagcaccaggtctttgggcccggcttgctggatgcgcagacggtcggccatgccccaggcgtggtcctgacacctggccaggtccttgtagtagtcctgcatgagccgctccacgggcacctcctcctcgcccgcgcggccgtgcatgcgcgtgagcccgaagccgcgctggggctggacgagcgccaggtcggcgacgacgcgctcggcgaggatggcttgctggatctgggtgagggtggtctggaagtcatcaaagtcgacgaagcggtggtaggctccggtgttgatggtgtaggagcagttggccatgacggaccagttgacggtctggtggcccggacgcacgagctcgtggtacttgaggcgcgagtaggcgcgcgtgtcgaagatgtagtcgttgcaggtgcgcaccaggtactggtagccgatgaggaagtgcggcggcggctggcggtagagcggccatcgctcggtggcgggggcgccgggcgcgaggtcctcgagcatggtgcggtggtagccgtagatgtacctggacatccaggtgatgccggcggcggtggtggaggcgcgcgggaactcgcggacgcggttccagatgttgcgcagcggcaggaagtagttcatggtgggcacggtctggcccgtgaggcgcgcgcagtcgtggatgctctatacgggcaaaaacgaaagcggtcagcggctcgactccgtggcctggaggctaagcgaacgggttgggctgcgcgtgtaccccggttcgaatctcgaatcaggctggagccgcagctaacgtggtattggcactcccgtctcgacccaagcctgcaccaaccctccaggatacggaggcgggtcgttttgcaacttttttttggaggccggatgagactagtaagcgcggaaagcggccgaccgcgatggctcgctgccgtagtctggagaagaatcgccagggttgcgttgcggtgtgccccggttcgaggccggccggattccgcggctaacgagggcgtggctgccccgtcgtttccaagaccccatagccagccgacttctccagttacggagcgagcccctcttttgttttgtttgtttttgccagatgcatcccgtactgcggcagatgcgcccccaccaccctccaccgcaacaacagccccctccacagccggcgcttctgcccccgccccagcagcaacttccagccacgaccgccgcggccgccgtgagcggggctggacagagttatgatcaccagctggccttggaagagggcgaggggctggcgcgcctgggggcgtcgtcgccggagcggcacccgcgcgtgcagatgaaaagggacgctcgcgaggcctacgtgcccaagcagaacctgttcagagacaggagcggcgaggagcccgaggagatgcgcgcggcccggttccacgcggggcgggagctgcggcgcggcctggaccgaaagagggtgctgagggacgaggatttcgaggcggacgagctgacggggatcagccccgcgcgcgcgcacgtggccgcggccaacctggtcacggcgtacgagcagaccgtgaaggaggagagcaacttccaaaaatccttcaacaaccacgtgcgcaccctgatcgcgcgcgaggaggtgaccctgggcctgatgcacctgtgggacctgctggaggccatcgtgcagaaccccaccagcaagccgctgacggcgcagctgttcctggtggtgcagcatagtcgggacaacgaagcgttcagggaggcgctgctgaatatcaccgagcccgagggccgctggctcctggacctggtgaacattctgcagagcatcgtggtgcaggagcgcgggctgccgctgtccgagaagctggcggccatcaacttctcggtgctgagtttgggcaagtactacgctaggaagatctacaagaccccgtacgtgcccatagacaaggaggtgaagatcgacgggttttacatgcgcatgaccctgaaagtgctgaccctgagcgacgatctgggggtgtaccgcaacgacaggatgcaccgtgcggtgagcgccagcaggcggcgcgagctgagcgaccaggagctgatgcatagtctgcagcgggccctgaccggggccgggaccgagggggagagctactttgacatgggcgcggacctgcactggcagcccagccgccgggccttggaggcggcggcaggaccctacgtagaagaggtggacgatgaggtggacgaggagggcgagtacctggaagactgatggcgcgaccgtatttttgctagatgcaacaacaacagccacctcctgatcccgcgatgcgggcggcgctgcagagccagccgtccggcattaactcctcggacgattggacccaggccatgcaacgcatcatggcgctgacgacccgcaaccccgaagcctttagacagcagccccaggccaaccggctctcggccatcctggaggccgtggtgccctcgcgctccaaccccacgcacgagaaggtcctggccatcgtgaacgcgctggtggagaacaaggccatccgcggcgacgaggccggcctggtgtacaacgcgctgctggagcgcgtggcccgctacaacagcaccaacgtgcagaccaacctggaccgcatggtgaccgacgtgcgcgaggccgtggcccagcgcgagcggttccaccgcgagtccaacctgggatccatggtggcgctgaacgccttcctcagcacccagcccgccaacgtgccccggggccaggaggactacaccaacttcatcagcgccctgcgcctgatggtgaccgaggtgccccagagcgaggtgtaccagtccgggccggactacttcttccagaccagtcgccagggcttgcagaccgtgaacctgagccaggctttcaagaacttgcagggcctgtggggcgtgcaggccccggtcggggaccgcgcgacggtgtcgagcctgctgacgccgaactcgcgcctgctgctgctgctggtggcccccttcacggacagcggcagcatcaaccgcaactcgtacctgggctacctgattaacctgtaccgcgaggccatcggccaggcgcacgtggacgagcagacctaccaggagatcacccacgtgagccgcgccctgggccaggacgacccgggcaacctggaagccaccctgaactttttgctgaccaaccggtcgcagaagatcccgccccagtacgcgctcagcaccgaggaggagcgcatcctgcgttacgtgcagcagagcgtgggcctgttcctgatgcaggagggggccacccccagcgccgcgctcgacatgaccgcgcgcaacatggagcccagcatgtacgccagcaaccgcccgttcatcaataaactgatggactacttgcatcgggcggccgccatgaactctgactatttcaccaacgccatcctgaatccccactggctcccgccgccggggttctacacgggcgagtacgacatgcccgaccccaatgacgggttcctgtgggacgatgtggacagcagcgtgttctccccccgaccgggtgctaacgagcgccccttgtggaagaaggaaggcagcgaccgacgcccgtcctcggcgctgtccggccgcgagggtgctgccgcggcggtgcccgaggccgccagtcctttcccgagcttgcccttctcgctgaacagtatccgcagcagcgagctgggcaggatcacgcgcccgcgcttgctgggcgaagaggagtacttgaatgactcgctgttgagacccgagcgggagaagaacttccccaataacgggatagaaagcctggtggacaagatgagccgctggaagacgtatgcgcaggagcacagggacgatccccgggcgtcgcagggggccacgagccggggcagcgccgcccgtaaacgccggtggcacgacaggcagcggggacagatgtgggacgatgaggactccgccgacgacagcagcgtgttggacttgggtgggagtggtaacccgttcgctcacctgcgcccccgtatcgggcgcatgatgtaagagaaaccgaaaataaatgatactcaccaaggccatggcgaccagcgtgcgttcgtttcttctctgttgttgttgtatctagtatgatgaggcgtgcgtacccggagggtcctcctccctcgtacgagagcgtgatgcagcaggcgatggcggcggcggcgatgcagcccccgctggaggctccttacgtgcccccgcggtacctggcgcctacggaggggcggaacagcattcgttactcggagctggcacccttgtacgataccacccggttgtacctggtggacaacaagtcggcggacatcgcctcgctgaactaccagaacgaccacagcaacttcctgaccaccgtggtgcagaacaatgacttcacccccacggaggccagcacccagaccatcaactttgacgagcgctcgcggtggggcggccagctgaaaaccatcatgcacaccaacatgcccaacgtgaacgagttcatgtacagcaacaagttcaaggcgcgggtgatggtctcccgcaagacccccaatggggtgacagtgacagaggattatgatggtagtcaggatgagctgaagtatgaatgggtggaatttgagctgcccgaaggcaacttctcggtgaccatgaccatcgacctgatgaacaacgccatcatcgacaattacttggcggtggggcggcagaacggggtgctggagagcgacatcggcgtgaagttcgacactaggaacttcaggctgggctgggaccccgtgaccgagctggtcatgcccggggtgtacaccaacgaggctttccatcccgatattgtcttgctgcccggctgcggggtggacttcaccgagagccgcctcagcaacctgctgggcattcgcaagaggcagcccttccaggaaggcttccagatcatgtacgaggatctggaggggggcaacatccccgcgctcctggatgtcgacgcctatgagaaaagcaaggaggatgcagcagctgaagcaactgcagccgtagctaccgcctctaccgaggtcaggggcgataattttgcaagcgccgcagcagtggcagcggccgaggcggctgaaaccgaaagtaagatagtcattcagccggtggagaaggatagcaagaacaggagctacaacgtactaccggacaagataaacaccgcctaccgcagctggtacctagcctacaactatggcgaccccgagaagggcgtgcgctcctggacgctgctcaccacctcggacgtcacctgcggcgtggagcaagtctactggtcgctgcccgacatgatgcaagacccggtcaccttccgctccacgcgtcaagttagcaactacccggtggtgggcgccgagctcctgcccgtctactccaagagcttcttcaacgagcaggccgtctactcgcagcagctgcgcgccttcacctcgcttacgcacgtcttcaaccgcttccccgagaaccagatcctcgtccgcccgcccgcgcccaccattaccaccgtcagtgaaaacgttcctgctctcacagatcacgggaccctgccgctgcgcagcagtatccggggagtccagcgcgtgaccgttactgacgccagacgccgcacctgcccctacgtctacaaggccctgggcatagtcgcgccgcgcgtcctctcgagccgcaccttctaaatgtccattctcatctcgcccagtaataacaccggttggggcctgcgcgcgcccagcaagatgtacggaggcgctcgccaacgctccacgcaacaccccgtgcgcgtgcgcgggcacttccgcgctccctggggcgccctcaagggccgcgtgcggtcgcgcaccaccgtcgacgacgtgatcgaccaggtggtggccgacgcgcgcaactacacccccgccgccgcgcccgtctccaccgtggacgccgtcatcgacagcgtggtggccgacgcgcgccggtacgcccgcgccaagagccggcggcggcgcatcgcccggcggcaccggagcacccccgccatgcgcgcggcgcgagccttgctgcgcagggccaggcgcacgggacgcagggccatgctcagggcggccagacgcgcggcttcaggcgccagcgccggcaggacccggagacgcgcggccacggcggcggcagcggccatcgccagcatgtcccgcccgcggcgagggaacgtgtactgggtgcgcgacgccgccaccggtgtgcgcgtgcccgtgcgcacccgcccccctcgcacttgaagatgttcacttcgcgatgttgatgtgtcccagcggcgaggaggatgtccaagcgcaaattcaaggaagagatgctccaggtcatcgcgcctgagatctacggccctgcggtggtgaaggaggaaagaaagccccgcaaaatcaagcgggtcaaaaaggacaaaaaggaagaagaaagtgatgtggacggattggtggagtttgtgcgcgagttcgccccccggcggcgcgtgcagtggcgcgggcggaaggtgcaaccggtgctgagacccggcaccaccgtggtcttcacgcccggcgagcgctccggcaccgcttccaagcgctcctacgacgaggtgtacggggatgatgatattctggagcaggcggccgagcgcctgggcgagtttgcttacggcaagcgcagccgttccgcaccgaaggaagaggcggtgtccatcccgctggaccacggcaaccccacgccgagcctcaagcccgtgaccttgcagcaggtgctgccgaccgcggcgccgcgccgggggttcaagcgcgagggcgaggatctgtaccccaccatgcagctgatggtgcccaagcgccagaagctggaagacgtgctggagaccatgaaggtggacccggacgtgcagcccgaggtcaaggtgcggcccatcaagcaggtggccccgggcctgggcgtgcagaccgtggacatcaagattcccacggagcccatggaaacgcagaccgagcccatgatcaagcccagcaccagcaccatggaggtgcagacggatccctggatgccatcggctcctagtcgaagaccccggcgcaagtacggcgcggccagcctgctgatgcccaactacgcgctgcatccttccatcatccccacgccgggctaccgcggcacgcgcttctaccgcggtcataccagcagccgccgccgcaagaccaccactcgccgccgccgtcgccgcaccgccgctgcaaccacccctgccgccctggtgcggagagtgtaccgccgcggccgcgcacctctgaccctgccgcgcgcgcgctaccacccgagcatcgccatttaaactttcgcctgctttgcagatcaatggccctcacatgccgccttcgcgttcccattacgggctaccgaggaagaaaaccgcgccgtagaaggctggcggggaacgggatgcgtcgccaccaccaccggcggcggcgcgccatcagcaagcggttggggggaggcttcctgcccgcgctgatccccatcatcgccgcggcgatcggggcgatccccggcattgcttccgtggcggtgcaggcctctcagcgccactgagacacacttggaaacatcttgtaataaaccaatggactctgacgctcctggtcctgtgatgtgttttcgtagacagatggaagacatcaatttttcgtccctggctccgcgacacggcacgcggccgttcatgggcacctggagcgacatcggcaccagccaactgaacgggggcgccttcaattggagcagtctctggagcgggcttaagaatttcgggtccacgcttaaaacctatggcagcaaggcgtggaacagcaccacagggcaggcgctgagggataagctgaaagagcagaacttccagcagaaggtggtcgatgggctcgcctcgggcatcaacggggtggtggacctggccaaccaggccgtgcagcggcagatcaacagccgcctggacccggtgccgcccgccggctccgtggagatgccgcaggtggaggaggagctgcctcccctggacaagcggggcgagaagcgaccccgccccgatgcggaggagacgctgctgacgcacacggacgagccgcccccgtacgaggaggcggtgaaactgggtctgcccaccacgcggcccatcgcgcccctggccaccggggtgctgaaacccgaaaagcccgcgaccctggacttgcctcctccccagccttcccgcccctctacagtggctaagcccctgccgccggtggccgtggcccgcgcgcgacccgggggcaccgcccgccctcatgcgaactggcagagcactctgaacagcatcgtgggtctgggagtgcagagtgtgaagcgccgccgctgctattaaacctaccgtagcgcttaacttgcttgtctgtgtgtgtatgtattatgtcgccgccgccgctgtccaccagaaggaggagtgaagaggcgcgtcgccgagttgcaagatggccaccccatcgatgctgccccagtgggcgtacatgcacatcgccggacaggacgcttcggagtacctgagtccgggtctggtgcagtttgcccgcgccacagacacctacttcagtctggggaacaagtttaggaaccccacggtggcgcccacgcacgatgtgaccaccgaccgcagccagcggctgacgctgcgcttcgtgcccgtggaccgcgaggacaacacctactcgtacaaagtgcgctacacgctggccgtgggcgacaaccgcgtgctggacatggccagcacctactttgacatccgcggcgtgctggatcggggccctagcttcaaaccctactccggcaccgcctacaacagtctggcccccaagggagcacccaacacttgtcagtggacatataaagccgatggtgaaactgccacagaaaaaacctatacatatggaaatgcacccgtgcagggcattaacatcacaaaagatggtattcaacttggaactgacaccgatgatcagccaatctacgcagataaaacctatcagcctgaacctcaagtgggtgatgctgaatggcatgacatcactggtactgatgaaaagtatggaggcagagctcttaagcctgataccaaaatgaagccttgttatggttcttttgccaagcctactaataaagaaggaggtcaggcaaatgtgaaaacaggaacaggcactactaaagaatatgacatagacatggctttctttgacaacagaagtgcggctgctgctggcctagctccagaaattgttttgtatactgaaaatgtggatttggaaactccagatacccatattgtatacaaagcaggcacagatgacagcagctcttctattaatttgggtcagcaagccatgcccaacagacctaactacattggtttcagagacaactttatcgggctcatgtactacaacagcactggcaatatgggggtgctggccggtcaggcttctcagctgaatgctgtggttgacttgcaagacagaaacaccgagctgtcctaccagctcttgcttgactctctgggtgacagaacccggtatttcagtatgtggaatcaggcggtggacagctatgatcctgatgtgcgcattattgaaaatcatggtgtggaggatgaacttcccaactattgtttccctctggatgctgttggcagaacagatacttatcagggaattaaggctaatggaactgatcaaaccacatggaccaaagatgacagtgtcaatgatgctaatgagataggcaagggtaatccattcgccatggaaatcaacatccaagccaacctgtggaggaacttcctctacgccaacgtggccctgtacctgcccgactcttacaagtacacgccggccaatgttaccctgcccaccaacaccaacacctacgattacatgaacggccgggtggtggcgccctcgctggtggactcctacatcaacatcggggcgcgctggtcgctggatcccatggacaacgtgaaccccttcaaccaccaccgcaatgcggggctgcgctaccgctccatgctcctgggcaacgggcgctacgtgcccttccacatccaggtgccccagaaatttttcgccatcaagagcctcctgctcctgcccgggtcctacacctacgagtggaacttccgcaaggacgtcaacatgatcctgcagagctccctcggcaacgacctgcgcacggacggggcctccatctccttcaccagcatcaacctctacgccaccttcttccccatggcgcacaacacggcctccacgctcgaggccatgctgcgcaacgacaccaacgaccagtccttcaacgactacctctcggcggccaacatgctctaccccatcccggccaacgccaccaacgtgcccatctccatcccctcgcgcaactgggccgccttccgcggctggtccttcacgcgtctcaagaccaaggagacgccctcgctgggctccgggttcgacccctacttcgtctactcgggctccatcccctacctcgacggcaccttctacctcaaccacaccttcaagaaggtctccatcaccttcgactcctccgtcagctggcccggcaacgaccggctcctgacgcccaacgagttcgaaatcaagcgcaccgtcgacggcgagggctacaacgtggcccagtgcaacatgaccaaggactggttcctggtccagatgctggcccactacaacatcggctaccagggcttctacgtgcccgagggctacaaggaccgcatgtactccttcttccgcaacttccagcccatgagccgccaggtggtggacgaggtcaactacaaggactaccaggccgtcaccctggcctaccagcacaacaactcgggcttcgtcggctacctcgcgcccaccatgcgccagggccagccctaccccgccaactacccctacccgctcatcggcaagagcgccgtcaccagcgtcacccagaaaaagttcctctgcgacagggtcatgtggcgcatccccttctccagcaacttcatgtccatgggcgcgctcaccgacctcggccagaacatgctctatgccaactccgcccacgcgctagacatgaatttcgaagtcgaccccatggatgagtccacccttctctatgttgtcttcgaagtcttcgacgtcgtccgagtgcaccagccccaccgcggcgtcatcgaggccgtctacctgcgcacccccttctcggccggtaacgccaccacctaagctcttgcttcttgcaagccatggccgcgggctccggcgagcaggagctcagggccatcatccgcgacctgggctgcgggccctacttcctgggcaccttcgataagcgcttcccgggattcatggccccgcacaagctggcctgcgccatcgtcaacacggccggccgcgagaccgggggcgagcactggctggccttcgcctggaacccgcgctcgaacacctgctacctcttcgaccccttcgggttctcggacgagcgcctcaagcagatctaccagttcgagtacgagggcctgctgcgccgcagcgccctggccaccgaggaccgctgcgtcaccctggaaaagtccacccagaccgtgcagggtccgcgctcggccgcctgcgggctcttctgctgcatgttcctgcacgccttcgtgcactggcccgaccgccccatggacaagaaccccaccatgaacttgctgacgggggtgcccaacggcatgctccagtcgccccaggtggaacccaccctgcgccgcaaccaggaggcgctctaccgcttcctcaactcccactccgcctactttcgctcccaccgcgcgcgcatcgagaaggccaccgccttcgaccgcatgaatcaagacatgtaaaccgtgtgtgtatgttaaatgtctttaataaacagcactttcatgttacacatgcatctgagatgatttatttagaaatcgaaagggttctgccgggtctcggcatggcccgcgggcagggacacgttgcggaactggtacttggccagccacttgaactcggggatcagcagtttgggcagcggggtgtcggggaaggagtcggtccacagcttccgcgtcagttgcagggcgcccagcaggtcgggcgcggagatcttgaaatcgcagttgggacccgcgttctgcgcgcgggagttgcggtacacggggttgcagcactggaacaccatcagggccgggtgcttcacgctcgccagcaccgtcgcgtcggtgatgctctccacgtcgaggtcctcggcgttggccatcccgaagggggtcatcttgcaggtctgccttcccatggtgggcacgcacccgggcttgtggttgcaatcgcagtgcagggggatcagcatcatctgggcctggtcggcgttcatccccgggtacatggccttcatgaaagcctccaattgcctgaacgcctgctgggccttggctccctcggtgaagaagaccccgcaggacttgctagagaactggttggtggcgcacccggcgtcgtgcacgcagcagcgcgcgtcgttgttggccagctgcaccacgctgcgcccccagcggttctgggtgatcttggcccggtcggggttctccttcagcgcgcgctgcccgttctcgctcgccacatccatctcgatcatgtgctccttctggatcatggtggtcccgtgcaggcaccgcagcttgccctcggcctcggtgcacccgtgcagccacagcgcgcacccggtgcactcccagttcttgtgggcgatctgggaatgcgcgtgcacgaagccctgcaggaagcggcccatcatggtggtcagggtcttgttgctagtgaaggtcagcggaatgccgcggtgctcctcgttgatgtacaggtggcagatgcggcggtacacctcgccctgctcgggcatcagctggaagttggctttcaggtcggtctccacgcggtagcggtccatcagcatagtcatgatttccatacccttctcccaggccgagacgatgggcaggctcatagggttcttcaccatcatcttagcgctagcagccgcggccagggggtcgctctcgtccagggtctcaaagctccgcttgccgtccttctcggtgatccgcaccggggggtagctgaagcccacggccgccagctcctcctcggcctgtctttcgtcctcgctgtcctggctgacgtcctgcaggaccacatgcttggtcttgcggggtttcttcttgggcggcagcggcggcggagatgttggagatggcgagggggagcgcgagttctcgctcaccactactatctcttcctcttcttggtccgaggccacgcggcggtaggtatgtctcttcgggggcagaggcggaggcgacgggctctcgccgccgcgacttggcggatggctggcagagccccttccgcgttcgggggtgcgctcccggcggcgctctgactgacttcctccgcggccggccattgtgttctcctagggaggaacaacaagcatggagactcagccatcgccaacctcgccatctgcccccaccgccgacgagaagcagcagcagcagaatgaaagcttaaccgccccgccgcccagccccgccacctccgacgcggccgtcccagacatgcaagagatggaggaatccatcgagattgacctgggctatgtgacgcccgcggagcacgaggaggagctggcagtgcgcttttcacaagaagagatacaccaagaacagccagagcaggaagcagagaatgagcagagtcaggctgggctcgagcatgacggcgactacctccacctgagcgggggggaggacgcgctcatcaagcatctggcccggcaggccaccatcgtcaaggatgcgctgctcgaccgcaccgaggtgcccctcagcgtggaggagctcagccgcgcctacgagttgaacctcttctcgccgcgcgtgccccccaagcgccagcccaatggcacctgcgagcccaacccgcgcctcaacttctacccggtcttcgcggtgcccgaggccctggccacctaccacatctttttcaagaaccaaaagatccccgtctcctgccgcgccaaccgcacccgcgccgacgcccttttcaacctgggtcccggcgcccgcctacctgatatcgcctccttggaagaggttcccaagatcttcgagggtctgggcagcgacgagactcgggccgcgaacgctctgcaaggagaaggaggagagcatgagcaccacagcgccctggtcgagttggaaggcgacaacgcgcggctggcggtgctcaaacgcacggtcgagctgacccatttcgcctacccggctctgaacctgccccccaaagtcatgagcgcggtcatggaccaggtgctcatcaagcgcgcgtcgcccatctccgaggacgagggcatgcaagactccgaggagggcaagcccgtggtcagcgacgagcagctggcccggtggctgggtcctaatgctagtccccagagtttggaagagcggcgcaaactcatgatggccgtggtcctggtgaccgtggagctggagtgcctgcgccgcttcttcgccgacgcggagaccctgcgcaaggtcgaggagaacctgcactacctcttcaggcacgggttcgtgcgccaggcctgcaagatctccaacgtggagctgaccaacctggtctcctacatgggcatcttgcacgagaaccgcctggggcagaacgtgctgcacaccaccctgcgcggggaggcccggcgcgactacatccgcgactgcgtctacctctacctctgccacacctggcagacgggcatgggcgtgtggcagcagtgtctggaggagcagaacctgaaagagctctgcaagctcctgcagaagaacctcaagggtctgtggaccgggttcgacgagcgcaccaccgcctcggacctggccgacctcattttccccgagcgcctcaggctgacgctgcgcaacggcctgcccgactttatgagccaaagcatgttgcaaaactttcgctctttcatcctcgaacgctccggaatcctgcccgccacctgctccgcgctgccctcggacttcgtgccgctgaccttccgcgagtgccccccgccgctgtggagccactgctacctgctgcgcctggccaactacctggcctaccactcggacgtgatcgaggacgtcagcggcgagggcctgctcgagtgccactgccgctgcaacctctgcacgccgcaccgctccctggcctgcaacccccagctgctgagcgagacccagatcatcggcaccttcgagttgcaagggcccagcgaaggcgagggttcagccgccaaggggggtctgaaactcaccccggggctgtggacctcggcctacttgcgcaagttcgtgcccgaggactaccatcccttcgagatcaggttctacgaggaccaatcccatccgcccaaggccgagctgtcggcctgcgtcatcacccagggggcgatcctggcccaattgcaagccatccagaaatcccgccaagaattcttgctgaaaaagggccgcggggtctacctcgacccccagaccggtgaggagctcaaccccggcttcccccaggatgccccgaggaaacaagaagctgaaagtggagctgccgcccgtggaggatttggaggaagactgggagaacagcagtcaggcagaggaggaggagatggaggaagactgggacagcactcaggcagaggaggacagcctgcaagacagtctggaggaagacgaggaggaggcagaggaggaggtggaagaagcagccgccgccagaccgtcgtcctcggcgggggagaaagcaagcagcacggataccatctccgctccgggtcggggtcccgctcgaccacacagtagatgggacgagaccggacgattcccgaaccccaccacccagaccggtaagaaggagcggcagggatacaagtcctggcgggggcacaaaaacgccatcgtctcctgcttgcaggcctgcgggggcaacatctccttcacccggcgctacctgctcttccaccgcggggtgaactttccccgcaacatcttgcattactaccgtcacctccacagcccctactacttccaagaagaggcagcagcagcagaaaaagaccagcagaaaaccagcagctagaaaatccacagcggcggcagcaggtggactgaggatcgcggcgaacgagccggcgcaaacccgggagctgaggaaccggatctttcccaccctctatgccatcttccagcagagtcgggggcaggagcaggaactgaaagtcaagaaccgttctctgcgctcgctcacccgcagttgtctgtatcacaagagcgaagaccaacttcagcgcactctcgaggacgccgaggctctcttcaacaagtactgcgcgctcactcttaaagagtagcccgcgcccgcccagtcgcagaaaaaggcgggaattacgtcacctgtgcccttcgccctagccgcctccacccatcatcatgagcaaagagattcccacgccttacatgtggagctaccagccccagatgggcctggccgccggtgccgcccaggactactccacccgcatgaattggctcagcgccgggcccgcgatgatctcacgggtgaatgacatccgcgcccaccgaaaccagatactcctagaacagtcagcgctcaccgccacgccccgcaatcacctcaatccgcgtaattggcccgccgccctggtgtaccaggaaattccccagcccacgaccgtactacttccgcgagacgcccaggccgaagtccagctgactaactcaggtgtccagctggcgggcggcgccaccctgtgtcgtcaccgccccgctcagggtataaagcggctggtgatccggggcagaggcacacagctcaacgacgaggtggtgagctcttcgctgggtctgcgacctgacggagtcttccaactcgccggatcggggagatcttccttcacgcctcgtcaggccgtcctgactttggagagttcgtcctcgcagccccgctcgggtggcatcggcactctccagttcgtggaggagttcactccctcggtctacttcaaccccttctccggctcccccggccactacccggacgagttcatcccgaacttcgacgccatcagcgagtcggtggacggctacgattgaatgtcccatggtggcgcagctgacctagctcggcttcgacacctggaccactgccgccgcttccgctgcttcgctcgggatctcgccgagtttgcctactttgagctgcccgaggagcaccctcagggcccggcccacggagtgcggatcgtcgtcgaagggggcctcgactcccacctgcttcggatcttcagccagcgtccgatcctggtcgagcgcgagcaaggacagacccttctgactctgtactgcatctgcaaccaccccggcctgcatgaaagtctttgttgtctgctgtgtactgagtataataaaagctgagatcagcgactactccggacttccgtgtgttcctgaatccatcaaccagtctttgttcttcaccgggaacgagaccgagctccagctccagtgtaagccccacaagaagtacctcacctggctgttccagggctccccgatcgccgttgtcaaccactgcgacaacgacggagtcctgctgagcggccctgccaaccttactttttccacccgcagaagcaagctccagctcttccaacccttcctccccgggacctatcagtgcgtctcgggaccctgccatcacaccttccacctgatcccgaataccacagcgtcgctccccgctactaacaaccaaactaacctccaccaacgccaccgtcgcgacctttctgaatctaatactaccacccacaccggaggtgagctccgaggtcaaccaacctctgggatttactacggcccctgggaggtggttgggttaatagcgctaggcctagttgcgggtgggcttttggttctctgctacctatacctcccttgctgttcgtacttagtggtgctgtgttgctggtttaagaaatggggaagatcaccctagtgagctgcggtgcgctggtggcggtgttgctttcgattgtgggactgggcggtgcggctgtagtgaaggagaaggccgatccctgcttgcatttcaatcccaacaaatgccagctgagttttcagcccgatggcaatcggtgcgcggtactgatcaagtgcggatgggaatgcgagaacgtgagaatcgagtacaataacaagactcggaacaatactctcgcgtccgtgtggcagcccggggaccccgagtggtacaccgtctctgtccccggtgctgacggctccccgcgcaccgtgaataatactttcatttttgcgcacatgtgcgacacggtcatgtggatgagcaagcagtacgatatgtggccccccacgaaggagaacatcgtggtcttctccatcgcttacagcctgtgcacggcgctaatcaccgctatcgtgtgcctgagcattcacatgctcatcgctattcgccccagaaataatgccgaaaaagaaaaacagccataacgttttttttcacacctttttcagaccatggcctctgttaaatttttgcttttatttgccagtctcattgccgtcattcatggaatgagtaatgagaaaattactatttacactggcactaatcacacattgaaaggtccagaaaaagccacagaagtttcatggtattgttattttaatgaatcagatgtatctactgaactctgtggaaacaataacaaaaaaaatgagagcattactctcatcaagtttcaatgtggatctgacttaaccctaattaacatcactagagactatgtaggtatgtattatggaactacagcaggcatttcggacatggaattttatcaagtttctgtgtctgaacccaccacgcctagaatgaccacaaccacaaaaactacacctgttaccactatgcagctcactaccaataacatttttgccatgcgtcaaatggtcaacaatagcactcaacccaccccacccagtgaggaaattcccaaatccatgattggcattattgttgctgtagtggtgtgcatgttgatcatcgccttgtgcatggtgtactatgccttctgctacagaaagcacagactgaacgacaagctggaacacttactaagtgttgaattttaattttttagaaccatgaagatcctaggccttttaattttttctatcattacctctgctctatgcaattctgacaatgaggacgttactgtcgttgtcggatcaaattatacactgaaaggtccagcgaagggtatgctttcgtggtattgctattttggatctgacactacagaaactgaattatgcaatcttaagaatggcaaaattcaaaattctaaaattaacaattatatatgcaatggtactgatctgatactcctcaatatcacgaaatcatatgctggcagttacacctgccctggagatgatgctgacagtatgattttttacaaagtaactgttgttgatcccactactccacctccacccaccacaactactcacaccacacacacagatcaaaccgcagcagaggaggcagcaaagttagccttgcaggtccaagacagttcatttgttggcattacccctacacctgatcagcggtgtccggggctgctagtcagcggcattgtcggtgtgctttcgggattagcagtcataatcatctgcatgttcatttttgcttgctgctatagaaggctttaccgacaaaaatcagacccactgctgaacctctatgtttaattttttccagagtcatgaaggcagttagcgctctagttttttgttctttgattggcattgttttttgcaatcctattcctaaagttagctttattaaagatgtgaatgttactgaggggggcaatgtgacactggtaggtgtagagggtgctgaaaacaccacctggacaaaataccacctcaatgggtggaaagatatttgcaattggagtgtattagtttatacatgtgagggagttaatcttaccattgtcaatgccacctcagctcaaaatggtagaattcaaggacaaagtgtcagtgtatctaatgggtattttacccaacatacttttatctatgacgttaaagtcataccactgcctacgcctagcccacctagcactaccacacagacaacccacactacacagacaaccacatacagtacattaaatcagcctaccaccactacagcagcagaggttgccagctcgtctggggtccgagtggcatttttgatgttggccccatctagcagtcccactgctagtaccaatgagcagactactgaatttttgtccactgtcgagagccacaccacagctacctccagtgccttctctagcaccgccaatctctcctcgctttcctctacaccaatcagtcccgctactactcctagccccgctcctcttcccactcccctgaagcaaacagacggcggcatgcaatggcagatcaccctgctcattgtgatcgggttggtcatcctggccgtgttgctctactacatcttctgccgccgcattcccaacgcgcaccgcaagccggtctacaagcccatcattgtcgggcagccggagccgcttcaggtggaagggggtctaaggaatcttctcttctcttttacagtatggtgattgaactatgattcctagacaattcttgatcactattcttatctgcctcctccaagtctgtgccaccctcgctctggtggccaacgccagtccagactgtattgggcccttcgcctcctacgtgctctttgccttcaccacctgcatctgctgctgtagcatagtctgcctgcttatcaccttcttccagttcattgactggatctttgtgcgcatcgcctacctgcgccaccacccccagtaccgcgaccagcgagtggcgcggctgctcaggctcctctgataagcatgcgggctctgctacttctcgcgcttctgctgttagtgctcccccgtcccgtcgacccccggtcccccacccagtcccccgaggaggtccgcaaatgcaaattccaagaaccctggaaattcctcaaatgctaccgccaaaaatcagacatgcatcccagctggatcatgatcattgggatcgtgaacattctggcctgcaccctcatctcctttgtgatttacccctgctttgactttggttggaactcgccagaggcgctctatctcccgcctgaacctgacacaccaccacagcaacctcaggcacacgcactaccaccactacagcctaggccacaatacatgcccatattagactatgaggccgagccacagcgacccatgctccccgctattagttacttcaatctaaccggcggagatgactgacccactggccaacaacaacgtcaacgaccttctcctggacatggacggccgcgcctcggagcagcgactcgcccaacttcgcattcgccagcagcaggagagagccgtcaaggagctgcaggatgcggtggccatccaccagtgcaagagaggcatcttctgcctggtgaaacaggccaagatctcctacgaggtcactccaaacgaccatcgcctctcctacgagctcctgcagcagcgccagaagttcacctgcctggtcggagtcaaccccatcgtcatcacccagcagtctggcgataccaaggggtgcatccactgctcctgcgactcccccgactgcgtccacactctgatcaagaccctctgcggcctccgcgacctcctccccatgaactaatcacccccttatccagtgaaataaagatcatattgatgatgattttacagaaataaaaaataatcatttgatttgaaataaagatacaatcatattgatgatttgagtttaacaaaaaaataaagaatcacttacttgaaatctgataccaggtctctgtccatgttttctgccaacaccacttcactcccctcttcccagctctggtactgcaggccccggcgggctgcaaacttcctccacacgctgaaggggatgtcaaattcctcctgtccctcaatcttcattttatcttctatcagatgtccaaaaagcgcgtccgggtggatgatgacttcgaccccgtctacccctacgatgcagacaacgcaccgaccgtgcccttcatcaacccccccttcgtctcttcagatggattccaagagaagcccctgggggtgttgtccctgcgactggccgaccccgtcaccaccaagaacggggaaatcaccctcaagctgggagagggggtggacctcgattcctcgggaaaactcatctccaacacggccaccaaggccgccgcccctctcagtttttccaacaacaccatttcccttaacatggatcaccccttttacactaaagatggaaaattatccttacaagtttctccaccattaaatatactgagaacaagcattctaaacacactagctttaggttttggatcaggtttaggactccgtggctctgccttggcagtacagttagtctctccacttacatttgatactgatggaaacataaagcttaccttagacagaggtttgcatgttacaacaggagatgcaattgaaagcaacataagctgggctaaaggtttaaaatttgaagatggagccatagcaaccaacattggaaatgggttagagtttggaagcagtagtacagaaacaggtgttgatgatgcttacccaatccaagttaaacttggatctggccttagctttgacagtacaggagccataatggctggtaacaaagaagacgataaactcactttgtggacaacacctgatccatcaccaaactgtcaaatactcgcagaaaatgatgcaaaactaacactttgcttgactaaatgtggtagtcaaatactggccactgtgtcagtcttagttgtaggaagtggaaacctaaaccccattactggcaccgtaagcagtgctcaggtgtttctacgttttgatgcaaacggtgttcttttaacagaacattctacactaaaaaaatactgggggtataggcagggagatagcatagatggcactccatataccaatgctgtaggattcatgcccaatttaaaagcttatccaaagtcacaaagttctactactaaaaataatatagtagggcaagtatacatgaatggagatgtttcaaaacctatgcttctcactataaccctcaatggtactgatgacagcaacagtacatattcaatgtcattttcatacacctggactaatggaagctatgttggagcaacatttggggctaactcttataccttctcatacatcgcccaagaatgaacactgtatcccaccctgcatgccaacccttcccaccccactctgtggaacaaactctgaaacacaaaataaaataaagttcaagtgttttattgattcaacagttttacaggattcgagcagttatttttcctccaccctcccaggacatggaatacaccaccctctccccccgcacagccttgaacatctgaatgccattggtgatggacatgcttttggtctccacgttccacacagtttcagagcgagccagtctcgggtcggtcagggagatgaaaccctccgggcactcccgcatctgcacctcacagctcaacagctgaggattgtcctcggtggtcgggatcacggttatctggaagaagcagaagagcggcggtgggaatcatagtccgcgaacgggatcggccggtggtgtcgcatcaggccccgcagcagtcgctgccgccgccgctccgtcaagctgctgctcagggggtccgggtccagggactccctcagcatgatgcccacggccctcagcatcagtcgtctggtgcggcgggcgcagcagcgcatgcggatctcgctcaggtcgctgcagtacgtgcaacacagaaccaccaggttgttcaacagtccatagttcaacacgctccagccgaaactcatcgcgggaaggatgctacccacgtggccgtcgtaccagatcctcaggtaaatcaagtggtgccccctccagaacacgctgcccacgtacatgatctccttgggcatgtggcggttcaccacctcccggtaccacatcaccctctggttgaacatgcagccccggatgatcctgcggaaccacagggccagcaccgccccgcccgccatgcagcgaagagaccccgggtcccggcaatggcaatggaggacccaccgctcgtacccgtggatcatctgggagctgaacaagtctatgttggcacagcacaggcatatgctcatgcatctcttcagcactctcaactcctcgggggtcaaaaccatatcccagggcacggggaactcttgcaggacagcgaaccccgcagaacagggcaatcctcgcacagaacttacattgtgcatggacagggtatcgcaatcaggcagcaccgggtgatcctccaccagagaagcgcgggtctcggtctcctcacagcgtggtaagggggccggccgatacgggtgatggcgggacgcggctgatcgtgttcgcgaccgtgtcatgatgcagttgctttcggacattttcgtacttgctgtagcagaacctggtccgggcgctgcacaccgatcgccggcggcggtctcggcgcttggaacgctcggtgttgaaattgtaaaacagccactctctcagaccgtgcagcagatctagggcctcaggagtgatgaagatcccatcatgcctgatggctctgatcacatcgaccaccgtggaatgggccagacccagccagatgatgcaattttgttgggtttcggtgacggcgggggagggaagaacaggaagaaccatgattaacttttaatccaaacggtctcggagtacttcaaaatgaagatcgcggagatggcacctctcgcccccgctgtgttggtggaaaataacagccaggtcaaaggtgatacggttctcgagatgttccacggtggcttccagcaaagcctccacgcgcacatccagaaacaagacaatagcgaaagcgggagggttctctaattcctcaatcatcatgttacactcctgcaccatccccagataattttcatttttccagccttgaatgattcgaactagttcctgaggtaaatccaagccagccatgataaagagctcgcgcagagcgccctccaccggcattcttaagcacaccctcataattccaagatattctgctcctggttcacctgcagcagattgacaagcggaatatcaaaatctctgccgcgatccctgagctcctccctcagcaataactgtaagtactctttcatatcctctccgaaatttttagccataggaccaccaggaataagattagggcaagccacagtacagataaaccgaagtcctccccagtgagcattgccaaatgcaagactgctataagcatgctggctagacccggtgatatcttccagataactggacagaaaatcgcccaggcaatttttaagaaaatcaacaaaagaaaaatcctccaggtggacgtttagagcctcgggaacaacgatgaagtaaatgcaagcggtgcgttccagcatggttagttagctgatctgtagaaaaaacaaaaatgaacattaaaccatgctagcctggcgaacaggtgggtaaatcgttctctccagcaccaggcaggccacggggtctccggcgcgaccctcgtaaaaattgtcgctatgattgaaaaccatcacagagagacgttcccggtggccggcgtgaatgattcgacaagatgaatacacccccggaacattggcgtccgcgagtgaaaaaaagcgcccgaggaagcaataaggcactacaatgctcagtctcaagtccagcaaagcgatgccatgcggatgaagcacaaaattctcaggtgcgtacaaaatgtaattactcccctcctgcacaggcagcaaagcccccgatccctccaggtacacatacaaagcctcagcgtccatagcttaccgagcagcagcacacaacaggcgcaagagtcagagaaaggctgagctctaacctgtccacccgctctctgctcaatatatagcccagatctacactgacgtaaaggccaaagtctaaaaatacccgccaaataatcacacacgcccagcacacgcccagaaaccggtgacacactcaaaaaaatacgcgcacttcctcaaacgcccaaaactgccgtcatttccgggttcccacgctacgtcatcaaaacacgactttcaaattccgtcgaccgttaaaaacgtcacccgccccgcccctaacggtcgcccgtctctcagccaatcagcgccccgcatccccaaattcaaacacctcatttgcatattaacgcgcacaaaaagtttgaggtatattattgatgatgg

SEQ ID NO: 11 - DNA, 31867 bp, synthetic construct
  misc_feature 1..31867: note = Description of Artificial Sequence: Synthetic polynucleotide
  source 1..31867: mol_type = other DNA
ccatcttcaataatatacctcaaactttttgtgcgcgttaatatgcaaatgaggcgtttgaatttggggaggaagggcggtgattggtcgagggatgagcgaccgttaggggcggggcgagtgacgttttgatgacgtggttgcgaggaggagccagtttgcaagttctcgtgggaaaagtgacgtcaaacgaggtgtggtttgaacacggaaatactcaattttcccgcgctctctgacaggaaatgaggtgtttctgggcggatgcaagtgaaaacgggccattttcgcgcgaaaactgaatgaggaagtgaaaatctgagtaatttcgcgtttatggcagggaggagtatttgccgagggccgagtagactttgaccgattacgtgggggtttcgattaccgtgtttttcacctaaatttccgcgtacggtgtcaaagtccggtgtttttacgtaggtgtcagctgatcgccagggtatttaaacctgcgctctccagtcaagaggccactcttgagtgccagcgagaagagttttctcctccgcgccgcgagtcagatctacactttgaaagtagggataacagggtaatgacattgattattgactagttgttaatagtaatcaattacggggtcattagttcatagcccatatatggagttccgcgttacataacttacggtaaatggcccgcctggctgaccgcccaacgacccccgcccattgacgtcaataatgacgtatgttcccatagtaacgccaatagggactttccattgacgtcaatgggtggagtatttacggtaaactgcccacttggcagtacatcaagtgtatcatatgccaagtccgccccctattgacgtcaatgacggtaaatggcccgcctggcattatgcccagtacatgaccttacgggactttcctacttggcagtacatctacgtattagtcatcgctattaccatggtgatgcggttttggcagtacaccaatgggcgtggatagcggtttgactcacggggatttccaagtctccaccccattgacgtcaatgggagtttgttttggcaccaaaatcaacgggactttccaaaatgtcgtaataaccccgccccgttgacgcaaatgggcggtaggcgtgtacggtgggaggtctatataagcagagctcgtttagtgaaccgtcagatcgcctggaacgccatccacgctgttttgacctccatagaagacagcgatcgcgccaccatggtgagcaagggcgaggagctgttcaccggggtggtgcccatcctggtcgagctggacggcgacgtaaacggccacaagttcagcgtgtccggcgagggcgagggcgatgccacctacggcaagctgaccctgaagttcatctgcaccaccggcaagctgcccgtgccctggcccaccctcgtgaccaccctgacctacggcgtgcagtgcttcagccgctaccccgaccacatgaagcagcacgacttcttcaagtccgccatgcccgaaggctacgtccaggagcgcaccatcttcttcaaggacgacggcaactacaagacccgcgccgaggtgaagttcgagggcgacaccctggtgaaccgcatcgagctgaagggcatcgacttcaaggaggacggcaacatcctggggcacaagctggagtacaactacaacagccacaacgtctatatcatggccgacaagcagaagaacggcatcaaggtgaacttcaagatccgccacaacatcgaggacggcagcgtgcagctcgccgaccactaccagcagaacacccccatcggcgacggccccgtgctgctgcccgacaaccactacctgagcacccagtccgccctgagcaaagaccccaacgagaagcgcgatcacatggtcctgctggagttcgtgaccgccgccgggatcactctcggcatggacgagctttacaagtagtgagtttaaactcccatttaaatgtgagggttaatgcttcgagcagacatgataagatacattgatgagtttggacaaaccacaactagaatgcagtgaaaaaaatgctttatttgtgaaatttgtgatgctattgctttatttgtaaccattataagctgcaataaacaagttaacaacaacaattgcattcattttatgtttcaggttcagggggagatgtgggaggttttttaaagcaagtaaaacctctacaaatgtggtaaaataactataacggtcctaaggtagcgagtgagtagtgttctggggcgggggaggacctgcatgagggccagaataactgaaatctgtgcttttctgtgtgttgcagcagcatgagcggaagcggctcctttgagggaggggtattcagcccttatctgacggggcgtctcccctcctgggcgggagtgcgtcagaatgtgatgggatccacggtggacggccggcccgtgcagcccgcgaactcttcaaccctgacctatgcaaccctgagctcttcgtcgttggacgcagctgccgccgcagctgctgcatctgccgccagcgccgtgcgcggaatggccatgggcgccggctactacggcactctggtggccaactcgagttccaccaataatcccgccagcctgaacgaggagaagctgttgctgctgatggcccagctcgaggccttgacccagcgcctgggcgagctgacccagcaggtggctcagctgcaggagcagacgcgggccgcggttgccacggtgaaatccaaataaaaaatgaatcaataaataaacggagacggttgttgattttaacacagagtctgaatctttatttgatttttcgcgcgcggtaggccctggaccaccggtctcgatcattgagcacccggtggatcttttccaggacccggtagaggtgggcttggatgttgaggtacatgggcatgagcccgtcccgggggtggaggtagctccattgcagggcctcgtgctcgggggtggtgttgtaaatcacccagtcatagcaggggcgcagggcatggtgttgcacaatatctttgaggaggagactgatggccacgggcagccctttggtgtaggtgtttacaaatctgttgagctgggagggatgcatgcggggggagatgaggtgcatcttggcctggatcttgagattggcgatgttaccgcccagatcccgcctggggttcatgttgtgcaggaccaccagcacggtgtatccggtgcacttggggaatttatcatgcaacttggaagggaaggcgtgaaagaatttggcgacgcctttgtgcccgcccaggttttccatgcactcatccatgatgatggcgatgggcccgtgggcggcggcctgggcaaagacgtttcgggggtcggacacatcatagttgtggtcctgggtgaggtcatcataggccattttaatgaatttggggcggagggtgccggactgggggacaaaggtaccctcgatcccgggggcgtagttcccctcacagatctgcatctcccaggctttgagctcggagggggggatcatgtccacctgcggggcgataaagaacacggtttccggggcgggggagatgagctgggccgaaagcaagttccggagcagctgggacttgccgcagccggtggggccgtagatgaccccgatgaccggctgcaggtggtagttgagggagagacagctgccgtcctcccggaggaggggggccacctcgttcatcatctcgcgcacgtgcatgttctcgcgcaccagttccgccaggaggcgctctccccccagggataggagctcctggagcgaggcgaagtttttcagcggcttgagtccgtcggccatgggcattttggagagggtttgttgcaagagttccaggcggtcccagagctcggtgatgtgctctacggcatctcgatccagcagacctcctcgtttcgcgggttgggacggctgcgggagtagggcaccagacgatgggcgtccagcgcagccagggtccggtccttccagggtcgcagcgtccgcgtcagggtggtctccgtcacggtgaaggggtgcgcgccgggctgggcgcttgcgagggtgcgcttcaggctcatccggctggtcgaaaaccgctcccgatcggcgccctgcgcgtcggccaggtagcaattgaccatgagttcgtagttgagcgcctcggccgcgtggcctttggcgcggagcttacctttggaagtctgcccgcaggcgggacagaggagggacttgagggcgtagagcttgggggcgaggaagacggactcgggggcgtaggcgtccgcgccgcagtgggcgcagacggtctcgcactccacgagccaggtgaggtcgggctggtcggggtcaaaaaccagtttcccgccgttctttttgatgcgtttcttacctttggtctccatgagctcgtgtccccgctgggtgacaaagaggctgtccgtgtccccgtagaccgactttatgggccggtcctcgagcggtgtgccgcggtcctcctcgtagaggaaccccgcccactccgagacgaaagcccgggtccaggccagcacgaaggaggccacgtgggacgggtagcggtcgttgtccaccagcgggtccaccttttccagggtatgcaaacacatgtccccctcgtccacatccaggaaggtgattggcttgtaagtgtaggccacgtgaccgggggtcccggccgggggggtataaaagggtgcgggtccctgctcgtcctcactgtcttccggatcgctgtccaggagcgccagctgttggggtaggtattccctctcgaaggcgggcatgacctcggcactcaggttgtcagtttctagaaacgaggaggatttgatattgacggtgccggcggagatgcctttcaagagcccctcgtccatctggtcagaaaagacgatctttttgttgtcgagcttggtggcgaaggagccgtagagggcgttggagaggagcttggcgatggagcgcatggtctggtttttttccttgtcggcgcgctccttggcggcgatgttgagctgcacgtactcgcgcgccacgcacttccattcggggaagacggtggtcagctcgtcgggcacgattctgacctgccagccccgattatgcagggtgatgaggtccacactggtggccacctcgccgcgcaggggctcattagtccagcagaggcgtccgcccttgcgcgagcagaaggggggcagggggtccagcatgacctcgtcgggggggtcggcatcgatggtgaagatgccgggcaggaggtcggggtcaaagtagctgatggaagtggccagatcgtccagggcagcttgccattcgcgcacggccagcgcgctctcgtagggactgaggggcgtgccccagggcatgggatgggtaagcgcggaggcgtacatgccgcagatgtcgtagacgtagaggggctcctcgaggatgccgatgtaggtggggtagcagcgccccccgcggatgctggcgcgcacgtagtcatacagctcgtgcgagggggcgaggagccccgggcccaggttggtgcgactgggcttttcggcgcggtagacgatctggcggaaaatggcatgcgagttggaggagatggtgggcctttggaagatgttgaagtgggcgtggggcagtccgaccgagtcgcggatgaagtgggcgtaggagtcttgcagcttggcgacgagctcggcggtgactaggacgtccagagcgcagtagtcgagggtctcctggatgatgtcatacttgagctgtcccttttgtttccacagctcgcggttgagaaggaactcttcgcggtccttccagtactcttcgagggggaacccgtcctgatctgcacggtaagagcctagcatgtagaactggttgacggccttgtaggcgcagcagcccttctccacggggagggcgtaggcctgggcggccttgcgcagggaggtgtgcgtgagggcgaaagtgtccctgaccatgaccttgaggaactggtgcttgaagtcgatatcgtcgcagcccccctgctcccagagctggaagtccgtgcgcttcttgtaggcggggttgggcaaagcgaaagtaacatcgttgaagaggatcttgcccgcgcggggcataaagttgcgagtgatgcggaaaggttggggcacctcggcccggttgttgatgacctgggcggcgagcacgatctcgtcgaagccgttgatgttgtggcccacgatgtagagttccacgaatcgcggacggcccttgacgtggggcagtttcttgagctcctcgtaggtgagctcgtcggggtcgctgagcccgtgctgctcgagcgcccagtcggcgagatgggggttggcgcggaggaaggaagtccagagatccacggccagggcggtttgcagacggtcccggtactgacggaactgctgcccgacggccattttttcgggggtgacgcagtagaaggtgcgggggtccccgtgccagcgatcccatttgagctggagggcgagatcgagggcgagctcgacgagccggtcgtccccggagagtttcatgaccagcatgaaggggacgagctgcttgccgaaggaccccatccaggtgtaggtttccacatcgtaggtgaggaagagcctttcggtgcgaggatgcgagccgatggggaagaactggatctcctgccaccaattggaggaatggctgttgatgtgatggaagtagaaatgccgacggcgcgccgaacactcgtgcttgtgtttatacaagcggccacagtgctcgcaacgctgcacgggatgcacgtgctgcacgagctgtacctgagttcctttgacgaggaatttcagtgggaagtggagtcgtggcgcctgcatctcgtgctgtactacgtcgtggtggtcggcctggccctcttctgcctcgatggtggtcatgctgacgagcccgcgcgggaggcaggtccagacctcggcgcgagcgggtcggagagcgaggacgagggcgcgcaggccggagctgtccagggtcctgagacgctgcggagtcaggtcagtgggcagcggcggcgcgcggttgacttgcaggagtttttccagggcgcgcgggaggtccagatggtacttgatctccaccgcgccattggtggcgacgtcgatggcttgcagggtcccgtgcccctggggtgtgaccaccgtcccccgtttcttcttgggcggctggggcgacgggggcggtgcctcttccatggttagaagcggcggcgaggacgcgcgccgggcggcaggggcggctcggggcccggaggcaggggcggcaggggcacgtcggcgccgcgcgcgggtaggttctggtactgcgcccggagaagactggcgtgagcgacgacgcgacggttgacgtcctggatctgacgcctctgggtgaaggccacgggacccgtgagtttgaacctgaaagagagttcgacagaatcaatctcggtatcgttgacggcggcctgccgcaggatctcttgcacgtcgcccgagttgtcctggtaggcgatctcggtcatgaactgctcgatctcctcctcttgaaggtctccgcggccggcgcgctccacggtggccgcgaggtcgttggagatgcggcccatgagctgcgagaaggcgttcatgcccgcctcgttccagacgcggctgtagaccacgacgccctcgggatcgcgggcgcgcatgaccacctgggcgaggttgagctccacgtggcgcgtgaagaccgcgtagttgcagaggcgctggtagaggtagttgagcgtggtggcgatgtgctcggtgacgaagaaatacatgatccagcggcggagcggcatctcgctgacgtcgcccagcgcctccaaacgttccatggcctcgtaaaagtccacggcgaagttgaaaaactgggagttgcgcgccgagacggtcaactcctcctccagaagacggatgagctcggcgatggtggcgcgcacctcgcgctcgaaggcccccgggagttcctccacttcctcttcttcctcctccactaacatctcttctacttcctcctcaggcggcagtggtggcgggggagggggcctgcgtcgccggcggcgcacgggcagacggtcgatgaagcgctcgatggtctcgccgcgccggcgtcgcatggtctcggtgacggcgcgcccgtcctcgcggggccgcagcgtgaagacgccgccgcgcatctccaggtggccgggggggtccccgttgggcagggagagggcgctgacgatgcatcttatcaattgccccgtagggactccgcgcaaggacctgagcgtctcgagatccacgggatctgaaaaccgctgaacgaaggcttcgagccagtcgcagtcgcaaggtaggctgagcacggtttcttctggcgggtcatgttggttgggagcggggcgggcgatgctgctggtgatgaagttgaaataggcggttctgagacggcggatggtggcgaggagcaccaggtctttgggcccggcttgctggatgcgcagacggtcggccatgccccaggcgtggtcctgacacctggccaggtccttgtagtagtcctgcatgagccgctccacgggcacctcctcctcgcccgcgcggccgtgcatgcgcgtgagcccgaagccgcgctggggctggacgagcgccaggtcggcgacgacgcgctcggcgaggatggcttgctggatctgggtgagggtggtctggaagtcatcaaagtcgacgaagcggtggtaggctccggtgttgatggtgtaggagcagttggccatgacggaccagttgacggtctggtggcccggacgcacgagctcgtggtacttgaggcgcgagtaggcgcgcgtgtcgaagatgtagtcgttgcaggtgcgcaccaggtactggtagccgatgaggaagtgcggcggcggctggcggtagagcggccatcgctcggtggcgggggcgccgggcgcgaggtcctcgagcatggtgcggtggtagccgtagatgtacctggacatccaggtgatgccggcggcggtggtggaggcgcgcgggaactcgcggacgcggttccagatgttgcgcagcggcaggaagtagttcatggtgggcacggtctggcccgtgaggcgcgcgcagtcgtggatgctctatacgggcaaaaacgaaagcggtcagcggctcgactccgtggcctggaggctaagcgaacgggttgggctgcgcgtgtaccccggttcgaatctcgaatcaggctggagccgcagctaacgtggtattggcactcccgtctcgacccaagcctgcaccaaccctccaggatacggaggcgggtcgttttgcaacttttttttggaggccggatgagactagtaagcgcggaaagcggccgaccgcgatggctcgctgccgtagtctggagaagaatcgccagggttgcgttgcggtgtgccccggttcgaggccggccggattccgcggctaacgagggcgtggctgccccgtcgtttccaagaccccatagccagccgacttctccagttacggagcgagcccctcttttgttttgtttgtttttgccagatgcatcccgtactgcggcagatgcgcccccaccaccctccaccgcaacaacagccccctccacagccggcgcttctgcccccgccccagcagcaacttccagccacgaccgccgcggccgccgtgagcggggctggacagagttatgatcaccagctggccttggaagagggcgaggggctggcgcgcctgggggcgtcgtcgccggagcggcacccgcgcgtgcagatgaaaagggacgctcgcgaggcctacgtgcccaagcagaacctgttcagagacaggagcggcgaggagcccgaggagatgcgcgcggcccggttccacgcggggcgggagctgcggcgcggcctggaccgaaagagggtgctgagggacgaggatttcgaggcggacgagctgacggggatcagccccgcgcgcgcgcacgtggccgcggccaacctggtcacggcgtacgagcagaccgtgaaggaggagagcaacttccaaaaatccttcaacaaccacgtgcgcaccctgatcgcgcgcgaggaggtgaccctgggcctgatgcacctgtgggacctgctggaggccatcgtgcagaaccccaccagcaagccgctgacggcgcagctgttcctggtggtgcagcatagtcgggacaacgaagcgttcagggaggcgctgctgaatatcaccgagcccgagggccgctggctcctggacctggtgaacattctgcagagcatcgtggtgcaggagcgcgggctgccgctgtccgagaagctggcggccatcaacttctcggtgctgagtttgggcaagtactacgctaggaagatctacaagaccccgtacgtgcccatagacaaggaggtgaagatcgacgggttttacatgcgcatgaccctgaaagtgctgaccctgagcgacgatctgggggtgtaccgcaacgacaggatgcaccgtgcggtgagcgccagcaggcggcgcgagctgagcgaccaggagctgatgcatagtctgcagcgggccctgaccggggccgggaccgagggggagagctactttgacatgggcgcggacctgcactggcagcccagccgccgggccttggaggcggcggcaggaccctacgtagaagaggtggacgatgaggtggacgaggagggcgagtacctggaagactgatggcgcgaccgtatttttgctagatgcaacaacaacagccacctcctgatcccgcgatgcgggcggcgctgcagagccagccgtccggcattaactcctcggacgattggacccaggccatgcaacgcatcatggcgctgacgacccgcaaccccgaagcctttagacagcagccccaggccaaccggctctcggccatcctggaggccgtggtgccctcgcgctccaaccccacgcacgagaaggtcctggccatcgtgaacgcgctggtggagaacaaggccatccgcggcgacgaggccggcctggtgtacaacgcgctgctggagcgcgtggcccgctacaacagcaccaacgtgcagaccaacctggaccgcatggtgaccgacgtgcgcgaggccgtggcccagcgcgagcggttccaccgcgagtccaacctgggatccatggtggcgctgaacgccttcctcagcacccagcccgccaacgtgccccggggccaggaggactacaccaacttcatcagcgccctgcgcctgatggtgaccgaggtgccccagagcgaggtgtaccagtccgggccggactacttcttccagaccagtcgccagggcttgcagaccgtgaacctgagccaggctttcaagaacttgcagggcctgtggggcgtgcaggccccggtcggggaccgcgcgacggtgtcgagcctgctgacgccgaactcgcgcctgctgctgctgctggtggcccccttcacggacagcggcagcatcaaccgcaactcgtacctgggctacctgattaacctgtaccgcgaggccatcggccaggcgcacgtggacgagcagacctaccaggagatcacccacgtgagccgcgccctgggccaggacgacccgggcaacctggaagccaccctgaactttttgctgaccaaccggtcgcagaagatcccgccccagtacgcgctcagcaccgaggaggagcgcatcctgcgttacgtgcagcagagcgtgggcctgttcctgatgcaggagggggccacccccagcgccgcgctcgacatgaccgcgcgcaacatggagcccagcatgtacgccagcaaccgcccgttcatcaataaactgatggactacttgcatcgggcggccgccatgaactctgactatttcaccaacgccatcctgaatccccactggctcccgccgccggggttctacacgggcgagtacgacatgcccgaccccaatgacgggttcctgtgggacgatgtggacagcagcgtgttctccccccgaccgggtgctaacgagcgccccttgtggaagaaggaaggcagcgaccgacgcccgtcctcggcgctgtccggccgcgagggtgctgccgcggcggtgcccgaggccgccagtcctttcccgagcttgcccttctcgctgaacagtatccgcagcagcgagctgggcaggatcacgcgcccgcgcttgctgggcgaagaggagtacttgaatgactcgctgttgagacccgagcgggagaagaacttccccaataacgggatagaaagcctggtggacaagatgagccgctggaagacgtatgcgcaggagcacagggacgatccccgggcgtcgcagggggccacgagccggggcagcgccgcccgtaaacgccggtggcacgacaggcagcggggacagatgtgggacgatgaggactccgccgacgacagcagcgtgttggacttgggtgggagtggtaacccgttcgctcacctgcgcccccgtatcgggcgcatgatgtaagagaaaccgaaaataaatgatactcaccaaggccatggcgaccagcgtgcgttcgtttcttctctgttgttgttgtatctagtatgatgaggcgtgcgtacccggagggtcctcctccctcgtacgagagcgtgatgcagcaggcgatggcggcggcggcgatgcagcccccgctggaggctccttacgtgcccccgcggtacctggcgcctacggaggggcggaacagcattcgttactcggagctggcacccttgtacgataccacccggttgtacctggtggacaacaagtcggcggacatcgcctcgctgaactaccagaacgaccacagcaacttcctgaccaccgtggtgcagaacaatgacttcacccccacggaggccagcacccagaccatcaactttgacgagcgctcgcggtggggcggccagctgaaaaccatcatgcacaccaacatgcccaacgtgaacgagttcatgtacagcaacaagttcaaggcgcgggtgatggtctcccgcaagacccccaatggggtgacagtgacagaggattatgatggtagtcaggatgagctgaagtatgaatgggtggaatttgagctgcccgaaggcaacttctcggtgaccatgaccatcgacctgatgaacaacgccatcatcgacaattacttggcggtggggcggcagaacggggtgctggagagcgacatcggcgtgaagttcgacactaggaacttcaggctgggctgggaccccgtgaccgagctggtcatgcccggggtgtacaccaacgaggctttccatcccgatattgtcttgctgcccggctgcggggtggacttcaccgagagccgcctcagcaacctgctgggcattcgcaagaggcagcccttccaggaaggcttccagatcatgtacgaggatctggaggggggcaacatccccgcgctcctggatgtcgacgcctatgagaaaagcaaggaggatgcagcagctgaagcaactgcagccgtagctaccgcctctaccgaggtcaggggcgataattttgcaagcgccgcagcagtggcagcggccgaggcggctgaaaccgaaagtaagatagtcattcagccggtggagaaggatagcaagaacaggagctacaacgtactaccggacaagataaacaccgcctaccgcagctggtacctagcctacaactatggcgaccccgagaagggcgtgcgctcctggacgctgctcaccacctcggacgtcacctgcggcgtggagcaagtctactggtcgctgcccgacatgatgcaagacccggtcaccttccgctccacgcgtcaagttagcaactacccggtggtgggcgccgagctcctgcccgtctactccaagagcttcttcaacgagcaggccgtctactcgcagcagctgcgcgccttcacctcgcttacgcacgtcttcaaccgcttccccgagaaccagatcctcgtccgcccgcccgcgcccaccattaccaccgtcagtgaaaacgttcctgctctcacagatcacgggaccctgccgctgcgcagcagtatccggggagtccagcgcgtgaccgttactgacgccagacgccgcacctgcccctacgtctacaaggccctgggcatagtcgcgccgcgcgtcctctcgagccgcaccttctaaatgtccattctcatctcgcccagtaataacaccggttggggcctgcgcgcgcccagcaagatgtacggaggcgctcgccaacgctccacgcaacaccccgtgcgcgtgcgcgggcacttccgcgctccctggggcgccctcaagggccgcgtgcggtcgcgcaccaccgtcgacgacgtgatcgaccaggtggtggccgacgcgcgcaactacacccccgccgccgcgcccgtctccaccgtggacgccgtcatcgacagcgtggtggccgacgcgcgccggtacgcccgcgccaagagccggcggcggcgcatcgcccggcggcaccggagcacccccgccatgcgcgcggcgcgagccttgctgcgcagggccaggcgcacgggacgcagggccatgctcagggcggccagacgcgcggcttcaggcgccagcgccggcaggacccggagacgcgcggccacggcggcggcagcggccatcgccagcatgtcccgcccgcggcgagggaacgtgtactgggtgcgcgacgccgccaccggtgtgcgcgtgcccgtgcgcacccgcccccctcgcacttgaagatgttcacttcgcgatgttgatgtgtcccagcggcgaggaggatgtccaagcgcaaattcaaggaagagatgctccaggtcatcgcgcctgagatctacggccctgcggtggtgaaggaggaaagaaagccccgcaaaatcaagcgggtcaaaaaggacaaaaaggaagaagaaagtgatgtggacggattggtggagtttgtgcgcgagttcgccccccggcggcgcgtgcagtggcgcgggcggaaggtgcaaccggtgctgagacccggcaccaccgtggtcttcacgcccggcgagcgctccggcaccgcttccaagcgctcctacgacgaggtgtacggggatgatgatattctggagcaggcggccgagcgcctgggcgagtttgcttacggcaagcgcagccgttccgcaccgaaggaagaggcggtgtccatcccgctggaccacggcaaccccacgccgagcctcaagcccgtgaccttgcagcaggtgctgccgaccgcggcgccgcgccgggggttcaagcgcgagggcgaggatctgtaccccaccatgcagctgatggtgcccaagcgccagaagctggaagacgtgctggagaccatgaaggtggacccggacgtgcagcccgaggtcaaggtgcggcccatcaagcaggtggccccgggcctgggcgtgcagaccgtggacatcaagattcccacggagcccatggaaacgcagaccgagcccatgatcaagcccagcaccagcaccatggaggtgcagacggatccctggatgccatcggctcctagtcgaagaccccggcgcaagtacggcgcggccagcctgctgatgcccaactacgcgctgcatccttccatcatccccacgccgggctaccgcggcacgcgcttctaccgcggtcataccagcagccgccgccgcaagaccaccactcgccgccgccgtcgccgcaccgccgctgcaaccacccctgccgccctggtgcggagagtgtaccgccgcggccgcgcacctctgaccctgccgcgcgcgcgctaccacccgagcatcgccatttaaactttcgcctgctttgcagatcaatggccctcacatgccgccttcgcgttcccattacgggctaccgaggaagaaaaccgcgccgtagaaggctggcggggaacgggatgcgtcgccaccaccaccggcggcggcgcgccatcagcaagcggttggggggaggcttcctgcccgcgctgatccccatcatcgccgcggcgatcggggcgatccccggcattgcttccgtggcggtgcaggcctctcagcgccactgagacacacttggaaacatcttgtaataaaccaatggactctgacgctcctggtcctgtgatgtgttttcgtagacagatggaagacatcaatttttcgtccctggctccgcgacacggcacgcggccgttcatgggcacctggagcgacatcggcaccagccaactgaacgggggcgccttcaattggagcagtctctggagcgggcttaagaatttcgggtccacgcttaaaacctatggcagcaaggcgtggaacagcaccacagggcaggcgctgagggataagctgaaagagcagaacttccagcagaaggtggtcgatgggctcgcctcgggcatcaacggggtggtggacctggccaaccaggccgtgcagcggcagatcaacagccgcctggacccggtgccgcccgccggctccgtggagatgccgcaggtggaggaggagctgcctcccctggacaagcggggcgagaagcgaccccgccccgatgcggaggagacgctgctgacgcacacggacgagccgcccccgtacgaggaggcggtgaaactgggtctgcccaccacgcggcccatcgcgcccctggccaccggggtgctgaaacccgaaaagcccgcgaccctggacttgcctcctccccagccttcccgcccctctacagtggctaagcccctgccgccggtggccgtggcccgcgcgcgacccgggggcaccgcccgccctcatgcgaactggcagagcactctgaacagcatcgtgggtctgggagtgcagagtgtgaagcgccgccgctgctattaaacctaccgtagcgcttaacttgcttgtctgtgtgtgtatgtattatgtcgccgccgccgctgtccaccagaaggaggagtgaagaggcgcgtcgccgagttgcaagatggccaccccatcgatgctgccccagtgggcgtacatgcacatcgccggacaggacgcttcggagtacctgagtccgggtctggtgcagtttgcccgcgccacagacacctacttcagtctggggaacaagtttaggaaccccacggtggcgcccacgcacgatgtgaccaccgaccgcagccagcggctgacgctgcgcttcgtgcccgtggaccgcgaggacaacacctactcgtacaaagtgcgctacacgctggccgtgggcgacaaccgcgtgctggacatggccagcacctactttgacatccgcggcgtgctggatcggggccctagcttcaaaccctactccggcaccgcctacaacagtctggcccccaagggagcacccaacacttgtcagtggacatataaagccgatggtgaaactgccacagaaaaaacctatacatatggaaatgcacccgtgcagggcattaacatcacaaaagatggtattcaacttggaactgacaccgatgatcagccaatctacgcagataaaacctatcagcctgaacctcaagtgggtgatgctgaatggcatgacatcactggtactgatgaaaagtatggaggcagagctcttaagcctgataccaaaatgaagccttgttatggttcttttgccaagcctactaataaagaaggaggtcaggcaaatgtgaaaacaggaacaggcactactaaagaatatgacatagacatggctttctttgacaacagaagtgcggctgctgctggcctagctccagaaattgttttgtatactgaaaatgtggatttggaaactccagatacccatattgtatacaaagcaggcacagatgacagcagctcttctattaatttgggtcagcaagccatgcccaacagacctaactacattggtttcagagacaactttatcgggctcatgtactacaacagcactggcaatatgggggtgctggccggtcaggcttctcagctgaatgctgtggttgacttgcaagacagaaacaccgagctgtcctaccagctcttgcttgactctctgggtgacagaacccggtatttcagtatgtggaatcaggcggtggacagctatgatcctgatgtgcgcattattgaaaatcatggtgtggaggatgaacttcccaactattgtttccctctggatgctgttggcagaacagatacttatcagggaattaaggctaatggaactgatcaaaccacatggaccaaagatgacagtgtcaatgatgctaatgagataggcaagggtaatccattcgccatggaaatcaacatccaagccaacctgtggaggaacttcctctacgccaacgtggccctgtacctgcccgactcttacaagtacacgccggccaatgttaccctgcccaccaacaccaacacctacgattacatgaacggccgggtggtggcgccctcgctggtggactcctacatcaacatcggggcgcgctggtcgctggatcccatggacaacgtgaaccccttcaaccaccaccgcaatgcggggctgcgctaccgctccatgctcctgggcaacgggcgctacgtgcccttccacatccaggtgccccagaaatttttcgccatcaagagcctcctgctcctgcccgggtcctacacctacgagtggaacttccgcaaggacgtcaacatgatcctgcagagctccctcggcaacgacctgcgcacggacggggcctccatctccttcaccagcatcaacctctacgccaccttcttccccatggcgcacaacacggcctccacgctcgaggccatgctgcgcaacgacaccaacgaccagtccttcaacgactacctctcggcggccaacatgctctaccccatcccggccaacgccaccaacgtgcccatctccatcccctcgcgcaactgggccgccttccgcggctggtccttcacgcgtctcaagaccaaggagacgccctcgctgggctccgggttcgacccctacttcgtctactcgggctccatcccctacctcgacggcaccttctacctcaaccacaccttcaagaaggtctccatcaccttcgactcctccgtcagctggcccggcaacgaccggctcctgacgcccaacgagttcgaaatcaagcgcaccgtcgacggcgagggctacaacgtggcccagtgcaacatgaccaaggactggttcctggtccagatgctggcccactacaacatcggctaccagggcttctacgtgcccgagggctacaaggaccgcatgtactccttcttccgcaacttccagcccatgagccgccaggtggtggacgaggtcaactacaaggactaccaggccgtcaccctggcctaccagcacaacaactcgggcttcgtcggctacctcgcgcccaccatgcgccagggccagccctaccccgccaactacccctacccgctcatcggcaagagcgccgtcaccagcgtcacccagaaaaagttcctctgcgacagggtcatgtggcgcatccccttctccagcaacttcatgtccatgggcgcgctcaccgacctcggccagaacatgctctatgccaactccgcccacgcgctagacatgaatttcgaagtcgaccccatggatgagtccacccttctctatgttgtcttcgaagtcttcgacgtcgtccgagtgcaccagccccaccgcggcgtcatcgaggccgtctacctgcgcacccccttctcggccggtaacgccaccacctaagctcttgcttcttgcaagccatggccgcgggctccggcgagcaggagctcagggccatcatccgcgacctgggctgcgggccctacttcctgggcaccttcgataagcgcttcccgggattcatggccccgcacaagctggcctgcgccatcgtcaacacggccggccgcgagaccgggggcgagcactggctggccttcgcctggaacccgcgctcgaacacctgctacctcttcgaccccttcgggttctcggacgagcgcctcaagcagatctaccagttcgagtacgagggcctgctgcgccgcagcgccctggccaccgaggaccgctgcgtcaccctggaaaagtccacccagaccgtgcagggtccgcgctcggccgcctgcgggctcttctgctgcatgttcctgcacgccttcgtgcactggcccgaccgccccatggacaagaaccccaccatgaacttgctgacgggggtgcccaacggcatgctccagtcgccccaggtggaacccaccctgcgccgcaaccaggaggcgctctaccgcttcctcaactcccactccgcctactttcgctcccaccgcgcgcgcatcgagaaggccaccgccttcgaccgcatgaatcaagacatgtaaaccgtgtgtgtatgttaaatgtctttaataaacagcactttcatgttacacatgcatctgagatgatttatttagaaatcgaaagggttctgccgggtctcggcatggcccgcgggcagggacacgttgcggaactggtacttggccagccacttgaactcggggatcagcagtttgggcagcggggtgtcggggaaggagtcggtccacagcttccgcgtcagttgcagggcgcccagcaggtcgggcgcggagatcttgaaatcgcagttgggacccgcgttctgcgcgcgggagttgcggtacacggggttgcagcactggaacaccatcagggccgggtgcttcacgctcgccagcaccgtcgcgtcggtgatgctctccacgtcgaggtcctcggcgttggccatcccgaagggggtcatcttgcaggtctgccttcccatggtgggcacgcacccgggcttgtggttgcaatcgcagtgcagggggatcagcatcatctgggcctggtcggcgttcatccccgggtacatggccttcatgaaagcctccaattgcctgaacgcctgctgggccttggctccctcggtgaagaagaccccgcaggacttgctagagaactggttggtggcgcacccggcgtcgtgcacgcagcagcgcgcgtcgttgttggccagctgcaccacgctgcgcccccagcggttctgggtgatcttggcccggtcggggttctccttcagcgcgcgctgcccgttctcgctcgccacatccatctcgatcatgtgctccttctggatcatggtggtcccgtgcaggcaccgcagcttgccctcggcctcggtgcacccgtgcagccacagcgcgcacccggtgcactcccagttcttgtgggcgatctgggaatgcgcgtgcacgaagccctgcaggaagcggcccatcatggtggtcagggtcttgttgctagtgaaggtcagcggaatgccgcggtgctcctcgttgatgtacaggtggcagatgcggcggtacacctcgccctgctcgggcatcagctggaagttggctttcaggtcggtctccacgcggtagcggtccatcagcatagtcatgatttccatacccttctcccaggccgagacgatgggcaggctcatagggttcttcaccatcatcttagcgctagcagccgcggccagggggtcgctctcgtccagggtctcaaagctccgcttgccgtccttctcggtgatccgcaccggggggtagctgaagcccacggccgccagctcctcctcggcctgtctttcgtcctcgctgtcctggctgacgtcctgcaggaccacatgcttggtcttgcggggtttcttcttgggcggcagcggcggcggagatgttggagatggcgagggggagcgcgagttctcgctcaccactactatctcttcctcttcttggtccgaggccacgcggcggtaggtatgtctcttcgggggcagaggcggaggcgacgggctctcgccgccgcgacttggcggatggctggcagagccccttccgcgttcgggggtgcgctcccggcggcgctctgactgacttcctccgcggccggccattgtgttctcctagggaggaacaacaagcatggagactcagccatcgccaacctcgccatctgcccccaccgccgacgagaagcagcagcagcagaatgaaagcttaaccgccccgccgcccagccccgccacctccgacgcggccgtcccagacatgcaagagatggaggaatccatcgagattgacctgggctatgtgacgcccgcggagcacgaggaggagctggcagtgcgcttttcacaagaagagatacaccaagaacagccagagcaggaagcagagaatgagcagagtcaggctgggctcgagcatgacggcgactacctccacctgagcgggggggaggacgcgctcatcaagcatctggcccggcaggccaccatcgtcaaggatgcgctgctcgaccgcaccgaggtgcccctcagcgtggaggagctcagccgcgcctacgagttgaacctcttctcgccgcgcgtgccccccaagcgccagcccaatggcacctgcgagcccaacccgcgcctcaacttctacccggtcttcgcggtgcccgaggccctggccacctaccacatctttttcaagaaccaaaagatccccgtctcctgccgcgccaaccgcacccgcgccgacgcccttttcaacctgggtcccggcgcccgcctacctgatatcgcctccttggaagaggttcccaagatcttcgagggtctgggcagcgacgagactcgggccgcgaacgctctgcaaggagaaggaggagagcatgagcaccacagcgccctggtcgagttggaaggcgacaacgcgcggctggcggtgctcaaacgcacggtcgagctgacccatttcgcctacccggctctgaacctgccccccaaagtcatgagcgcggtcatggaccaggtgctcatcaagcgcgcgtcgcccatctccgaggacgagggcatgcaagactccgaggagggcaagcccgtggtcagcgacgagcagctggcccggtggctgggtcctaatgctagtccccagagtttggaagagcggcgcaaactcatgatggccgtggtcctggtgaccgtggagctggagtgcctgcgccgcttcttcgccgacgcggagaccctgcgcaaggtcgaggagaacctgcactacctcttcaggcacgggttcgtgcgccaggcctgcaagatctccaacgtggagctgaccaacctggtctcctacatgggcatcttgcacgagaaccgcctggggcagaacgtgctgcacaccaccctgcgcggggaggcccggcgcgactacatccgcgactgcgtctacctctacctctgccacacctggcagacgggcatgggcgtgtggcagcagtgtctggaggagcagaacctgaaagagctctgcaagctcctgcagaagaacctcaagggtctgtggaccgggttcgacgagcgcaccaccgcctcggacctggccgacctcattttccccgagcgcctcaggctgacgctgcgcaacggcctgcccgactttatgagccaaagcatgttgcaaaactttcgctctttcatcctcgaacgctccggaatcctgcccgccacctgctccgcgctgccctcggacttcgtgccgctgaccttccgcgagtgccccccgccgctgtggagccactgctacctgctgcgcctggccaactacctggcctaccactcggacgtgatcgaggacgtcagcggcgagggcctgctcgagtgccactgccgctgcaacctctgcacgccgcaccgctccctggcctgcaacccccagctgctgagcgagacccagatcatcggcaccttcgagttgcaagggcccagcgaaggcgagggttcagccgccaaggggggtctgaaactcaccccggggctgtggacctcggcctacttgcgcaagttcgtgcccgaggactaccatcccttcgagatcaggttctacgaggaccaatcccatccgcccaaggccgagctgtcggcctgcgtcatcacccagggggcgatcctggcccaattgcaagccatccagaaatcccgccaagaattcttgctgaaaaagggccgcggggtctacctcgacccccagaccggtgaggagctcaaccccggcttcccccaggatgccccgaggaaacaagaagctgaaagtggagctgccgcccgtggaggatttggaggaagactgggagaacagcagtcaggcagaggaggaggagatggaggaagactgggacagcactcaggcagaggaggacagcctgcaagacagtctggaggaagacgaggaggaggcagaggaggaggtggaagaagcagccgccgccagaccgtcgtcctcggcgggggagaaagcaagcagcacggataccatctccgctccgggtcggggtcccgctcgaccacacagtagatgggacgagaccggacgattcccgaaccccaccacccagaccggtaagaaggagcggcagggatacaagtcctggcgggggcacaaaaacgccatcgtctcctgcttgcaggcctgcgggggcaacatctccttcacccggcgctacctgctcttccaccgcggggtgaactttccccgcaacatcttgcattactaccgtcacctccacagcccctactacttccaagaagaggcagcagcagcagaaaaagaccagcagaaaaccagcagctagaaaatccacagcggcggcagcaggtggactgaggatcgcggcgaacgagccggcgcaaacccgggagctgaggaaccggatctttcccaccctctatgccatcttccagcagagtcgggggcaggagcaggaactgaaagtcaagaaccgttctctgcgctcgctcacccgcagttgtctgtatcacaagagcgaagaccaacttcagcgcactctcgaggacgccgaggctctcttcaacaagtactgcgcgctcactcttaaagagtagcccgcgcccgcccagtcgcagaaaaaggcgggaattacgtcacctgtgcccttcgccctagccgcctccacccatcatcatgagcaaagagattcccacgccttacatgtggagctaccagccccagatgggcctggccgccggtgccgcccaggactactccacccgcatgaattggctcagcgccgggcccgcgatgatctcacgggtgaatgacatccgcgcccaccgaaaccagatactcctagaacagtcagcgctcaccgccacgccccgcaatcacctcaatccgcgtaattggcccgccgccctggtgtaccaggaaattccccagcccacgaccgtactacttccgcgagacgcccaggccgaagtccagctgactaactcaggtgtccagctggcgggcggcgccaccctgtgtcgtcaccgccccgctcagggtataaagcggctggtgatccggggcagaggcacacagctcaacgacgaggtggtgagctcttcgctgggtctgcgacctgacggagtcttccaactcgccggatcggggagatcttccttcacgcctcgtcaggccgtcctgactttggagagttcgtcctcgcagccccgctcgggtggcatcggcactctccagttcgtggaggagttcactccctcggtctacttcaaccccttctccggctcccccggccactacccggacgagttcatcccgaacttcgacgccatcagcgagtcggtggacggctacgattgaatgtcccatggtggcgcagctgacctagctcggcttcgacacctggaccactgccgccgcttccgctgcttcgctcgggatctcgccgagtttgcctactttgagctgcccgaggagcaccctcagggcccggcccacggagtgcggatcgtcgtcgaagggggcctcgactcccacctgcttcggatcttcagccagcgtccgatcctggtcgagcgcgagcaaggacagacccttctgactctgtactgcatctgcaaccaccccggcctgcatgaaagtctttgttgtctgctgtgtactgagtataataaaagctgagatcagcgactactccggacttccgtgtgttcctgaatccatcaaccagtctttgttcttcaccgggaacgagaccgagctccagctccagtgtaagccccacaagaagtacctcacctggctgttccagggctccccgatcgccgttgtcaaccactgcgacaacgacggagtcctgctgagcggccctgccaaccttactttttccacccgcagaagcaagctccagctcttccaacccttcctccccgggacctatcagtgcgtctcgggaccctgccatcacaccttccacctgatcccgaataccacagcgtcgctccccgctactaacaaccaaactaacctccaccaacgccaccgtcgcgacggccacaatacatgcccatattagactatgaggccgagccacagcgacccatgctccccgctattagttacttcaatctaaccggcggagatgactgacccactggccaacaacaacgtcaacgaccttctcctggacatggacggccgcgcctcggagcagcgactcgcccaacttcgcattcgccagcagcaggagagagccgtcaaggagctgcaggatgcggtggccatccaccagtgcaagagaggcatcttctgcctggtgaaacaggccaagatctcctacgaggtcactccaaacgaccatcgcctctcctacgagctcctgcagcagcgccagaagttcacctgcctggtcggagtcaaccccatcgtcatcacccagcagtctggcgataccaaggggtgcatccactgctcctgcgactcccccgactgcgtccacactctgatcaagaccctctgcggcctccgcgacctcctccccatgaactaatcacccccttatccagtgaaataaagatcatattgatgatgattttacagaaataaaaaataatcatttgatttgaaataaagatacaatcatattgatgatttgagtttaacaaaaaaataaagaatcacttacttgaaatctgataccaggtctctgtccatgttttctgccaacaccacttcactcccctcttcccagctctggtactgcaggccccggcgggctgcaaacttcctccacacgctgaaggggatgtcaaattcctcctgtccctcaatcttcattttatcttctatcagatgtccaaaaagcgcgtccgggtggatgatgacttcgaccccgtctacccctacgatgcagacaacgcaccgaccgtgcccttcatcaacccccccttcgtctcttcagatggattccaagagaagcccctgggggtgttgtccctgcgactggccgaccccgtcaccaccaagaacggggaaatcaccctcaagctgggagagggggtggacctcgattcctcgggaaaactcatctccaacacggccaccaaggccgccgcccctctcagtttttccaacaacaccatttcccttaacatggatcaccccttttacactaaagatggaaaattatccttacaagtttctccaccattaaatatactgagaacaagcattctaaacacactagctttaggttttggatcaggtttaggactccgtggctctgccttggcagtacagttagtctctccacttacatttgatactgatggaaacataaagcttaccttagacagaggtttgcatgttacaacaggagatgcaattgaaagcaacataagctgggctaaaggtttaaaatttgaagatggagccatagcaaccaacattggaaatgggttagagtttggaagcagtagtacagaaacaggtgttgatgatgcttacccaatccaagttaaacttggatctggccttagctttgacagtacaggagccataatggctggtaacaaagaagacgataaactcactttgtggacaacacctgatccatcaccaaactgtcaaatactcgcagaaaatgatgcaaaactaacactttgcttgactaaatgtggtagtcaaatactggccactgtgtcagtcttagttgtaggaagtggaaacctaaaccccattactggcaccgtaagcagtgctcaggtgtttctacgttttgatgcaaacggtgttcttttaacagaacattctacactaaaaaaatactgggggtataggcagggagatagcatagatggcactccatataccaatgctgtaggattcatgcccaatttaaaagcttatccaaagtcacaaagttctactactaaaaataatatagtagggcaagtatacatgaatggagatgtttcaaaacctatgcttctcactataaccctcaatggtactgatgacagcaacagtacatattcaatgtcattttcatacacctggactaatggaagctatgttggagcaacatttggggctaactcttataccttctcatacatcgcccaagaatgaacactgtatcccaccctgcatgccaacccttcccaccccactctgtggaacaaactctgaaacacaaaataaaataaagttcaagtgttttattgattcaacagttttacaggattcgagcagttatttttcctccaccctcccaggacatggaatacaccaccctctccccccgcacagccttgaacatctgaatgccattggtgatggacatgcttttggtctccacgttccacacagtttcagagcgagccagtctcgggtcggtcagggagatgaaaccctccgggcactcccgcatctgcacctcacagctcaacagctgaggattgtcctcggtggtcgggatcacggttatctggaagaagcagaagagcggcggtgggaatcatagtccgcgaacgggatcggccggtggtgtcgcatcaggccccgcagcagtcgctgccgccgccgctccgtcaagctgctgctcagggggtccgggtccagggactccctcagcatgatgcccacggccctcagcatcagtcgtctggtgcggcgggcgcagcagcgcatgcggatctcgctcaggtcgctgcagtacgtgcaacacagaaccaccaggttgttcaacagtccatagttcaacacgctccagccgaaactcatcgcgggaaggatgctacccacgtggccgtcgtaccagatcctcaggtaaatcaagtggtgccccctccagaacacgctgcccacgtacatgatctccttgggcatgtggcggttcaccacctcccggtaccacatcaccctctggttgaacatgcagccccggatgatcctgcggaaccacagggccagcaccgccccgcccgccatgcagcgaagagaccccgggtcccggcaatggcaatggaggacccaccgctcgtacccgtggatcatctgggagctgaacaagtctatgttggcacagcacaggcatatgctcatgcatctcttcagcactctcaactcctcgggggtcaaaaccatatcccagggcacggggaactcttgcaggacagcgaaccccgcagaacagggcaatcctcgcacagaacttacattgtgcatggacagggtatcgcaatcaggcagcaccgggtgatcctccaccagagaagcgcgggtctcggtctcctcacagcgtggtaagggggccggccgatacgggtgatggcgggacgcggctgatcgtgttcgcgaccgtgtcatgatgcagttgctttcggacattttcgtacttgctgtagcagaacctggtccgggcgctgcacaccgatcgccggcggcggtctcggcgcttggaacgctcggtgttgaaattgtaaaacagccactctctcagaccgtgcagcagatctagggcctcaggagtgatgaagatcccatcatgcctgatggctctgatcacatcgaccaccgtggaatgggccagacccagccagatgatgcaattttgttgggtttcggtgacggcgggggagggaagaacaggaagaaccatgattaacttttaatccaaacggtctcggagtacttcaaaatgaagatcgcggagatggcacctctcgcccccgctgtgttggtggaaaataacagccaggtcaaaggtgatacggttctcgagatgttccacggtggcttccagcaaagcctccacgcgcacatccagaaacaagacaatagcgaaagcgggagggttctctaattcctcaatcatcatgttacactcctgcaccatccccagataattttcatttttccagccttgaatgattcgaactagttcgtgaggtaaatccaagccagccatgataaagagctcgcgcagagcgccctccaccggcattcttaagcacaccctcataattccaagatattctgctcctggttcacctgcagcagattgacaagcggaatatcaaaatctctgccgcgatccctgagctcctccctcagcaataactgtaagtactctttcatatcctctccgaaatttttagccataggaccaccaggaataagattagggcaagccacagtacagataaaccgaagtcctccccagtgagcattgccaaatgcaagactgctataagcatgctggctagacccggtgatatcttccagataactggacagaaaatcgcccaggcaatttttaagaaaatcaacaaaagaaaaatcctccaggtggacgtttagagcctcgggaacaacgatgaagtaaatgcaagcggtgcgttccagcatggttagttagctgatctgtagaaaaaacaaaaatgaacattaaaccatgctagcctggcgaacaggtgggtaaatcgttctctccagcaccaggcaggccacggggtctccggcgcgaccctcgtaaaaattgtcgctatgattgaaaaccatcacagagagacgttcccggtggccggcgtgaatgattcgacaagatgaatacacccccggaacattggcgtccgcgagtgaaaaaaagcgcccgaggaagcaataaggcactacaatgctcagtctcaagtccagcaaagcgatgccatgcggatgaagcacaaaattctcaggtgcgtacaaaatgtaattactcccctcctgcacaggcagcaaagcccccgatccctccaggtacacatacaaagcctcagcgtccatagcttaccgagcagcagcacacaacaggcgcaagagtcagagaaaggctgagctctaacctgtccacccgctctctgctcaatatatagcccagatctacactgacgtaaaggccaaagtctaaaaatacccgccaaataatcacacacgcccagcacacgcccagaaaccggtgacacactcaaaaaaatacgcgcacttcctcaaacgcccaaaactgccgtcatttccgggttcccacgctacgtcatcaaaacacgactttcaaattccgtcgaccgttaaaaacgtcacccgccccgcccctaacggtcgcccgtctctcagccaatcagcgccccgcatccccaaattcaaacacctcatttgcatattaacgcgcacaaaaagtttgaggtatattattgatgatgg

SEQ ID NO: 12 - DNA, 32788 bp, synthetic construct
  misc_feature 1..32788: note = Description of Artificial Sequence: Synthetic polynucleotide
  source 1..32788: mol_type = other DNA
ccatcttcaataatatacctcaaactttttgtgcgcgttaatatgcaaatgaggcgtttgaatttggggaggaagggcggtgattggtcgagggatgagcgaccgttaggggcggggcgagtgacgttttgatgacgtggttgcgaggaggagccagtttgcaagttctcgtgggaaaagtgacgtcaaacgaggtgtggtttgaacacggaaatactcaattttcccgcgctctctgacaggaaatgaggtgtttctgggcggatgcaagtgaaaacgggccattttcgcgcgaaaactgaatgaggaagtgaaaatctgagtaatttcgcgtttatggcagggaggagtatttgccgagggccgagtagactttgaccgattacgtgggggtttcgattaccgtgtttttcacctaaatttccgcgtacggtgtcaaagtccggtgtttttacgtaggtgtcagctgatcgccagggtatttaaacctgcgctctccagtcaagaggccactcttgagtgccagcgagaagagttttctcctccgcgccgcgagtcagatctacactttgaaagtagggataacagggtaatgacattgattattgactagttgttaatagtaatcaattacggggtcattagttcatagcccatatatggagttccgcgttacataacttacggtaaatggcccgcctggctgaccgcccaacgacccccgcccattgacgtcaataatgacgtatgttcccatagtaacgccaatagggactttccattgacgtcaatgggtggagtatttacggtaaactgcccacttggcagtacatcaagtgtatcatatgccaagtccgccccctattgacgtcaatgacggtaaatggcccgcctggcattatgcccagtacatgaccttacgggactttcctacttggcagtacatctacgtattagtcatcgctattaccatggtgatgcggttttggcagtacaccaatgggcgtggatagcggtttgactcacggggatttccaagtctccaccccattgacgtcaatgggagtttgttttggcaccaaaatcaacgggactttccaaaatgtcgtaataaccccgccccgttgacgcaaatgggcggtaggcgtgtacggtgggaggtctatataagcagagctcgtttagtgaaccgtcagatcgcctggaacgccatccacgctgttttgacctccatagaagacagcgatcgcgccaccatggccgggatgttccaggcactgtccgaaggctgcacaccctatgatattaaccagatgctgaatgtcctgggagaccaccaggtctctggcctggagcagctggagagcatcatcaacttcgagaagctgaccgagtggacaagctccaatgtgatgcctatcctgtccccactgaccaagggcatcctgggcttcgtgtttaccctgacagtgccttctgagcggggcctgtcttgcatcagcgaggcagacgcaaccacaccagagtccgccaatctgggcgaggagatcctgtctcagctgtacctgtggccccgggtgacatatcactccccttcttacgcctatcaccagttcgagcggagagccaagtacaagagacacttcccaggctttggccagtctctgctgttcggctaccccgtgtacgtgttcggcgattgcgtgcagggcgactgggatgccatccggtttagatactgcgcaccacctggatatgcactgctgaggtgtaacgacaccaattattccgccctgctggcagtgggcgccctggagggccctcgcaatcaggattggctgggcgtgccaaggcagctggtgacacgcatgcaggccatccagaacgcaggcctgtgcaccctggtggcaatgctggaggagacaatcttctggctgcaggcctttctgatggccctgaccgacagcggccccaagacaaacatcatcgtggattcccagtacgtgatgggcatctccaagccttctttccaggagtttgtggactgggagaacgtgagcccagagctgaattccaccgatcagccattctggcaggcaggaatcctggcaaggaacctggtgcctatggtggccacagtgcagggccagaatctgaagtaccagggccagagcctggtcatcagcgcctccatcatcgtgtttaacctgctggagctggagggcgactatcgggacgatggcaacgtgtgggtgcacaccccactgagccccagaacactgaacgcctgggtgaaggccgtggaggagaagaagggcatcccagtgcacctggagctggcctccatgaccaatatggagctgatgtctagcatcgtgcaccagcaggtgaggacatacggacccgtgttcatgtgcctgggaggcctgctgaccatggtggcaggagccgtgtggctgacagtgcgggtgctggagctgttcagagccgcccagctggccaacgatgtggtgctgcagatcatggagctgtgcggagcagcctttcgccaggtgtgccacaccacagtgccatggcccaatgcctccctgacccccaagtggaacaatgagacaacacagcctcagatcgccaactgtagcgtgtacgacttcttcgtgtggctgcactactatagcgtgagggataccctgtggccccgcgtgacataccacatgaataagtacgcctatcacatgctggagaggcgcgccaagtataagagaggccctggcccaggcgcaaagtttgtggcagcatggaccctgaaggccgccgccggccccggccccggccagtatatcaaggctaacagtaagttcattggaatcacagagctgggacccggacctggataatgagtttaaactcccatttaaatgtgagggttaatgcttcgagcagacatgataagatacattgatgagtttggacaaaccacaactagaatgcagtgaaaaaaatgctttatttgtgaaatttgtgatgctattgctttatttgtaaccattataagctgcaataaacaagttaacaacaacaattgcattcattttatgtttcaggttcagggggagatgtgggaggttttttaaagcaagtaaaacctctacaaatgtggtaaaataactataacggtcctaaggtagcgagtgagtagtgttctggggcgggggaggacctgcatgagggccagaataactgaaatctgtgcttttctgtgtgttgcagcagcatgagcggaagcggctcctttgagggaggggtattcagcccttatctgacggggcgtctcccctcctgggcgggagtgcgtcagaatgtgatgggatccacggtggacggccggcccgtgcagcccgcgaactcttcaaccctgacctatgcaaccctgagctcttcgtcgttggacgcagctgccgccgcagctgctgcatctgccgccagcgccgtgcgcggaatggccatgggcgccggctactacggcactctggtggccaactcgagttccaccaataatcccgccagcctgaacgaggagaagctgttgctgctgatggcccagctcgaggccttgacccagcgcctgggcgagctgacccagcaggtggctcagctgcaggagcagacgcgggccgcggttgccacggtgaaatccaaataaaaaatgaatcaataaataaacggagacggttgttgattttaacacagagtctgaatctttatttgatttttcgcgcgcggtaggccctggaccaccggtctcgatcattgagcacccggtggatcttttccaggacccggtagaggtgggcttggatgttgaggtacatgggcatgagcccgtcccgggggtggaggtagctccattgcagggcctcgtgctcgggggtggtgttgtaaatcacccagtcatagcaggggcgcagggcatggtgttgcacaatatctttgaggaggagactgatggccacgggcagccctttggtgtaggtgtttacaaatctgttgagctgggagggatgcatgcggggggagatgaggtgcatcttggcctggatcttgagattggcgatgttaccgcccagatcccgcctggggttcatgttgtgcaggaccaccagcacggtgtatccggtgcacttggggaatttatcatgcaacttggaagggaaggcgtgaaagaatttggcgacgcctttgtgcccgcccaggttttccatgcactcatccatgatgatggcgatgggcccgtgggcggcggcctgggcaaagacgtttcgggggtcggacacatcatagttgtggtcctgggtgaggtcatcataggccattttaatgaatttggggcggagggtgccggactgggggacaaaggtaccctcgatcccgggggcgtagttcccctcacagatctgcatctcccaggctttgagctcggagggggggatcatgtccacctgcggggcgataaagaacacggtttccggggcgggggagatgagctgggccgaaagcaagttccggagcagctgggacttgccgcagccggtggggccgtagatgaccccgatgaccggctgcaggtggtagttgagggagagacagctgccgtcctcccggaggaggggggccacctcgttcatcatctcgcgcacgtgcatgttctcgcgcaccagttccgccaggaggcgctctccccccagggataggagctcctggagcgaggcgaagtttttcagcggcttgagtccgtcggccatgggcattttggagagggtttgttgcaagagttccaggcggtcccagagctcggtgatgtgctctacggcatctcgatccagcagacctcctcgtttcgcgggttgggacggctgcgggagtagggcaccagacgatgggcgtccagcgcagccagggtccggtccttccagggtcgcagcgtccgcgtcagggtggtctccgtcacggtgaaggggtgcgcgccgggctgggcgcttgcgagggtgcgcttcaggctcatccggctggtcgaaaaccgctcccgatcggcgccctgcgcgtcggccaggtagcaattgaccatgagttcgtagttgagcgcctcggccgcgtggcctttggcgcggagcttacctttggaagtctgcccgcaggcgggacagaggagggacttgagggcgtagagcttgggggcgaggaagacggactcgggggcgtaggcgtccgcgccgcagtgggcgcagacggtctcgcactccacgagccaggtgaggtcgggctggtcggggtcaaaaaccagtttcccgccgttctttttgatgcgtttcttacctttggtctccatgagctcgtgtccccgctgggtgacaaagaggctgtccgtgtccccgtagaccgactttatgggccggtcctcgagcggtgtgccgcggtcctcctcgtagaggaaccccgcccactccgagacgaaagcccgggtccaggccagcacgaaggaggccacgtgggacgggtagcggtcgttgtccaccagcgggtccaccttttccagggtatgcaaacacatgtccccctcgtccacatccaggaaggtgattggcttgtaagtgtaggccacgtgaccgggggtcccggccgggggggtataaaagggtgcgggtccctgctcgtcctcactgtcttccggatcgctgtccaggagcgccagctgttggggtaggtattccctctcgaaggcgggcatgacctcggcactcaggttgtcagtttctagaaacgaggaggatttgatattgacggtgccggcggagatgcctttcaagagcccctcgtccatctggtcagaaaagacgatctttttgttgtcgagcttggtggcgaaggagccgtagagggcgttggagaggagcttggcgatggagcgcatggtctggtttttttccttgtcggcgcgctccttggcggcgatgttgagctgcacgtactcgcgcgccacgcacttccattcggggaagacggtggtcagctcgtcgggcacgattctgacctgccagccccgattatgcagggtgatgaggtccacactggtggccacctcgccgcgcaggggctcattagtccagcagaggcgtccgcccttgcgcgagcagaaggggggcagggggtccagcatgacctcgtcgggggggtcggcatcgatggtgaagatgccgggcaggaggtcggggtcaaagtagctgatggaagtggccagatcgtccagggcagcttgccattcgcgcacggccagcgcgctctcgtagggactgaggggcgtgccccagggcatgggatgggtaagcgcggaggcgtacatgccgcagatgtcgtagacgtagaggggctcctcgaggatgccgatgtaggtggggtagcagcgccccccgcggatgctggcgcgcacgtagtcatacagctcgtgcgagggggcgaggagccccgggcccaggttggtgcgactgggcttttcggcgcggtagacgatctggcggaaaatggcatgcgagttggaggagatggtgggcctttggaagatgttgaagtgggcgtggggcagtccgaccgagtcgcggatgaagtgggcgtaggagtcttgcagcttggcgacgagctcggcggtgactaggacgtccagagcgcagtagtcgagggtctcctggatgatgtcatacttgagctgtcccttttgtttccacagctcgcggttgagaaggaactcttcgcggtccttccagtactcttcgagggggaacccgtcctgatctgcacggtaagagcctagcatgtagaactggttgacggccttgtaggcgcagcagcccttctccacggggagggcgtaggcctgggcggccttgcgcagggaggtgtgcgtgagggcgaaagtgtccctgaccatgaccttgaggaactggtgcttgaagtcgatatcgtcgcagcccccctgctcccagagctggaagtccgtgcgcttcttgtaggcggggttgggcaaagcgaaagtaacatcgttgaagaggatcttgcccgcgcggggcataaagttgcgagtgatgcggaaaggttggggcacctcggcccggttgttgatgacctgggcggcgagcacgatctcgtcgaagccgttgatgttgtggcccacgatgtagagttccacgaatcgcggacggcccttgacgtggggcagtttcttgagctcctcgtaggtgagctcgtcggggtcgctgagcccgtgctgctcgagcgcccagtcggcgagatgggggttggcgcggaggaaggaagtccagagatccacggccagggcggtttgcagacggtcccggtactgacggaactgctgcccgacggccattttttcgggggtgacgcagtagaaggtgcgggggtccccgtgccagcgatcccatttgagctggagggcgagatcgagggcgagctcgacgagccggtcgtccccggagagtttcatgaccagcatgaaggggacgagctgcttgccgaaggaccccatccaggtgtaggtttccacatcgtaggtgaggaagagcctttcggtgcgaggatgcgagccgatggggaagaactggatctcctgccaccaattggaggaatggctgttgatgtgatggaagtagaaatgccgacggcgcgccgaacactcgtgcttgtgtttatacaagcggccacagtgctcgcaacgctgcacgggatgcacgtgctgcacgagctgtacctgagttcctttgacgaggaatttcagtgggaagtggagtcgtggcgcctgcatctcgtgctgtactacgtcgtggtggtcggcctggccctcttctgcctcgatggtggtcatgctgacgagcccgcgcgggaggcaggtccagacctcggcgcgagcgggtcggagagcgaggacgagggcgcgcaggccggagctgtccagggtcctgagacgctgcggagtcaggtcagtgggcagcggcggcgcgcggttgacttgcaggagtttttccagggcgcgcgggaggtccagatggtacttgatctccaccgcgccattggtggcgacgtcgatggcttgcagggtcccgtgcccctggggtgtgaccaccgtcccccgtttcttcttgggcggctggggcgacgggggcggtgcctcttccatggttagaagcggcggcgaggacgcgcgccgggcggcaggggcggctcggggcccggaggcaggggcggcaggggcacgtcggcgccgcgcgcgggtaggttctggtactgcgcccggagaagactggcgtgagcgacgacgcgacggttgacgtcctggatctgacgcctctgggtgaaggccacgggacccgtgagtttgaacctgaaagagagttcgacagaatcaatctcggtatcgttgacggcggcctgccgcaggatctcttgcacgtcgcccgagttgtcctggtaggcgatctcggtcatgaactgctcgatctcctcctcttgaaggtctccgcggccggcgcgctccacggtggccgcgaggtcgttggagatgcggcccatgagctgcgagaaggcgttcatgcccgcctcgttccagacgcggctgtagaccacgacgccctcgggatcgcgggcgcgcatgaccacctgggcgaggttgagctccacgtggcgcgtgaagaccgcgtagttgcagaggcgctggtagaggtagttgagcgtggtggcgatgtgctcggtgacgaagaaatacatgatccagcggcggagcggcatctcgctgacgtcgcccagcgcctccaaacgttccatggcctcgtaaaagtccacggcgaagttgaaaaactgggagttgcgcgccgagacggtcaactcctcctccagaagacggatgagctcggcgatggtggcgcgcacctcgcgctcgaaggcccccgggagttcctccacttcctcttcttcctcctccactaacatctcttctacttcctcctcaggcggcagtggtggcgggggagggggcctgcgtcgccggcggcgcacgggcagacggtcgatgaagcgctcgatggtctcgccgcgccggcgtcgcatggtctcggtgacggcgcgcccgtcctcgcggggccgcagcgtgaagacgccgccgcgcatctccaggtggccgggggggtccccgttgggcagggagagggcgctgacgatgcatcttatcaattgccccgtagggactccgcgcaaggacctgagcgtctcgagatccacgggatctgaaaaccgctgaacgaaggcttcgagccagtcgcagtcgcaaggtaggctgagcacggtttcttctggcgggtcatgttggttgggagcggggcgggcgatgctgctggtgatgaagttgaaataggcggttctgagacggcggatggtggcgaggagcaccaggtctttgggcccggcttgctggatgcgcagacggtcggccatgccccaggcgtggtcctgacacctggccaggtccttgtagtagtcctgcatgagccgctccacgggcacctcctcctcgcccgcgcggccgtgcatgcgcgtgagcccgaagccgcgctggggctggacgagcgccaggtcggcgacgacgcgctcggcgaggatggcttgctggatctgggtgagggtggtctggaagtcatcaaagtcgacgaagcggtggtaggctccggtgttgatggtgtaggagcagttggccatgacggaccagttgacggtctggtggcccggacgcacgagctcgtggtacttgaggcgcgagtaggcgcgcgtgtcgaagatgtagtcgttgcaggtgcgcaccaggtactggtagccgatgaggaagtgcggcggcggctggcggtagagcggccatcgctcggtggcgggggcgccgggcgcgaggtcctcgagcatggtgcggtggtagccgtagatgtacctggacatccaggtgatgccggcggcggtggtggaggcgcgcgggaactcgcggacgcggttccagatgttgcgcagcggcaggaagtagttcatggtgggcacggtctggcccgtgaggcgcgcgcagtcgtggatgctctatacgggcaaaaacgaaagcggtcagcggctcgactccgtggcctggaggctaagcgaacgggttgggctgcgcgtgtaccccggttcgaatctcgaatcaggctggagccgcagctaacgtggtattggcactcccgtctcgacccaagcctgcaccaaccctccaggatacggaggcgggtcgttttgcaacttttttttggaggccggatgagactagtaagcgcggaaagcggccgaccgcgatggctcgctgccgtagtctggagaagaatcgccagggttgcgttgcggtgtgccccggttcgaggccggccggattccgcggctaacgagggcgtggctgccccgtcgtttccaagaccccatagccagccgacttctccagttacggagcgagcccctcttttgttttgtttgtttttgccagatgcatcccgtactgcggcagatgcgcccccaccaccctccaccgcaacaacagccccctccacagccggcgcttctgcccccgccccagcagcaacttccagccacgaccgccgcggccgccgtgagcggggctggacagagttatgatcaccagctggccttggaagagggcgaggggctggcgcgcctgggggcgtcgtcgccggagcggcacccgcgcgtgcagatgaaaagggacgctcgcgaggcctacgtgcccaagcagaacctgttcagagacaggagcggcgaggagcccgaggagatgcgcgcggcccggttccacgcggggcgggagctgcggcgcggcctggaccgaaagagggtgctgagggacgaggatttcgaggcggacgagctgacggggatcagccccgcgcgcgcgcacgtggccgcggccaacctggtcacggcgtacgagcagaccgtgaaggaggagagcaacttccaaaaatccttcaacaaccacgtgcgcaccctgatcgcgcgcgaggaggtgaccctgggcctgatgcacctgtgggacctgctggaggccatcgtgcagaaccccaccagcaagccgctgacggcgcagctgttcctggtggtgcagcatagtcgggacaacgaagcgttcagggaggcgctgctgaatatcaccgagcccgagggccgctggctcctggacctggtgaacattctgcagagcatcgtggtgcaggagcgcgggctgccgctgtccgagaagctggcggccatcaacttctcggtgctgagtttgggcaagtactacgctaggaagatctacaagaccccgtacgtgcccatagacaaggaggtgaagatcgacgggttttacatgcgcatgaccctgaaagtgctgaccctgagcgacgatctgggggtgtaccgcaacgacaggatgcaccgtgcggtgagcgccagcaggcggcgcgagctgagcgaccaggagctgatgcatagtctgcagcgggccctgaccggggccgggaccgagggggagagctactttgacatgggcgcggacctgcactggcagcccagccgccgggccttggaggcggcggcaggaccctacgtagaagaggtggacgatgaggtggacgaggagggcgagtacctggaagactgatggcgcgaccgtatttttgctagatgcaacaacaacagccacctcctgatcccgcgatgcgggcggcgctgcagagccagccgtccggcattaactcctcggacgattggacccaggccatgcaacgcatcatggcgctgacgacccgcaaccccgaagcctttagacagcagccccaggccaaccggctctcggccatcctggaggccgtggtgccctcgcgctccaaccccacgcacgagaaggtcctggccatcgtgaacgcgctggtggagaacaaggccatccgcggcgacgaggccggcctggtgtacaacgcgctgctggagcgcgtggcccgctacaacagcaccaacgtgcagaccaacctggaccgcatggtgaccgacgtgcgcgaggccgtggcccagcgcgagcggttccaccgcgagtccaacctgggatccatggtggcgctgaacgccttcctcagcacccagcccgccaacgtgccccggggccaggaggactacaccaacttcatcagcgccctgcgcctgatggtgaccgaggtgccccagagcgaggtgtaccagtccgggccggactacttcttccagaccagtcgccagggcttgcagaccgtgaacctgagccaggctttcaagaacttgcagggcctgtggggcgtgcaggccccggtcggggaccgcgcgacggtgtcgagcctgctgacgccgaactcgcgcctgctgctgctgctggtggcccccttcacggacagcggcagcatcaaccgcaactcgtacctgggctacctgattaacctgtaccgcgaggccatcggccaggcgcacgtggacgagcagacctaccaggagatcacccacgtgagccgcgccctgggccaggacgacccgggcaacctggaagccaccctgaactttttgctgaccaaccggtcgcagaagatcccgccccagtacgcgctcagcaccgaggaggagcgcatcctgcgttacgtgcagcagagcgtgggcctgttcctgatgcaggagggggccacccccagcgccgcgctcgacatgaccgcgcgcaacatggagcccagcatgtacgccagcaaccgcccgttcatcaataaactgatggactacttgcatcgggcggccgccatgaactctgactatttcaccaacgccatcctgaatccccactggctcccgccgccggggttctacacgggcgagtacgacatgcccgaccccaatgacgggttcctgtgggacgatgtggacagcagcgtgttctccccccgaccgggtgctaacgagcgccccttgtggaagaaggaaggcagcgaccgacgcccgtcctcggcgctgtccggccgcgagggtgctgccgcggcggtgcccgaggccgccagtcctttcccgagcttgcccttctcgctgaacagtatccgcagcagcgagctgggcaggatcacgcgcccgcgcttgctgggcgaagaggagtacttgaatgactcgctgttgagacccgagcgggagaagaacttccccaataacgggatagaaagcctggtggacaagatgagccgctggaagacgtatgcgcaggagcacagggacgatccccgggcgtcgcagggggccacgagccggggcagcgccgcccgtaaacgccggtggcacgacaggcagcggggacagatgtgggacgatgaggactccgccgacgacagcagcgtgttggacttgggtgggagtggtaacccgttcgctcacctgcgcccccgtatcgggcgcatgatgtaagagaaaccgaaaataaatgatactcaccaaggccatggcgaccagcgtgcgttcgtttcttctctgttgttgttgtatctagtatgatgaggcgtgcgtacccggagggtcctcctccctcgtacgagagcgtgatgcagcaggcgatggcggcggcggcgatgcagcccccgctggaggctccttacgtgcccccgcggtacctggcgcctacggaggggcggaacagcattcgttactcggagctggcacccttgtacgataccacccggttgtacctggtggacaacaagtcggcggacatcgcctcgctgaactaccagaacgaccacagcaacttcctgaccaccgtggtgcagaacaatgacttcacccccacggaggccagcacccagaccatcaactttgacgagcgctcgcggtggggcggccagctgaaaaccatcatgcacaccaacatgcccaacgtgaacgagttcatgtacagcaacaagttcaaggcgcgggtgatggtctcccgcaagacccccaatggggtgacagtgacagaggattatgatggtagtcaggatgagctgaagtatgaatgggtggaatttgagctgcccgaaggcaacttctcggtgaccatgaccatcgacctgatgaacaacgccatcatcgacaattacttggcggtggggcggcagaacggggtgctggagagcgacatcggcgtgaagttcgacactaggaacttcaggctgggctgggaccccgtgaccgagctggtcatgcccggggtgtacaccaacgaggctttccatcccgatattgtcttgctgcccggctgcggggtggacttcaccgagagccgcctcagcaacctgctgggcattcgcaagaggcagcccttccaggaaggcttccagatcatgtacgaggatctggaggggggcaacatccccgcgctcctggatgtcgacgcctatgagaaaagcaaggaggatgcagcagctgaagcaactgcagccgtagctaccgcctctaccgaggtcaggggcgataattttgcaagcgccgcagcagtggcagcggccgaggcggctgaaaccgaaagtaagatagtcattcagccggtggagaaggatagcaagaacaggagctacaacgtactaccggacaagataaacaccgcctaccgcagctggtacctagcctacaactatggcgaccccgagaagggcgtgcgctcctggacgctgctcaccacctcggacgtcacctgcggcgtggagcaagtctactggtcgctgcccgacatgatgcaagacccggtcaccttccgctccacgcgtcaagttagcaactacccggtggtgggcgccgagctcctgcccgtctactccaagagcttcttcaacgagcaggccgtctactcgcagcagctgcgcgccttcacctcgcttacgcacgtcttcaaccgcttccccgagaaccagatcctcgtccgcccgcccgcgcccaccattaccaccgtcagtgaaaacgttcctgctctcacagatcacgggaccctgccgctgcgcagcagtatccggggagtccagcgcgtgaccgttactgacgccagacgccgcacctgcccctacgtctacaaggccctgggcatagtcgcgccgcgcgtcctctcgagccgcaccttctaaatgtccattctcatctcgcccagtaataacaccggttggggcctgcgcgcgcccagcaagatgtacggaggcgctcgccaacgctccacgcaacaccccgtgcgcgtgcgcgggcacttccgcgctccctggggcgccctcaagggccgcgtgcggtcgcgcaccaccgtcgacgacgtgatcgaccaggtggtggccgacgcgcgcaactacacccccgccgccgcgcccgtctccaccgtggacgccgtcatcgacagcgtggtggccgacgcgcgccggtacgcccgcgccaagagccggcggcggcgcatcgcccggcggcaccggagcacccccgccatgcgcgcggcgcgagccttgctgcgcagggccaggcgcacgggacgcagggccatgctcagggcggccagacgcgcggcttcaggcgccagcgccggcaggacccggagacgcgcggccacggcggcggcagcggccatcgccagcatgtcccgcccgcggcgagggaacgtgtactgggtgcgcgacgccgccaccggtgtgcgcgtgcccgtgcgcacccgcccccctcgcacttgaagatgttcacttcgcgatgttgatgtgtcccagcggcgaggaggatgtccaagcgcaaattcaaggaagagatgctccaggtcatcgcgcctgagatctacggccctgcggtggtgaaggaggaaagaaagccccgcaaaatcaagcgggtcaaaaaggacaaaaaggaagaagaaagtgatgtggacggattggtggagtttgtgcgcgagttcgccccccggcggcgcgtgcagtggcgcgggcggaaggtgcaaccggtgctgagacccggcaccaccgtggtcttcacgcccggcgagcgctccggcaccgcttccaagcgctcctacgacgaggtgtacggggatgatgatattctggagcaggcggccgagcgcctgggcgagtttgcttacggcaagcgcagccgttccgcaccgaaggaagaggcggtgtccatcccgctggaccacggcaaccccacgccgagcctcaagcccgtgaccttgcagcaggtgctgccgaccgcggcgccgcgccgggggttcaagcgcgagggcgaggatctgtaccccaccatgcagctgatggtgcccaagcgccagaagctggaagacgtgctggagaccatgaaggtggacccggacgtgcagcccgaggtcaaggtgcggcccatcaagcaggtggccccgggcctgggcgtgcagaccgtggacatcaagattcccacggagcccatggaaacgcagaccgagcccatgatcaagcccagcaccagcaccatggaggtgcagacggatccctggatgccatcggctcctagtcgaagaccccggcgcaagtacggcgcggccagcctgctgatgcccaactacgcgctgcatccttccatcatccccacgccgggctaccgcggcacgcgcttctaccgcggtcataccagcagccgccgccgcaagaccaccactcgccgccgccgtcgccgcaccgccgctgcaaccacccctgccgccctggtgcggagagtgtaccgccgcggccgcgcacctctgaccctgccgcgcgcgcgctaccacccgagcatcgccatttaaactttcgcctgctttgcagatcaatggccctcacatgccgccttcgcgttcccattacgggctaccgaggaagaaaaccgcgccgtagaaggctggcggggaacgggatgcgtcgccaccaccaccggcggcggcgcgccatcagcaagcggttggggggaggcttcctgcccgcgctgatccccatcatcgccgcggcgatcggggcgatccccggcattgcttccgtggcggtgcaggcctctcagcgccactgagacacacttggaaacatcttgtaataaaccaatggactctgacgctcctggtcctgtgatgtgttttcgtagacagatggaagacatcaatttttcgtccctggctccgcgacacggcacgcggccgttcatgggcacctggagcgacatcggcaccagccaactgaacgggggcgccttcaattggagcagtctctggagcgggcttaagaatttcgggtccacgcttaaaacctatggcagcaaggcgtggaacagcaccacagggcaggcgctgagggataagctgaaagagcagaacttccagcagaaggtggtcgatgggctcgcctcgggcatcaacggggtggtggacctggccaaccaggccgtgcagcggcagatcaacagccgcctggacccggtgccgcccgccggctccgtggagatgccgcaggtggaggaggagctgcctcccctggacaagcggggcgagaagcgaccccgccccgatgcggaggagacgctgctgacgcacacggacgagccgcccccgtacgaggaggcggtgaaactgggtctgcccaccacgcggcccatcgcgcccctggccaccggggtgctgaaacccgaaaagcccgcgaccctggacttgcctcctccccagccttcccgcccctctacagtggctaagcccctgccgccggtggccgtggcccgcgcgcgacccgggggcaccgcccgccctcatgcgaactggcagagcactctgaacagcatcgtgggtctgggagtgcagagtgtgaagcgccgccgctgctattaaacctaccgtagcgcttaacttgcttgtctgtgtgtgtatgtattatgtcgccgccgccgctgtccaccagaaggaggagtgaagaggcgcgtcgccgagttgcaagatggccaccccatcgatgctgccccagtgggcgtacatgcacatcgccggacaggacgcttcggagtacctgagtccgggtctggtgcagtttgcccgcgccacagacacctacttcagtctggggaacaagtttaggaaccccacggtggcgcccacgcacgatgtgaccaccgaccgcagccagcggctgacgctgcgcttcgtgcccgtggaccgcgaggacaacacctactcgtacaaagtgcgctacacgctggccgtgggcgacaaccgcgtgctggacatggccagcacctactttgacatccgcggcgtgctggatcggggccctagcttcaaaccctactccggcaccgcctacaacagtctggcccccaagggagcacccaacacttgtcagtggacatataaagccgatggtgaaactgccacagaaaaaacctatacatatggaaatgcacccgtgcagggcattaacatcacaaaagatggtattcaacttggaactgacaccgatgatcagccaatctacgcagataaaacctatcagcctgaacctcaagtgggtgatgctgaatggcatgacatcactggtactgatgaaaagtatggaggcagagctcttaagcctgataccaaaatgaagccttgttatggttcttttgccaagcctactaataaagaaggaggtcaggcaaatgtgaaaacaggaacaggcactactaaagaatatgacatagacatggctttctttgacaacagaagtgcggctgctgctggcctagctccagaaattgttttgtatactgaaaatgtggatttggaaactccagatacccatattgtatacaaagcaggcacagatgacagcagctcttctattaatttgggtcagcaagccatgcccaacagacctaactacattggtttcagagacaactttatcgggctcatgtactacaacagcactggcaatatgggggtgctggccggtcaggcttctcagctgaatgctgtggttgacttgcaagacagaaacaccgagctgtcctaccagctcttgcttgactctctgggtgacagaacccggtatttcagtatgtggaatcaggcggtggacagctatgatcctgatgtgcgcattattgaaaatcatggtgtggaggatgaacttcccaactattgtttccctctggatgctgttggcagaacagatacttatcagggaattaaggctaatggaactgatcaaaccacatggaccaaagatgacagtgtcaatgatgctaatgagataggcaagggtaatccattcgccatggaaatcaacatccaagccaacctgtggaggaacttcctctacgccaacgtggccctgtacctgcccgactcttacaagtacacgccggccaatgttaccctgcccaccaacaccaacacctacgattacatgaacggccgggtggtggcgccctcgctggtggactcctacatcaacatcggggcgcgctggtcgctggatcccatggacaacgtgaaccccttcaaccaccaccgcaatgcggggctgcgctaccgctccatgctcctgggcaacgggcgctacgtgcccttccacatccaggtgccccagaaatttttcgccatcaagagcctcctgctcctgcccgggtcctacacctacgagtggaacttccgcaaggacgtcaacatgatcctgcagagctccctcggcaacgacctgcgcacggacggggcctccatctccttcaccagcatcaacctctacgccaccttcttccccatggcgcacaacacggcctccacgctcgaggccatgctgcgcaacgacaccaacgaccagtccttcaacgactacctctcggcggccaacatgctctaccccatcccggccaacgccaccaacgtgcccatctccatcccctcgcgcaactgggccgccttccgcggctggtccttcacgcgtctcaagaccaaggagacgccctcgctgggctccgggttcgacccctacttcgtctactcgggctccatcccctacctcgacggcaccttctacctcaaccacaccttcaagaaggtctccatcaccttcgactcctccgtcagctggcccggcaacgaccggctcctgacgcccaacgagttcgaaatcaagcgcaccgtcgacggcgagggctacaacgtggcccagtgcaacatgaccaaggactggttcctggtccagatgctggcccactacaacatcggctaccagggcttctacgtgcccgagggctacaaggaccgcatgtactccttcttccgcaacttccagcccatgagccgccaggtggtggacgaggtcaactacaaggactaccaggccgtcaccctggcctaccagcacaacaactcgggcttcgtcggctacctcgcgcccaccatgcgccagggccagccctaccccgccaactacccctacccgctcatcggcaagagcgccgtcaccagcgtcacccagaaaaagttcctctgcgacagggtcatgtggcgcatccccttctccagcaacttcatgtccatgggcgcgctcaccgacctcggccagaacatgctctatgccaactccgcccacgcgctagacatgaatttcgaagtcgaccccatggatgagtccacccttctctatgttgtcttcgaagtcttcgacgtcgtccgagtgcaccagccccaccgcggcgtcatcgaggccgtctacctgcgcacccccttctcggccggtaacgccaccacctaagctcttgcttcttgcaagccatggccgcgggctccggcgagcaggagctcagggccatcatccgcgacctgggctgcgggccctacttcctgggcaccttcgataagcgcttcccgggattcatggccccgcacaagctggcctgcgccatcgtcaacacggccggccgcgagaccgggggcgagcactggctggccttcgcctggaacccgcgctcgaacacctgctacctcttcgaccccttcgggttctcggacgagcgcctcaagcagatctaccagttcgagtacgagggcctgctgcgccgcagcgccctggccaccgaggaccgctgcgtcaccctggaaaagtccacccagaccgtgcagggtccgcgctcggccgcctgcgggctcttctgctgcatgttcctgcacgccttcgtgcactggcccgaccgccccatggacaagaaccccaccatgaacttgctgacgggggtgcccaacggcatgctccagtcgccccaggtggaacccaccctgcgccgcaaccaggaggcgctctaccgcttcctcaactcccactccgcctactttcgctcccaccgcgcgcgcatcgagaaggccaccgccttcgaccgcatgaatcaagacatgtaaaccgtgtgtgtatgttaaatgtctttaataaacagcactttcatgttacacatgcatctgagatgatttatttagaaatcgaaagggttctgccgggtctcggcatggcccgcgggcagggacacgttgcggaactggtacttggccagccacttgaactcggggatcagcagtttgggcagcggggtgtcggggaaggagtcggtccacagcttccgcgtcagttgcagggcgcccagcaggtcgggcgcggagatcttgaaatcgcagttgggacccgcgttctgcgcgcgggagttgcggtacacggggttgcagcactggaacaccatcagggccgggtgcttcacgctcgccagcaccgtcgcgtcggtgatgctctccacgtcgaggtcctcggcgttggccatcccgaagggggtcatcttgcaggtctgccttcccatggtgggcacgcacccgggcttgtggttgcaatcgcagtgcagggggatcagcatcatctgggcctggtcggcgttcatccccgggtacatggccttcatgaaagcctccaattgcctgaacgcctgctgggccttggctccctcggtgaagaagaccccgcaggacttgctagagaactggttggtggcgcacccggcgtcgtgcacgcagcagcgcgcgtcgttgttggccagctgcaccacgctgcgcccccagcggttctgggtgatcttggcccggtcggggttctccttcagcgcgcgctgcccgttctcgctcgccacatccatctcgatcatgtgctccttctggatcatggtggtcccgtgcaggcaccgcagcttgccctcggcctcggtgcacccgtgcagccacagcgcgcacccggtgcactcccagttcttgtgggcgatctgggaatgcgcgtgcacgaagccctgcaggaagcggcccatcatggtggtcagggtcttgttgctagtgaaggtcagcggaatgccgcggtgctcctcgttgatgtacaggtggcagatgcggcggtacacctcgccctgctcgggcatcagctggaagttggctttcaggtcggtctccacgcggtagcggtccatcagcatagtcatgatttccatacccttctcccaggccgagacgatgggcaggctcatagggttcttcaccatcatcttagcgctagcagccgcggccagggggtcgctctcgtccagggtctcaaagctccgcttgccgtccttctcggtgatccgcaccggggggtagctgaagcccacggccgccagctcctcctcggcctgtctttcgtcctcgctgtcctggctgacgtcctgcaggaccacatgcttggtcttgcggggtttcttcttgggcggcagcggcggcggagatgttggagatggcgagggggagcgcgagttctcgctcaccactactatctcttcctcttcttggtccgaggccacgcggcggtaggtatgtctcttcgggggcagaggcggaggcgacgggctctcgccgccgcgacttggcggatggctggcagagccccttccgcgttcgggggtgcgctcccggcggcgctctgactgacttcctccgcggccggccattgtgttctcctagggaggaacaacaagcatggagactcagccatcgccaacctcgccatctgcccccaccgccgacgagaagcagcagcagcagaatgaaagcttaaccgccccgccgcccagccccgccacctccgacgcggccgtcccagacatgcaagagatggaggaatccatcgagattgacctgggctatgtgacgcccgcggagcacgaggaggagctggcagtgcgcttttcacaagaagagatacaccaagaacagccagagcaggaagcagagaatgagcagagtcaggctgggctcgagcatgacggcgactacctccacctgagcgggggggaggacgcgctcatcaagcatctggcccggcaggccaccatcgtcaaggatgcgctgctcgaccgcaccgaggtgcccctcagcgtggaggagctcagccgcgcctacgagttgaacctcttctcgccgcgcgtgccccccaagcgccagcccaatggcacctgcgagcccaacccgcgcctcaacttctacccggtcttcgcggtgcccgaggccctggccacctaccacatctttttcaagaaccaaaagatccccgtctcctgccgcgccaaccgcacccgcgccgacgcccttttcaacctgggtcccggcgcccgcctacctgatatcgcctccttggaagaggttcccaagatcttcgagggtctgggcagcgacgagactcgggccgcgaacgctctgcaaggagaaggaggagagcatgagcaccacagcgccctggtcgagttggaaggcgacaacgcgcggctggcggtgctcaaacgcacggtcgagctgacccatttcgcctacccggctctgaacctgccccccaaagtcatgagcgcggtcatggaccaggtgctcatcaagcgcgcgtcgcccatctccgaggacgagggcatgcaagactccgaggagggcaagcccgtggtcagcgacgagcagctggcccggtggctgggtcctaatgctagtccccagagtttggaagagcggcgcaaactcatgatggccgtggtcctggtgaccgtggagctggagtgcctgcgccgcttcttcgccgacgcggagaccctgcgcaaggtcgaggagaacctgcactacctcttcaggcacgggttcgtgcgccaggcctgcaagatctccaacgtggagctgaccaacctggtctcctacatgggcatcttgcacgagaaccgcctggggcagaacgtgctgcacaccaccctgcgcggggaggcccggcgcgactacatccgcgactgcgtctacctctacctctgccacacctggcagacgggcatgggcgtgtggcagcagtgtctggaggagcagaacctgaaagagctctgcaagctcctgcagaagaacctcaagggtctgtggaccgggttcgacgagcgcaccaccgcctcggacctggccgacctcattttccccgagcgcctcaggctgacgctgcgcaacggcctgcccgactttatgagccaaagcatgttgcaaaactttcgctctttcatcctcgaacgctccggaatcctgcccgccacctgctccgcgctgccctcggacttcgtgccgctgaccttccgcgagtgccccccgccgctgtggagccactgctacctgctgcgcctggccaactacctggcctaccactcggacgtgatcgaggacgtcagcggcgagggcctgctcgagtgccactgccgctgcaacctctgcacgccgcaccgctccctggcctgcaacccccagctgctgagcgagacccagatcatcggcaccttcgagttgcaagggcccagcgaaggcgagggttcagccgccaaggggggtctgaaactcaccccggggctgtggacctcggcctacttgcgcaagttcgtgcccgaggactaccatcccttcgagatcaggttctacgaggaccaatcccatccgcccaaggccgagctgtcggcctgcgtcatcacccagggggcgatcctggcccaattgcaagccatccagaaatcccgccaagaattcttgctgaaaaagggccgcggggtctacctcgacccccagaccggtgaggagctcaaccccggcttcccccaggatgccccgaggaaacaagaagctgaaagtggagctgccgcccgtggaggatttggaggaagactgggagaacagcagtcaggcagaggaggaggagatggaggaagactgggacagcactcaggcagaggaggacagcctgcaagacagtctggaggaagacgaggaggaggcagaggaggaggtggaagaagcagccgccgccagaccgtcgtcctcggcgggggagaaagcaagcagcacggataccatctccgctccgggtcggggtcccgctcgaccacacagtagatgggacgagaccggacgattcccgaaccccaccacccagaccggtaagaaggagcggcagggatacaagtcctggcgggggcacaaaaacgccatcgtctcctgcttgcaggcctgcgggggcaacatctccttcacccggcgctacctgctcttccaccgcggggtgaactttccccgcaacatcttgcattactaccgtcacctccacagcccctactacttccaagaagaggcagcagcagcagaaaaagaccagcagaaaaccagcagctagaaaatccacagcggcggcagcaggtggactgaggatcgcggcgaacgagccggcgcaaacccgggagctgaggaaccggatctttcccaccctctatgccatcttccagcagagtcgggggcaggagcaggaactgaaagtcaagaaccgttctctgcgctcgctcacccgcagttgtctgtatcacaagagcgaagaccaacttcagcgcactctcgaggacgccgaggctctcttcaacaagtactgcgcgctcactcttaaagagtagcccgcgcccgcccagtcgcagaaaaaggcgggaattacgtcacctgtgcccttcgccctagccgcctccacccatcatcatgagcaaagagattcccacgccttacatgtggagctaccagccccagatgggcctggccgccggtgccgcccaggactactccacccgcatgaattggctcagcgccgggcccgcgatgatctcacgggtgaatgacatccgcgcccaccgaaaccagatactcctagaacagtcagcgctcaccgccacgccccgcaatcacctcaatccgcgtaattggcccgccgccctggtgtaccaggaaattccccagcccacgaccgtactacttccgcgagacgcccaggccgaagtccagctgactaactcaggtgtccagctggcgggcggcgccaccctgtgtcgtcaccgccccgctcagggtataaagcggctggtgatccggggcagaggcacacagctcaacgacgaggtggtgagctcttcgctgggtctgcgacctgacggagtcttccaactcgccggatcggggagatcttccttcacgcctcgtcaggccgtcctgactttggagagttcgtcctcgcagccccgctcgggtggcatcggcactctccagttcgtggaggagttcactccctcggtctacttcaaccccttctccggctcccccggccactacccggacgagttcatcccgaacttcgacgccatcagcgagtcggtggacggctacgattgaatgtcccatggtggcgcagctgacctagctcggcttcgacacctggaccactgccgccgcttccgctgcttcgctcgggatctcgccgagtttgcctactttgagctgcccgaggagcaccctcagggcccggcccacggagtgcggatcgtcgtcgaagggggcctcgactcccacctgcttcggatcttcagccagcgtccgatcctggtcgagcgcgagcaaggacagacccttctgactctgtactgcatctgcaaccaccccggcctgcatgaaagtctttgttgtctgctgtgtactgagtataataaaagctgagatcagcgactactccggacttccgtgtgttcctgaatccatcaaccagtctttgttcttcaccgggaacgagaccgagctccagctccagtgtaagccccacaagaagtacctcacctggctgttccagggctccccgatcgccgttgtcaaccactgcgacaacgacggagtcctgctgagcggccctgccaaccttactttttccacccgcagaagcaagctccagctcttccaacccttcctccccgggacctatcagtgcgtctcgggaccctgccatcacaccttccacctgatcccgaataccacagcgtcgctccccgctactaacaaccaaactaacctccaccaacgccaccgtcgcgacggccacaatacatgcccatattagactatgaggccgagccacagcgacccatgctccccgctattagttacttcaatctaaccggcggagatgactgacccactggccaacaacaacgtcaacgaccttctcctggacatggacggccgcgcctcggagcagcgactcgcccaacttcgcattcgccagcagcaggagagagccgtcaaggagctgcaggatgcggtggccatccaccagtgcaagagaggcatcttctgcctggtgaaacaggccaagatctcctacgaggtcactccaaacgaccatcgcctctcctacgagctcctgcagcagcgccagaagttcacctgcctggtcggagtcaaccccatcgtcatcacccagcagtctggcgataccaaggggtgcatccactgctcctgcgactcccccgactgcgtccacactctgatcaagaccctctgcggcctccgcgacctcctccccatgaactaatcacccccttatccagtgaaataaagatcatattgatgatgattttacagaaataaaaaataatcatttgatttgaaataaagatacaatcatattgatgatttgagtttaacaaaaaaataaagaatcacttacttgaaatctgataccaggtctctgtccatgttttctgccaacaccacttcactcccctcttcccagctctggtactgcaggccccggcgggctgcaaacttcctccacacgctgaaggggatgtcaaattcctcctgtccctcaatcttcattttatcttctatcagatgtccaaaaagcgcgtccgggtggatgatgacttcgaccccgtctacccctacgatgcagacaacgcaccgaccgtgcccttcatcaacccccccttcgtctcttcagatggattccaagagaagcccctgggggtgttgtccctgcgactggccgaccccgtcaccaccaagaacggggaaatcaccctcaagctgggagagggggtggacctcgattcctcgggaaaactcatctccaacacggccaccaaggccgccgcccctctcagtttttccaacaacaccatttcccttaacatggatcaccccttttacactaaagatggaaaattatccttacaagtttctccaccattaaatatactgagaacaagcattctaaacacactagctttaggttttggatcaggtttaggactccgtggctctgccttggcagtacagttagtctctccacttacatttgatactgatggaaacataaagcttaccttagacagaggtttgcatgttacaacaggagatgcaattgaaagcaacataagctgggctaaaggtttaaaatttgaagatggagccatagcaaccaacattggaaatgggttagagtttggaagcagtagtacagaaacaggtgttgatgatgcttacccaatccaagttaaacttggatctggccttagctttgacagtacaggagccataatggctggtaacaaagaagacgataaactcactttgtggacaacacctgatccatcaccaaactgtcaaatactcgcagaaaatgatgcaaaactaacactttgcttgactaaatgtggtagtcaaatactggccactgtgtcagtcttagttgtaggaagtggaaacctaaaccccattactggcaccgtaagcagtgctcaggtgtttctacgttttgatgcaaacggtgttcttttaacagaacattctacactaaaaaaatactgggggtataggcagggagatagcatagatggcactccatataccaatgctgtaggattcatgcccaatttaaaagcttatccaaagtcacaaagttctactactaaaaataatatagtagggcaagtatacatgaatggagatgtttcaaaacctatgcttctcactataaccctcaatggtactgatgacagcaacagtacatattcaatgtcattttcatacacctggactaatggaagctatgttggagcaacatttggggctaactcttataccttctcatacatcgcccaagaatgaacactgtatcccaccctgcatgccaacccttcccaccccactctgtggaacaaactctgaaacacaaaataaaataaagttcaagtgttttattgattcaacagttttacaggattcgagcagttatttttcctccaccctcccaggacatggaatacaccaccctctccccccgcacagccttgaacatctgaatgccattggtgatggacatgcttttggtctccacgttccacacagtttcagagcgagccagtctcgggtcggtcagggagatgaaaccctccgggcactcccgcatctgcacctcacagctcaacagctgaggattgtcctcggtggtcgggatcacggttatctggaagaagcagaagagcggcggtgggaatcatagtccgcgaacgggatcggccggtggtgtcgcatcaggccccgcagcagtcgctgccgccgccgctccgtcaagctgctgctcagggggtccgggtccagggactccctcagcatgatgcccacggccctcagcatcagtcgtctggtgcggcgggcgcagcagcgcatgcggatctcgctcaggtcgctgcagtacgtgcaacacagaaccaccaggttgttcaacagtccatagttcaacacgctccagccgaaactcatcgcgggaaggatgctacccacgtggccgtcgtaccagatcctcaggtaaatcaagtggtgccccctccagaacacgctgcccacgtacatgatctccttgggcatgtggcggttcaccacctcccggtaccacatcaccctctggttgaacatgcagccccggatgatcctgcggaaccacagggccagcaccgccccgcccgccatgcagcgaagagaccccgggtcccggcaatggcaatggaggacccaccgctcgtacccgtggatcatctgggagctgaacaagtctatgttggcacagcacaggcatatgctcatgcatctcttcagcactctcaactcctcgggggtcaaaaccatatcccagggcacggggaactcttgcaggacagcgaaccccgcagaacagggcaatcctcgcacagaacttacattgtgcatggacagggtatcgcaatcaggcagcaccgggtgatcctccaccagagaagcgcgggtctcggtctcctcacagcgtggtaagggggccggccgatacgggtgatggcgggacgcggctgatcgtgttcgcgaccgtgtcatgatgcagttgctttcggacattttcgtacttgctgtagcagaacctggtccgggcgctgcacaccgatcgccggcggcggtctcggcgcttggaacgctcggtgttgaaattgtaaaacagccactctctcagaccgtgcagcagatctagggcctcaggagtgatgaagatcccatcatgcctgatggctctgatcacatcgaccaccgtggaatgggccagacccagccagatgatgcaattttgttgggtttcggtgacggcgggggagggaagaacaggaagaaccatgattaacttttaatccaaacggtctcggagtacttcaaaatgaagatcgcggagatggcacctctcgcccccgctgtgttggtggaaaataacagccaggtcaaaggtgatacggttctcgagatgttccacggtggcttccagcaaagcctccacgcgcacatccagaaacaagacaatagcgaaagcgggagggttctctaattcctcaatcatcatgttacactcctgcaccatccccagataattttcatttttccagccttgaatgattcgaactagttcgtgaggtaaatccaagccagccatgataaagagctcgcgcagagcgccctccaccggcattcttaagcacaccctcataattccaagatattctgctcctggttcacctgcagcagattgacaagcggaatatcaaaatctctgccgcgatccctgagctcctccctcagcaataactgtaagtactctttcatatcctctccgaaatttttagccataggaccaccaggaataagattagggcaagccacagtacagataaaccgaagtcctccccagtgagcattgccaaatgcaagactgctataagcatgctggctagacccggtgatatcttccagataactggacagaaaatcgcccaggcaatttttaagaaaatcaacaaaagaaaaatcctccaggtggacgtttagagcctcgggaacaacgatgaagtaaatgcaagcggtgcgttccagcatggttagttagctgatctgtagaaaaaacaaaaatgaacattaaaccatgctagcctggcgaacaggtgggtaaatcgttctctccagcaccaggcaggccacggggtctccggcgcgaccctcgtaaaaattgtcgctatgattgaaaaccatcacagagagacgttcccggtggccggcgtgaatgattcgacaagatgaatacacccccggaacattggcgtccgcgagtgaaaaaaagcgcccgaggaagcaataaggcactacaatgctcagtctcaagtccagcaaagcgatgccatgcggatgaagcacaaaattctcaggtgcgtacaaaatgtaattactcccctcctgcacaggcagcaaagcccccgatccctccaggtacacatacaaagcctcagcgtccatagcttaccgagcagcagcacacaacaggcgcaagagtcagagaaaggctgagctctaacctgtccacccgctctctgctcaatatatagcccagatctacactgacgtaaaggccaaagtctaaaaatacccgccaaataatcacacacgcccagcacacgcccagaaaccggtgacacactcaaaaaaatacgcgcacttcctcaaacgcccaaaactgccgtcatttccgggttcccacgctacgtcatcaaaacacgactttcaaattccgtcgaccgttaaaaacgtcacccgccccgcccctaacggtcgcccgtctctcagccaatcagcgccccgcatccccaaattcaaacacctcatttgcatattaacgcgcacaaaaagtttgaggtatattattgatgatgg

SEQ ID NO: 13 - DNA, 30684 bp, synthetic construct
  misc_feature 1..30684: note = Description of Artificial Sequence: Synthetic polynucleotide
  source 1..30684: mol_type = other DNA
ccatcttcaataatatacctcaaactttttgtgcgcgttaatatgcaaatgaggcgtttgaatttggggaggaagggcggtgattggtcgagggatgagcgaccgttaggggcggggcgagtgacgttttgatgacgtggttgcgaggaggagccagtttgcaagttctcgtgggaaaagtgacgtcaaacgaggtgtggtttgaacacggaaatactcaattttcccgcgctctctgacaggaaatgaggtgtttctgggcggatgcaagtgaaaacgggccattttcgcgcgaaaactgaatgaggaagtgaaaatctgagtaatttcgcgtttatggcagggaggagtatttgccgagggccgagtagactttgaccgattacgtgggggtttcgattaccgtgtttttcacctaaatttccgcgtacggtgtcaaagtccggtgtttttacgtaggtgtcagctgatcgccagggtatttaaacctgcgctctccagtcaagaggccactcttgagtgccagcgagaagagttttctcctccgcgccgcgagtcagatctacactttgaaagtagggataacagggtaatgacattgattattgactagttgttaatagtaatcaattacggggtcattagttcatagcccatatatggagttccgcgttacataacttacggtaaatggcccgcctggctgaccgcccaacgacccccgcccattgacgtcaataatgacgtatgttcccatagtaacgccaatagggactttccattgacgtcaatgggtggagtatttacggtaaactgcccacttggcagtacatcaagtgtatcatatgccaagtccgccccctattgacgtcaatgacggtaaatggcccgcctggcattatgcccagtacatgaccttacgggactttcctacttggcagtacatctacgtattagtcatcgctattaccatggtgatgcggttttggcagtacaccaatgggcgtggatagcggtttgactcacggggatttccaagtctccaccccattgacgtcaatgggagtttgttttggcaccaaaatcaacgggactttccaaaatgtcgtaataaccccgccccgttgacgcaaatgggcggtaggcgtgtacggtgggaggtctatataagcagagctcgtttagtgaaccgtcagatcgcctggaacgccatccacgctgttttgacctccatagaagacagcgatcgcgccaccatggtgagcaagggcgaggagctgttcaccggggtggtgcccatcctggtcgagctggacggcgacgtaaacggccacaagttcagcgtgtccggcgagggcgagggcgatgccacctacggcaagctgaccctgaagttcatctgcaccaccggcaagctgcccgtgccctggcccaccctcgtgaccaccctgacctacggcgtgcagtgcttcagccgctaccccgaccacatgaagcagcacgacttcttcaagtccgccatgcccgaaggctacgtccaggagcgcaccatcttcttcaaggacgacggcaactacaagacccgcgccgaggtgaagttcgagggcgacaccctggtgaaccgcatcgagctgaagggcatcgacttcaaggaggacggcaacatcctggggcacaagctggagtacaactacaacagccacaacgtctatatcatggccgacaagcagaagaacggcatcaaggtgaacttcaagatccgccacaacatcgaggacggcagcgtgcagctcgccgaccactaccagcagaacacccccatcggcgacggccccgtgctgctgcccgacaaccactacctgagcacccagtccgccctgagcaaagaccccaacgagaagcgcgatcacatggtcctgctggagttcgtgaccgccgccgggatcactctcggcatggacgagctttacaagtagtgagtttaaactcccatttaaatgtgagggttaatgcttcgagcagacatgataagatacattgatgagtttggacaaaccacaactagaatgcagtgaaaaaaatgctttatttgtgaaatttgtgatgctattgctttatttgtaaccattataagctgcaataaacaagttaacaacaacaattgcattcattttatgtttcaggttcagggggagatgtgggaggttttttaaagcaagtaaaacctctacaaatgtggtaaaataactataacggtcctaaggtagcgagtgagtagtgttctggggcgggggaggacctgcatgagggccagaataactgaaatctgtgcttttctgtgtgttgcagcagcatgagcggaagcggctcctttgagggaggggtattcagcccttatctgacggggcgtctcccctcctgggcgggagtgcgtcagaatgtgatgggatccacggtggacggccggcccgtgcagcccgcgaactcttcaaccctgacctatgcaaccctgagctcttcgtcgttggacgcagctgccgccgcagctgctgcatctgccgccagcgccgtgcgcggaatggccatgggcgccggctactacggcactctggtggccaactcgagttccaccaataatcccgccagcctgaacgaggagaagctgttgctgctgatggcccagctcgaggccttgacccagcgcctgggcgagctgacccagcaggtggctcagctgcaggagcagacgcgggccgcggttgccacggtgaaatccaaataaaaaatgaatcaataaataaacggagacggttgttgattttaacacagagtctgaatctttatttgatttttcgcgcgcggtaggccctggaccaccggtctcgatcattgagcacccggtggatcttttccaggacccggtagaggtgggcttggatgttgaggtacatgggcatgagcccgtcccgggggtggaggtagctccattgcagggcctcgtgctcgggggtggtgttgtaaatcacccagtcatagcaggggcgcagggcatggtgttgcacaatatctttgaggaggagactgatggccacgggcagccctttggtgtaggtgtttacaaatctgttgagctgggagggatgcatgcggggggagatgaggtgcatcttggcctggatcttgagattggcgatgttaccgcccagatcccgcctggggttcatgttgtgcaggaccaccagcacggtgtatccggtgcacttggggaatttatcatgcaacttggaagggaaggcgtgaaagaatttggcgacgcctttgtgcccgcccaggttttccatgcactcatccatgatgatggcgatgggcccgtgggcggcggcctgggcaaagacgtttcgggggtcggacacatcatagttgtggtcctgggtgaggtcatcataggccattttaatgaatttggggcggagggtgccggactgggggacaaaggtaccctcgatcccgggggcgtagttcccctcacagatctgcatctcccaggctttgagctcggagggggggatcatgtccacctgcggggcgataaagaacacggtttccggggcgggggagatgagctgggccgaaagcaagttccggagcagctgggacttgccgcagccggtggggccgtagatgaccccgatgaccggctgcaggtggtagttgagggagagacagctgccgtcctcccggaggaggggggccacctcgttcatcatctcgcgcacgtgcatgttctcgcgcaccagttccgccaggaggcgctctccccccagggataggagctcctggagcgaggcgaagtttttcagcggcttgagtccgtcggccatgggcattttggagagggtttgttgcaagagttccaggcggtcccagagctcggtgatgtgctctacggcatctcgatccagcagacctcctcgtttcgcgggttgggacggctgcgggagtagggcaccagacgatgggcgtccagcgcagccagggtccggtccttccagggtcgcagcgtccgcgtcagggtggtctccgtcacggtgaaggggtgcgcgccgggctgggcgcttgcgagggtgcgcttcaggctcatccggctggtcgaaaaccgctcccgatcggcgccctgcgcgtcggccaggtagcaattgaccatgagttcgtagttgagcgcctcggccgcgtggcctttggcgcggagcttacctttggaagtctgcccgcaggcgggacagaggagggacttgagggcgtagagcttgggggcgaggaagacggactcgggggcgtaggcgtccgcgccgcagtgggcgcagacggtctcgcactccacgagccaggtgaggtcgggctggtcggggtcaaaaaccagtttcccgccgttctttttgatgcgtttcttacctttggtctccatgagctcgtgtccccgctgggtgacaaagaggctgtccgtgtccccgtagaccgactttatgggccggtcctcgagcggtgtgccgcggtcctcctcgtagaggaaccccgcccactccgagacgaaagcccgggtccaggccagcacgaaggaggccacgtgggacgggtagcggtcgttgtccaccagcgggtccaccttttccagggtatgcaaacacatgtccccctcgtccacatccaggaaggtgattggcttgtaagtgtaggccacgtgaccgggggtcccggccgggggggtataaaagggtgcgggtccctgctcgtcctcactgtcttccggatcgctgtccaggagcgccagctgttggggtaggtattccctctcgaaggcgggcatgacctcggcactcaggttgtcagtttctagaaacgaggaggatttgatattgacggtgccggcggagatgcctttcaagagcccctcgtccatctggtcagaaaagacgatctttttgttgtcgagcttggtggcgaaggagccgtagagggcgttggagaggagcttggcgatggagcgcatggtctggtttttttccttgtcggcgcgctccttggcggcgatgttgagctgcacgtactcgcgcgccacgcacttccattcggggaagacggtggtcagctcgtcgggcacgattctgacctgccagccccgattatgcagggtgatgaggtccacactggtggccacctcgccgcgcaggggctcattagtccagcagaggcgtccgcccttgcgcgagcagaaggggggcagggggtccagcatgacctcgtcgggggggtcggcatcgatggtgaagatgccgggcaggaggtcggggtcaaagtagctgatggaagtggccagatcgtccagggcagcttgccattcgcgcacggccagcgcgcgctcgtagggactgaggggcgtgccccagggcatgggatgggtaagcgcggaggcgtacatgccgcagatgtcgtagacgtagaggggctcctcgaggatgccgatgtaggtggggtagcagcgccccccgcggatgctggcgcgcacgtagtcatacagctcgtgcgagggggcgaggagccccgggcccaggttggtgcgactgggcttttcggcgcggtagacgatctggcggaaaatggcatgcgagttggaggagatggtgggcctttggaagatgttgaagtgggcgtggggcagtccgaccgagtcgcggatgaagtgggcgtaggagtcttgcagcttggcgacgagctcggcggtgactaggacgtccagagcgcagtagtcgagggtctcctggatgatgtcatacttgagctgtcccttttgtttccacagctcgcggttgagaaggaactcttcgcggtccttccagtactcttcgagggggaacccgtcctgatctgcacggtaagagcctagcatgtagaactggttgacggccttgtaggcgcagcagcccttctccacggggagggcgtaggcctgggcggccttgcgcagggaggtgtgcgtgagggcgaaagtgtccctgaccatgaccttgaggaactggtgcttgaagtcgatatcgtcgcagcccccctgctcccagagctggaagtccgtgcgcttcttgtaggcggggttgggcaaagcgaaagtaacatcgttgaagaggatcttgcccgcgcggggcataaagttgcgagtgatgcggaaaggttggggcacctcggcccggttgttgatgacctgggcggcgagcacgatctcgtcgaagccgttgatgttgtggcccacgatgtagagttccacgaatcgcggacggcccttgacgtggggcagtttcttgagctcctcgtaggtgagctcgtcggggtcgctgagcccgtgctgctcgagcgcccagtcggcgagatgggggttggcgcggaggaaggaagtccagagatccacggccagggcggtttgcagacggtcccggtactgacggaactgctgcccgacggccattttttcgggggtgacgcagtagaaggtgcgggggtccccgtgccagcgatcccatttgagctggagggcgagatcgagggcgagctcgacgagccggtcgtccccggagagtttcatgaccagcatgaaggggacgagctgcttgccgaaggaccccatccaggtgtaggtttccacatcgtaggtgaggaagagcctttcggtgcgaggatgcgagccgatggggaagaactggatctcctgccaccaattggaggaatggctgttgatgtgatggaagtagaaatgccgacggcgcgccgaacactcgtgcttgtgtttatacaagcggccacagtgctcgcaacgctgcacgggatgcacgtgctgcacgagctgtacctgagttcctttgacgaggaatttcagtgggaagtggagtcgtggcgcctgcatctcgtgctgtactacgtcgtggtggtcggcctggccctcttctgcctcgatggtggtcatgctgacgagcccgcgcgggaggcaggtccagacctcggcgcgagcgggtcggagagcgaggacgagggcgcgcaggccggagctgtccagggtcctgagacgctgcggagtcaggtcagtgggcagcggcggcgcgcggttgacttgcaggagtttttccagggcgcgcgggaggtccagatggtacttgatctccaccgcgccattggtggcgacgtcgatggcttgcagggtcccgtgcccctggggtgtgaccaccgtcccccgtttcttcttgggcggctggggcgacgggggcggtgcctcttccatggttagaagcggcggcgaggacgcgcgccgggcggcaggggcggctcggggcccggaggcaggggcggcaggggcacgtcggcgccgcgcgcgggtaggttctggtactgcgcccggagaagactggcgtgagcgacgacgcgacggttgacgtcctggatctgacgcctctgggtgaaggccacgggacccgtgagtttgaacctgaaagagagttcgacagaatcaatctcggtatcgttgacggcggcctgccgcaggatctcttgcacgtcgcccgagttgtcctggtaggcgatctcggtcatgaactgctcgatctcctcctcttgaaggtctccgcggccggcgcgctccacggtggccgcgaggtcgttggagatgcggcccatgagctgcgagaaggcgttcatgcccgcctcgttccagacgcggctgtagaccacgacgccctcgggatcgcgggcgcgcatgaccacctgggcgaggttgagctccacgtggcgcgtgaagaccgcgtagttgcagaggcgctggtagaggtagttgagcgtggtggcgatgtgctcggtgacgaagaaatacatgatccagcggcggagcggcatctcgctgacgtcgcccagcgcctccaaacgttccatggcctcgtaaaagtccacggcgaagttgaaaaactgggagttgcgcgccgagacggtcaactcctcctccagaagacggatgagctcggcgatggtggcgcgcacctcgcgctcgaaggcccccgggagttcctccacttcctcttcttcctcctccactaacatctcttctacttcctcctcaggcggcagtggtggcgggggagggggcctgcgtcgccggcggcgcacgggcagacggtcgatgaagcgctcgatggtctcgccgcgccggcgtcgcatggtctcggtgacggcgcgcccgtcctcgcggggccgcagcgtgaagacgccgccgcgcatctccaggtggccgggggggtccccgttgggcagggagagggcgctgacgatgcatcttatcaattgccccgtagggactccgcgcaaggacctgagcgtctcgagatccacgggatctgaaaaccgctgaacgaaggcttcgagccagtcgcagtcgcaaggtaggctgagcacggtttcttctggcgggtcatgttggttgggagcggggcgggcgatgctgctggtgatgaagttgaaataggcggttctgagacggcggatggtggcgaggagcaccaggtctttgggcccggcttgctggatgcgcagacggtcggccatgccccaggcgtggtcctgacacctggccaggtccttgtagtagtcctgcatgagccgctccacgggcacctcctcctcgcccgcgcggccgtgcatgcgcgtgagcccgaagccgcgctggggctggacgagcgccaggtcggcgacgacgcgctcggcgaggatggcttgctggatctgggtgagggtggtctggaagtcatcaaagtcgacgaagcggtggtaggctccggtgttgatggtgtaggagcagttggccatgacggaccagttgacggtctggtggcccggacgcacgagctcgtggtacttgaggcgcgagtaggcgcgcgtgtcgaagatgtagtcgttgcaggtgcgcaccaggtactggtagccgatgaggaagtgcggcggcggctggcggtagagcggccatcgctcggtggcgggggcgccgggcgcgaggtcctcgagcatggtgcggtggtagccgtagatgtacctggacatccaggtgatgccggcggcggtggtggaggcgcgcgggaactcgcggacgcggttccagatgttgcgcagcggcaggaagtagttcatggtgggcacggtctggcccgtgaggcgcgcgcagtcgtggatgctctatacgggcaaaaacgaaagcggtcagcggctcgactccgtggcctggaggctaagcgaacgggttgggctgcgcgtgtaccccggttcgaatctcgaatcaggctggagccgcagctaacgtggtattggcactcccgtctcgacccaagcctgcaccaaccctccaggatacggaggcgggtcgttttgcaacttttttttggaggccggatgagactagtaagcgcggaaagcggccgaccgcgatggctcgctgccgtagtctggagaagaatcgccagggttgcgttgcggtgtgccccggttcgaggccggccggattccgcggctaacgagggcgtggctgccccgtcgtttccaagaccccatagccagccgacttctccagttacggagcgagcccctcttttgttttgtttgtttttgccagatgcatcccgtactgcggcagatgcgcccccaccaccctccaccgcaacaacagccccctccacagccggcgcttctgcccccgccccagcagcaacttccagccacgaccgccgcggccgccgtgagcggggctggacagagttatgatcaccagctggccttggaagagggcgaggggctggcgcgcctgggggcgtcgtcgccggagcggcacccgcgcgtgcagatgaaaagggacgctcgcgaggcctacgtgcccaagcagaacctgttcagagacaggagcggcgaggagcccgaggagatgcgcgcggcccggttccacgcggggcgggagctgcggcgcggcctggaccgaaagagggtgctgagggacgaggatttcgaggcggacgagctgacggggatcagccccgcgcgcgcgcacgtggccgcggccaacctggtcacggcgtacgagcagaccgtgaaggaggagagcaacttccaaaaatccttcaacaaccacgtgcgcaccctgatcgcgcgcgaggaggtgaccctgggcctgatgcacctgtgggacctgctggaggccatcgtgcagaaccccaccagcaagccgctgacggcgcagctgttcctggtggtgcagcatagtcgggacaacgaagcgttcagggaggcgctgctgaatatcaccgagcccgagggccgctggctcctggacctggtgaacattctgcagagcatcgtggtgcaggagcgcgggctgccgctgtccgagaagctggcggccatcaacttctcggtgctgagtttgggcaagtactacgctaggaagatctacaagaccccgtacgtgcccatagacaaggaggtgaagatcgacgggttttacatgcgcatgaccctgaaagtgctgaccctgagcgacgatctgggggtgtaccgcaacgacaggatgcaccgtgcggtgagcgccagcaggcggcgcgagctgagcgaccaggagctgatgcatagtctgcagcgggccctgaccggggccgggaccgagggggagagctactttgacatgggcgcggacctgcactggcagcccagccgccgggccttggaggcggcggcaggaccctacgtagaagaggtggacgatgaggtggacgaggagggcgagtacctggaagactgatggcgcgaccgtatttttgctagatgcaacaacaacagccacctcctgatcccgcgatgcgggcggcgctgcagagccagccgtccggcattaactcctcggacgattggacccaggccatgcaacgcatcatggcgctgacgacccgcaaccccgaagcctttagacagcagccccaggccaaccggctctcggccatcctggaggccgtggtgccctcgcgctccaaccccacgcacgagaaggtcctggccatcgtgaacgcgctggtggagaacaaggccatccgcggcgacgaggccggcctggtgtacaacgcgctgctggagcgcgtggcccgctacaacagcaccaacgtgcagaccaacctggaccgcatggtgaccgacgtgcgcgaggccgtggcccagcgcgagcggttccaccgcgagtccaacctgggatccatggtggcgctgaacgccttcctcagcacccagcccgccaacgtgccccggggccaggaggactacaccaacttcatcagcgccctgcgcctgatggtgaccgaggtgccccagagcgaggtgtaccagtccgggccggactacttcttccagaccagtcgccagggcttgcagaccgtgaacctgagccaggctttcaagaacttgcagggcctgtggggcgtgcaggccccggtcggggaccgcgcgacggtgtcgagcctgctgacgccgaactcgcgcctgctgctgctgctggtggcccccttcacggacagcggcagcatcaaccgcaactcgtacctgggctacctgattaacctgtaccgcgaggccatcggccaggcgcacgtggacgagcagacctaccaggagatcacccacgtgagccgcgccctgggccaggacgacccgggcaacctggaagccaccctgaactttttgctgaccaaccggtcgcagaagatcccgccccagtacgcgctcagcaccgaggaggagcgcatcctgcgttacgtgcagcagagcgtgggcctgttcctgatgcaggagggggccacccccagcgccgcgctcgacatgaccgcgcgcaacatggagcccagcatgtacgccagcaaccgcccgttcatcaataaactgatggactacttgcatcgggcggccgccatgaactctgactatttcaccaacgccatcctgaatccccactggctcccgccgccggggttctacacgggcgagtacgacatgcccgaccccaatgacgggttcctgtgggacgatgtggacagcagcgtgttctccccccgaccgggtgctaacgagcgccccttgtggaagaaggaaggcagcgaccgacgcccgtcctcggcgctgtccggccgcgagggtgctgccgcggcggtgcccgaggccgccagtcctttcccgagcttgcccttctcgctgaacagtatccgcagcagcgagctgggcaggatcacgcgcccgcgcttgctgggcgaagaggagtacttgaatgactcgctgttgagacccgagcgggagaagaacttccccaataacgggatagaaagcctggtggacaagatgagccgctggaagacgtatgcgcaggagcacagggacgatccccgggcgtcgcagggggccacgagccggggcagcgccgcccgtaaacgccggtggcacgacaggcagcggggacagatgtgggacgatgaggactccgccgacgacagcagcgtgttggacttgggtgggagtggtaacccgttcgctcacctgcgcccccgtatcgggcgcatgatgtaagagaaaccgaaaataaatgatactcaccaaggccatggcgaccagcgtgcgttcgtttcttctctgttgttgttgtatctagtatgatgaggcgtgcgtacccggagggtcctcctccctcgtacgagagcgtgatgcagcaggcgatggcggcggcggcgatgcagcccccgctggaggctccttacgtgcccccgcggtacctggcgcctacggaggggcggaacagcattcgttactcggagctggcacccttgtacgataccacccggttgtacctggtggacaacaagtcggcggacatcgcctcgctgaactaccagaacgaccacagcaacttcctgaccaccgtggtgcagaacaatgacttcacccccacggaggccagcacccagaccatcaactttgacgagcgctcgcggtggggcggccagctgaaaaccatcatgcacaccaacatgcccaacgtgaacgagttcatgtacagcaacaagttcaaggcgcgggtgatggtctcccgcaagacccccaatggggtgacagtgacagaggattatgatggtagtcaggatgagctgaagtatgaatgggtggaatttgagctgcccgaaggcaacttctcggtgaccatgaccatcgacctgatgaacaacgccatcatcgacaattacttggcggtggggcggcagaacggggtgctggagagcgacatcggcgtgaagttcgacactaggaacttcaggctgggctgggaccccgtgaccgagctggtcatgcccggggtgtacaccaacgaggctttccatcccgatattgtcttgctgcccggctgcggggtggacttcaccgagagccgcctcagcaacctgctgggcattcgcaagaggcagcccttccaggaaggcttccagatcatgtacgaggatctggaggggggcaacatccccgcgctcctggatgtcgacgcctatgagaaaagcaaggaggatgcagcagctgaagcaactgcagccgtagctaccgcctctaccgaggtcaggggcgataattttgcaagcgccgcagcagtggcagcggccgaggcggctgaaaccgaaagtaagatagtcattcagccggtggagaaggatagcaagaacaggagctacaacgtactaccggacaagataaacaccgcctaccgcagctggtacctagcctacaactatggcgaccccgagaagggcgtgcgctcctggacgctgctcaccacctcggacgtcacctgcggcgtggagcaagtctactggtcgctgcccgacatgatgcaagacccggtcaccttccgctccacgcgtcaagttagcaactacccggtggtgggcgccgagctcctgcccgtctactccaagagcttcttcaacgagcaggccgtctactcgcagcagctgcgcgccttcacctcgcttacgcacgtcttcaaccgcttccccgagaaccagatcctcgtccgcccgcccgcgcccaccattaccaccgtcagtgaaaacgttcctgctctcacagatcacgggaccctgccgctgcgcagcagtatccggggagtccagcgcgtgaccgttactgacgccagacgccgcacctgcccctacgtctacaaggccctgggcatagtcgcgccgcgcgtcctctcgagccgcaccttctaaatgtccattctcatctcgcccagtaataacaccggttggggcctgcgcgcgcccagcaagatgtacggaggcgctcgccaacgctccacgcaacaccccgtgcgcgtgcgcgggcacttccgcgctccctggggcgccctcaagggccgcgtgcggtcgcgcaccaccgtcgacgacgtgatcgaccaggtggtggccgacgcgcgcaactacacccccgccgccgcgcccgtctccaccgtggacgccgtcatcgacagcgtggtggccgacgcgcgccggtacgcccgcgccaagagccggcggcggcgcatcgcccggcggcaccggagcacccccgccatgcgcgcggcgcgagccttgctgcgcagggccaggcgcacgggacgcagggccatgctcagggcggccagacgcgcggcttcaggcgccagcgccggcaggacccggagacgcgcggccacggcggcggcagcggccatcgccagcatgtcccgcccgcggcgagggaacgtgtactgggtgcgcgacgccgccaccggtgtgcgcgtgcccgtgcgcacccgcccccctcgcacttgaagatgttcacttcgcgatgttgatgtgtcccagcggcgaggaggatgtccaagcgcaaattcaaggaagagatgctccaggtcatcgcgcctgagatctacggccctgcggtggtgaaggaggaaagaaagccccgcaaaatcaagcgggtcaaaaaggacaaaaaggaagaagaaagtgatgtggacggattggtggagtttgtgcgcgagttcgccccccggcggcgcgtgcagtggcgcgggcggaaggtgcaaccggtgctgagacccggcaccaccgtggtcttcacgcccggcgagcgctccggcaccgcttccaagcgctcctacgacgaggtgtacggggatgatgatattctggagcaggcggccgagcgcctgggcgagtttgcttacggcaagcgcagccgttccgcaccgaaggaagaggcggtgtccatcccgctggaccacggcaaccccacgccgagcctcaagcccgtgaccttgcagcaggtgctgccgaccgcggcgccgcgccgggggttcaagcgcgagggcgaggatctgtaccccaccatgcagctgatggtgcccaagcgccagaagctggaagacgtgctggagaccatgaaggtggacccggacgtgcagcccgaggtcaaggtgcggcccatcaagcaggtggccccgggcctgggcgtgcagaccgtggacatcaagattcccacggagcccatggaaacgcagaccgagcccatgatcaagcccagcaccagcaccatggaggtgcagacggatccctggatgccatcggctcctagtcgaagaccccggcgcaagtacggcgcggccagcctgctgatgcccaactacgcgctgcatccttccatcatccccacgccgggctaccgcggcacgcgcttctaccgcggtcataccagcagccgccgccgcaagaccaccactcgccgccgccgtcgccgcaccgccgctgcaaccacccctgccgccctggtgcggagagtgtaccgccgcggccgcgcacctctgaccctgccgcgcgcgcgctaccacccgagcatcgccatttaaactttcgcctgctttgcagatcaatggccctcacatgccgccttcgcgttcccattacgggctaccgaggaagaaaaccgcgccgtagaaggctggcggggaacgggatgcgtcgccaccaccaccggcggcggcgcgccatcagcaagcggttggggggaggcttcctgcccgcgctgatccccatcatcgccgcggcgatcggggcgatccccggcattgcttccgtggcggtgcaggcctctcagcgccactgagacacacttggaaacatcttgtaataaaccaatggactctgacgctcctggtcctgtgatgtgttttcgtagacagatggaagacatcaatttttcgtccctggctccgcgacacggcacgcggccgttcatgggcacctggagcgacatcggcaccagccaactgaacgggggcgccttcaattggagcagtctctggagcgggcttaagaatttcgggtccacgcttaaaacctatggcagcaaggcgtggaacagcaccacagggcaggcgctgagggataagctgaaagagcagaacttccagcagaaggtggtcgatgggctcgcctcgggcatcaacggggtggtggacctggccaaccaggccgtgcagcggcagatcaacagccgcctggacccggtgccgcccgccggctccgtggagatgccgcaggtggaggaggagctgcctcccctggacaagcggggcgagaagcgaccccgccccgatgcggaggagacgctgctgacgcacacggacgagccgcccccgtacgaggaggcggtgaaactgggtctgcccaccacgcggcccatcgcgcccctggccaccggggtgctgaaacccgaaaagcccgcgaccctggacttgcctcctccccagccttcccgcccctctacagtggctaagcccctgccgccggtggccgtggcccgcgcgcgacccgggggcaccgcccgccctcatgcgaactggcagagcactctgaacagcatcgtgggtctgggagtgcagagtgtgaagcgccgccgctgctattaaacctaccgtagcgcttaacttgcttgtctgtgtgtgtatgtattatgtcgccgccgccgctgtccaccagaaggaggagtgaagaggcgcgtcgccgagttgcaagatggccaccccatcgatgctgccccagtgggcgtacatgcacatcgccggacaggacgcttcggagtacctgagtccgggtctggtgcagtttgcccgcgccacagacacctacttcagtctggggaacaagtttaggaaccccacggtggcgcccacgcacgatgtgaccaccgaccgcagccagcggctgacgctgcgcttcgtgcccgtggaccgcgaggacaacacctactcgtacaaagtgcgctacacgctggccgtgggcgacaaccgcgtgctggacatggccagcacctactttgacatccgcggcgtgctggatcggggccctagcttcaaaccctactccggcaccgcctacaacagtctggcccccaagggagcacccaacacttgtcagtggacatataaagccgatggtgaaactgccacagaaaaaacctatacatatggaaatgcacccgtgcagggcattaacatcacaaaagatggtattcaacttggaactgacaccgatgatcagccaatctacgcagataaaacctatcagcctgaacctcaagtgggtgatgctgaatggcatgacatcactggtactgatgaaaagtatggaggcagagctcttaagcctgataccaaaatgaagccttgttatggttcttttgccaagcctactaataaagaaggaggtcaggcaaatgtgaaaacaggaacaggcactactaaagaatatgacatagacatggctttctttgacaacagaagtgcggctgctgctggcctagctccagaaattgttttgtatactgaaaatgtggatttggaaactccagatacccatattgtatacaaagcaggcacagatgacagcagctcttctattaatttgggtcagcaagccatgcccaacagacctaactacattggtttcagagacaactttatcgggctcatgtactacaacagcactggcaatatgggggtgctggccggtcaggcttctcagctgaatgctgtggttgacttgcaagacagaaacaccgagctgtcctaccagctcttgcttgactctctgggtgacagaacccggtatttcagtatgtggaatcaggcggtggacagctatgatcctgatgtgcgcattattgaaaatcatggtgtggaggatgaacttcccaactattgtttccctctggatgctgttggcagaacagatacttatcagggaattaaggctaatggaactgatcaaaccacatggaccaaagatgacagtgtcaatgatgctaatgagataggcaagggtaatccattcgccatggaaatcaacatccaagccaacctgtggaggaacttcctctacgccaacgtggccctgtacctgcccgactcttacaagtacacgccggccaatgttaccctgcccaccaacaccaacacctacgattacatgaacggccgggtggtggcgccctcgctggtggactcctacatcaacatcggggcgcgctggtcgctggatcccatggacaacgtgaaccccttcaaccaccaccgcaatgcggggctgcgctaccgctccatgctcctgggcaacgggcgctacgtgcccttccacatccaggtgccccagaaatttttcgccatcaagagcctcctgctcctgcccgggtcctacacctacgagtggaacttccgcaaggacgtcaacatgatcctgcagagctccctcggcaacgacctgcgcacggacggggcctccatctccttcaccagcatcaacctctacgccaccttcttccccatggcgcacaacacggcctccacgctcgaggccatgctgcgcaacgacaccaacgaccagtccttcaacgactacctctcggcggccaacatgctctaccccatcccggccaacgccaccaacgtgcccatctccatcccctcgcgcaactgggccgccttccgcggctggtccttcacgcgtctcaagaccaaggagacgccctcgctgggctccgggttcgacccctacttcgtctactcgggctccatcccctacctcgacggcaccttctacctcaaccacaccttcaagaaggtctccatcaccttcgactcctccgtcagctggcccggcaacgaccggctcctgacgcccaacgagttcgaaatcaagcgcaccgtcgacggcgagggctacaacgtggcccagtgcaacatgaccaaggactggttcctggtccagatgctggcccactacaacatcggctaccagggcttctacgtgcccgagggctacaaggaccgcatgtactccttcttccgcaacttccagcccatgagccgccaggtggtggacgaggtcaactacaaggactaccaggccgtcaccctggcctaccagcacaacaactcgggcttcgtcggctacctcgcgcccaccatgcgccagggccagccctaccccgccaactacccctacccgctcatcggcaagagcgccgtcaccagcgtcacccagaaaaagttcctctgcgacagggtcatgtggcgcatccccttctccagcaacttcatgtccatgggcgcgctcaccgacctcggccagaacatgctctatgccaactccgcccacgcgctagacatgaatttcgaagtcgaccccatggatgagtccacccttctctatgttgtcttcgaagtcttcgacgtcgtccgagtgcaccagccccaccgcggcgtcatcgaggccgtctacctgcgcacccccttctcggccggtaacgccaccacctaagctcttgcttcttgcaagccatggccgcgggctccggcgagcaggagctcagggccatcatccgcgacctgggctgcgggccctacttcctgggcaccttcgataagcgcttcccgggattcatggccccgcacaagctggcctgcgccatcgtcaacacggccggccgcgagaccgggggcgagcactggctggccttcgcctggaacccgcgctcgaacacctgctacctcttcgaccccttcgggttctcggacgagcgcctcaagcagatctaccagttcgagtacgagggcctgctgcgccgcagcgccctggccaccgaggaccgctgcgtcaccctggaaaagtccacccagaccgtgcagggtccgcgctcggccgcctgcgggctcttctgctgcatgttcctgcacgccttcgtgcactggcccgaccgccccatggacaagaaccccaccatgaacttgctgacgggggtgcccaacggcatgctccagtcgccccaggtggaacccaccctgcgccgcaaccaggaggcgctctaccgcttcctcaactcccactccgcctactttcgctcccaccgcgcgcgcatcgagaaggccaccgccttcgaccgcatgaatcaagacatgtaaaccgtgtgtgtatgttaaatgtctttaataaacagcactttcatgttacacatgcatctgagatgatttatttagaaatcgaaagggttctgccgggtctcggcatggcccgcgggcagggacacgttgcggaactggtacttggccagccacttgaactcggggatcagcagtttgggcagcggggtgtcggggaaggagtcggtccacagcttccgcgtcagttgcagggcgcccagcaggtcgggcgcggagatcttgaaatcgcagttgggacccgcgttctgcgcgcgggagttgcggtacacggggttgcagcactggaacaccatcagggccgggtgcttcacgctcgccagcaccgtcgcgtcggtgatgctctccacgtcgaggtcctcggcgttggccatcccgaagggggtcatcttgcaggtctgccttcccatggtgggcacgcacccgggcttgtggttgcaatcgcagtgcagggggatcagcatcatctgggcctggtcggcgttcatccccgggtacatggccttcatgaaagcctccaattgcctgaacgcctgctgggccttggctccctcggtgaagaagaccccgcaggacttgctagagaactggttggtggcgcacccggcgtcgtgcacgcagcagcgcgcgtcgttgttggccagctgcaccacgctgcgcccccagcggttctgggtgatcttggcccggtcggggttctccttcagcgcgcgctgcccgttctcgctcgccacatccatctcgatcatgtgctccttctggatcatggtggtcccgtgcaggcaccgcagcttgccctcggcctcggtgcacccgtgcagccacagcgcgcacccggtgcactcccagttcttgtgggcgatctgggaatgcgcgtgcacgaagccctgcaggaagcggcccatcatggtggtcagggtcttgttgctagtgaaggtcagcggaatgccgcggtgctcctcgttgatgtacaggtggcagatgcggcggtacacctcgccctgctcgggcatcagctggaagttggctttcaggtcggtctccacgcggtagcggtccatcagcatagtcatgatttccatacccttctcccaggccgagacgatgggcaggctcatagggttcttcaccatcatcttagcgctagcagccgcggccagggggtcgctctcgtccagggtctcaaagctccgcttgccgtccttctcggtgatccgcaccggggggtagctgaagcccacggccgccagctcctcctcggcctgtctttcgtcctcgctgtcctggctgacgtcctgcaggaccacatgcttggtcttgcggggtttcttcttgggcggcagcggcggcggagatgttggagatggcgagggggagcgcgagttctcgctcaccactactatctcttcctcttcttggtccgaggccacgcggcggtaggtatgtctcttcgggggcagaggcggaggcgacgggctctcgccgccgcgacttggcggatggctggcagagccccttccgcgttcgggggtgcgctcccggcggcgctctgactgacttcctccgcggccggccattgtgttctcctagggaggaacaacaagcatggagactcagccatcgccaacctcgccatctgcccccaccgccgacgagaagcagcagcagcagaatgaaagcttaaccgccccgccgcccagccccgccacctccgacgcggccgtcccagacatgcaagagatggaggaatccatcgagattgacctgggctatgtgacgcccgcggagcacgaggaggagctggcagtgcgcttttcacaagaagagatacaccaagaacagccagagcaggaagcagagaatgagcagagtcaggctgggctcgagcatgacggcgactacctccacctgagcgggggggaggacgcgctcatcaagcatctggcccggcaggccaccatcgtcaaggatgcgctgctcgaccgcaccgaggtgcccctcagcgtggaggagctcagccgcgcctacgagttgaacctcttctcgccgcgcgtgccccccaagcgccagcccaatggcacctgcgagcccaacccgcgcctcaacttctacccggtcttcgcggtgcccgaggccctggccacctaccacatctttttcaagaaccaaaagatccccgtctcctgccgcgccaaccgcacccgcgccgacgcccttttcaacctgggtcccggcgcccgcctacctgatatcgcctccttggaagaggttcccaagatcttcgagggtctgggcagcgacgagactcgggccgcgaacgctctgcaaggagaaggaggagagcatgagcaccacagcgccctggtcgagttggaaggcgacaacgcgcggctggcggtgctcaaacgcacggtcgagctgacccatttcgcctacccggctctgaacctgccccccaaagtcatgagcgcggtcatggaccaggtgctcatcaagcgcgcgtcgcccatctccgaggacgagggcatgcaagactccgaggagggcaagcccgtggtcagcgacgagcagctggcccggtggctgggtcctaatgctagtccccagagtttggaagagcggcgcaaactcatgatggccgtggtcctggtgaccgtggagctggagtgcctgcgccgcttcttcgccgacgcggagaccctgcgcaaggtcgaggagaacctgcactacctcttcaggcacgggttcgtgcgccaggcctgcaagatctccaacgtggagctgaccaacctggtctcctacatgggcatcttgcacgagaaccgcctggggcagaacgtgctgcacaccaccctgcgcggggaggcccggcgcgactacatccgcgactgcgtctacctctacctctgccacacctggcagacgggcatgggcgtgtggcagcagtgtctggaggagcagaacctgaaagagctctgcaagctcctgcagaagaacctcaagggtctgtggaccgggttcgacgagcgcaccaccgcctcggacctggccgacctcattttccccgagcgcctcaggctgacgctgcgcaacggcctgcccgactttatgagccaaagcatgttgcaaaactttcgctctttcatcctcgaacgctccggaatcctgcccgccacctgctccgcgctgccctcggacttcgtgccgctgaccttccgcgagtgccccccgccgctgtggagccactgctacctgctgcgcctggccaactacctggcctaccactcggacgtgatcgaggacgtcagcggcgagggcctgctcgagtgccactgccgctgcaacctctgcacgccgcaccgctccctggcctgcaacccccagctgctgagcgagacccagatcatcggcaccttcgagttgcaagggcccagcgaaggcgagggttcagccgccaaggggggtctgaaactcaccccggggctgtggacctcggcctacttgcgcaagttcgtgcccgaggactaccatcccttcgagatcaggttctacgaggaccaatcccatccgcccaaggccgagctgtcggcctgcgtcatcacccagggggcgatcctggcccaattgcaagccatccagaaatcccgccaagaattcttgctgaaaaagggccgcggggtctacctcgacccccagaccggtgaggagctcaaccccggcttcccccaggatgccccgaggaaacaagaagctgaaagtggagctgccgcccgtggaggatttggaggaagactgggagaacagcagtcaggcagaggaggaggagatggaggaagactgggacagcactcaggcagaggaggacagcctgcaagacagtctggaggaagacgaggaggaggcagaggaggaggtggaagaagcagccgccgccagaccgtcgtcctcggcgggggagaaagcaagcagcacggataccatctccgctccgggtcggggtcccgctcgaccacacagtagatgggacgagaccggacgattcccgaaccccaccacccagaccggtaagaaggagcggcagggatacaagtcctggcgggggcacaaaaacgccatcgtctcctgcttgcaggcctgcgggggcaacatctccttcacccggcgctacctgctcttccaccgcggggtgaactttccccgcaacatcttgcattactaccgtcacctccacagcccctactacttccaagaagaggcagcagcagcagaaaaagaccagcagaaaaccagcagctagaaaatccacagcggcggcagcaggtggactgaggatcgcggcgaacgagccggcgcaaacccgggagctgaggaaccggatctttcccaccctctatgccatcttccagcagagtcgggggcaggagcaggaactgaaagtcaagaaccgttctctgcgctcgctcacccgcagttgtctgtatcacaagagcgaagaccaacttcagcgcactctcgaggacgccgaggctctcttcaacaagtactgcgcgctcactcttaaagagtagcccgcgcccgcccagtcgcagaaaaaggcgggaattacgtcacctgtgcccttcgccctagccgcctccacccatcatcatgagcaaagagattcccacgccttacatgtggagctaccagccccagatgggcctggccgccggtgccgcccaggactactccacccgcatgaattggctcagcgccgggcccgcgatgatctcacgggtgaatgacatccgcgcccaccgaaaccagatactcctagaacagtcagcgctcaccgccacgccccgcaatcacctcaatccgcgtaattggcccgccgccctggtgtaccaggaaattccccagcccacgaccgtactacttccgcgagacgcccaggccgaagtccagctgactaactcaggtgtccagctggcgggcggcgccaccctgtgtcgtcaccgccccgctcagggtataaagcggctggtgatccggggcagaggcacacagctcaacgacgaggtggtgagctcttcgctgggtctgcgacctgacggagtcttccaactcgccggatcggggagatcttccttcacgcctcgtcaggccgtcctgactttggagagttcgtcctcgcagccccgctcgggtggcatcggcactctccagttcgtggaggagttcactccctcggtctacttcaaccccttctccggctcccccggccactacccggacgagttcatcccgaacttcgacgccatcagcgagtcggtggacggctacgattgaaactaatcacccccttatccagtgaaataaagatcatattgatgatgattttacagaaataaaaaataatcatttgatttgaaataaagatacaatcatattgatgatttgagtttaacaaaaaaataaagaatcacttacttgaaatctgataccaggtctctgtccatgttttctgccaacaccacttcactcccctcttcccagctctggtactgcaggccccggcgggctgcaaacttcctccacacgctgaaggggatgtcaaattcctcctgtccctcaatcttcattttatcttctatcagatgtccaaaaagcgcgtccgggtggatgatgacttcgaccccgtctacccctacgatgcagacaacgcaccgaccgtgcccttcatcaacccccccttcgtctcttcagatggattccaagagaagcccctgggggtgttgtccctgcgactggccgaccccgtcaccaccaagaacggggaaatcaccctcaagctgggagagggggtggacctcgattcctcgggaaaactcatctccaacacggccaccaaggccgccgcccctctcagtttttccaacaacaccatttcccttaacatggatcaccccttttacactaaagatggaaaattatccttacaagtttctccaccattaaatatactgagaacaagcattctaaacacactagctttaggttttggatcaggtttaggactccgtggctctgccttggcagtacagttagtctctccacttacatttgatactgatggaaacataaagcttaccttagacagaggtttgcatgttacaacaggagatgcaattgaaagcaacataagctgggctaaaggtttaaaatttgaagatggagccatagcaaccaacattggaaatgggttagagtttggaagcagtagtacagaaacaggtgttgatgatgcttacccaatccaagttaaacttggatctggccttagctttgacagtacaggagccataatggctggtaacaaagaagacgataaactcactttgtggacaacacctgatccatcaccaaactgtcaaatactcgcagaaaatgatgcaaaactaacactttgcttgactaaatgtggtagtcaaatactggccactgtgtcagtcttagttgtaggaagtggaaacctaaaccccattactggcaccgtaagcagtgctcaggtgtttctacgttttgatgcaaacggtgttcttttaacagaacattctacactaaaaaaatactgggggtataggcagggagatagcatagatggcactccatataccaatgctgtaggattcatgcccaatttaaaagcttatccaaagtcacaaagttctactactaaaaataatatagtagggcaagtatacatgaatggagatgtttcaaaacctatgcttctcactataaccctcaatggtactgatgacagcaacagtacatattcaatgtcattttcatacacctggactaatggaagctatgttggagcaacatttggggctaactcttataccttctcatacatcgcccaagaatgaacactgtatcccaccctgcatgccaacccttcccaccccactctgtggaacaaactctgaaacacaaaataaaataaagttcaagtgttttattgattcaacagttttacaggattcgagcagttatttttcctccaccctcccaggacatggaatacaccaccctctccccccgcacagccttgaacatctgaatgccattggtgatggacatgcttttggtctccacgttccacacagtttcagagcgagccagtctcgggtcggtcagggagatgaaaccctccgggcactcccgcatctgcacctcacagctcaacagctgaggattgtcctcggtggtcgggatcacggttatctggaagaagcagaagagcggcggtgggaatcatagtccgcgaacgggatcggccggtggtgtcgcatcaggccccgcagcagtcgctgccgccgccgctccgtcaagctgctgctcagggggtccgggtccagggactccctcagcatgatgcccacggccctcagcatcagtcgtctggtgcggcgggcgcagcagcgcatgcggatctcgctcaggtcgctgcagtacgtgcaacacagaaccaccaggttgttcaacagtccatagttcaacacgctccagccgaaactcatcgcgggaaggatgctacccacgtggccgtcgtaccagatcctcaggtaaatcaagtggtgccccctccagaacacgctgcccacgtacatgatctccttgggcatgtggcggttcaccacctcccggtaccacatcaccctctggttgaacatgcagccccggatgatcctgcggaaccacagggccagcaccgccccgcccgccatgcagcgaagagaccccgggtcccggcaatggcaatggaggacccaccgctcgtacccgtggatcatctgggagctgaacaagtctatgttggcacagcacaggcatatgctcatgcatctcttcagcactctcaactcctcgggggtcaaaaccatatcccagggcacggggaactcttgcaggacagcgaaccccgcagaacagggcaatcctcgcacagaacttacattgtgcatggacagggtatcgcaatcaggcagcaccgggtgatcctccaccagagaagcgcgggtctcggtctcctcacagcgtggtaagggggccggccgatacgggtgatggcgggacgcggctgatcgtgttcgcgaccgtgtcatgatgcagttgctttcggacattttcgtacttgctgtagcagaacctggtccgggcgctgcacaccgatcgccggcggcggtctcggcgcttggaacgctcggtgttgaaattgtaaaacagccactctctcagaccgtgcagcagatctagggcctcaggagtgatgaagatcccatcatgcctgatggctctgatcacatcgaccaccgtggaatgggccagacccagccagatgatgcaattttgttgggtttcggtgacggcgggggagggaagaacaggaagaaccatgattaacttttaatccaaacggtctcggagtacttcaaaatgaagatcgcggagatggcacctctcgcccccgctgtgttggtggaaaataacagccaggtcaaaggtgatacggttctcgagatgttccacggtggcttccagcaaagcctccacgcgcacatccagaaacaagacaatagcgaaagcgggagggttctctaattcctcaatcatcatgttacactcctgcaccatccccagataattttcatttttccagccttgaatgattcgaactagttcctgaggtaaatccaagccagccatgataaagagctcgcgcagagcgccctccaccggcattcttaagcacaccctcataattccaagatattctgctcctggttcacctgcagcagattgacaagcggaatatcaaaatctctgccgcgatccctgagctcctccctcagcaataactgtaagtactctttcatatcctctccgaaatttttagccataggaccaccaggaataagattagggcaagccacagtacagataaaccgaagtcctccccagtgagcattgccaaatgcaagactgctataagcatgctggctagacccggtgatatcttccagataactggacagaaaatcgcccaggcaatttttaagaaaatcaacaaaagaaaaatcctccaggtggacgtttagagcctcgggaacaacgatgaagtaaatgcaagcggtgcgttccagcatggttagttagctgatctgtagaaaaaacaaaaatgaacattaaaccatgctagcctggcgaacaggtgggtaaatcgttctctccagcaccaggcaggccacggggtctccggcgcgaccctcgtaaaaattgtcgctatgattgaaaaccatcacagagagacgttcccggtggccggcgtgaatgattcgacaagatgaatacacccccggaacattggcgtccgcgagtgaaaaaaagcgcccgaggaagcaataaggcactacaatgctcagtctcaagtccagcaaagcgatgccatgcggatgaagcacaaaattctcaggtgcgtacaaaatgtaattactcccctcctgcacaggcagcaaagcccccgatccctccaggtacacatacaaagcctcagcgtccatagcttaccgagcagcagcacacaacaggcgcaagagtcagagaaaggctgagctctaacctgtccacccgctctctgctcaatatatagcccagatctacactgacgtaaaggccaaagtctaaaaatacccgccaaataatcacacacgcccagcacacgcccagaaaccggtgacacactcaaaaaaatacgcgcacttcctcaaacgcccaaaactgccgtcatttccgggttcccacgctacgtcatcaaaacacgactttcaaattccgtcgaccgttaaaaacgtcacccgccccgcccctaacggtcgcccgtctctcagccaatcagcgccccgcatccccaaattcaaacacctcatttgcatattaacgcgcacaaaaagtttgaggtatattattgatgatgg

SEQ ID NO: 14 - DNA, 8602 bp, synthetic construct
  misc_feature 1..8602: note = Description of Artificial Sequence: Synthetic polynucleotide
  source 1..8602: mol_type = other DNA
atgggcggcgcatgagagaagcccagaccaattacctacccaaaatggagaaagttcacgttgacatcgaggaagacagcccattcctcagagctttgcagcggagcttcccgcagtttgaggtagaagccaagcaggtcactgataatgaccatgctaatgccagagcgttttcgcatctggcttcaaaactgatcgaaacggaggtggacccatccgacacgatccttgacattggaagtgcgcccgcccgcagaatgtattctaagcacaagtatcattgtatctgtccgatgagatgtgcggaagatccggacagattgtataagtatgcaactaagctgaagaaaaactgtaaggaaataactgataaggaattggacaagaaaatgaaggagctcgccgccgtcatgagcgaccctgacctggaaactgagactatgtgcctccacgacgacgagtcgtgtcgctacgaagggcaagtcgctgtttaccaggatgtatacgcggttgacggaccgacaagtctctatcaccaagccaataagggagttagagtcgcctactggataggctttgacaccaccccttttatgtttaagaacttggctggagcatatccatcatactctaccaactgggccgacgaaaccgtgttaacggctcgtaacataggcctatgcagctctgacgttatggagcggtcacgtagagggatgtccattcttagaaagaagtatttgaaaccatccaacaatgttctattctctgttggctcgaccatctaccacgagaagagggacttactgaggagctggcacctgccgtctgtatttcacttacgtggcaagcaaaattacacatgtcggtgtgagactatagttagttgcgacgggtacgtcgttaaaagaatagctatcagtccaggcctgtatgggaagccttcaggctatgctgctacgatgcaccgcgagggattcttgtgctgcaaagtgacagacacattgaacggggagagggtctcttttcccgtgtgcacgtatgtgccagctacattgtgtgaccaaatgactggcatactggcaacagatgtcagtgcggacgacgcgcaaaaactgctggttgggctcaaccagcgtatagtcgtcaacggtcgcacccagagaaacaccaataccatgaaaaattaccttttgcccgtagtggcccaggcatttgctaggtgggcaaaggaatataaggaagatcaagaagatgaaaggccactaggactacgagatagacagttagtcatggggtgttgttgggcttttagaaggcacaagataacatctatttataagcgcccggatacccaaaccatcatcaaagtgaacagcgatttccactcattcgtgctgcccaggataggcagtaacacattggagatcgggctgagaacaagaatcaggaaaatgttagaggagcacaaggagccgtcacctctcattaccgccgaggacgtacaagaagctaagtgcgcagccgatgaggctaaggaggtgcgtgaagccgaggagttgcgcgcagctctaccacctttggcagctgatgttgaggagcccactctggaagccgatgtcgacttgatgttacaagaggctggggccggctcagtggagacacctcgtggcttgataaaggttaccagctacgctggcgaggacaagatcggctcttacgctgtgctttctccgcaggctgtactcaagagtgaaaaattatcttgcatccaccctctcgctgaacaagtcatagtgataacacactctggccgaaaagggcgttatgccgtggaaccataccatggtaaagtagtggtgccagagggacatgcaatacccgtccaggactttcaagctctgagtgaaagtgccaccattgtgtacaacgaacgtgagttcgtaaacaggtacctgcaccatattgccacacatggaggagcgctgaacactgatgaagaatattacaaaactgtcaagcccagcgagcacgacggcgaatacctgtacgacatcgacaggaaacagtgcgtcaagaaagaactagtcactgggctagggctcacaggcgagctggtggatcctcccttccatgaattcgcctacgagagtctgagaacacgaccagccgctccttaccaagtaccaaccataggggtgtatggcgtgccaggatcaggcaagtctggcatcattaaaagcgcagtcaccaaaaaagatctagtggtgagcgccaagaaagaaaactgtgcagaaattataagggacgtcaagaaaatgaaagggctggacgtcaatgccagaactgtggactcagtgctcttgaatggatgcaaacaccccgtagagaccctgtatattgacgaagcttttgcttgtcatgcaggtactctcagagcgctcatagccattataagacctaaaaaggcagtgctctgcggggatcccaaacagtgcggtttttttaacatgatgtgcctgaaagtgcattttaaccacgagatttgcacacaagtcttccacaaaagcatctctcgccgttgcactaaatctgtgacttcggtcgtctcaaccttgttttacgacaaaaaaatgagaacgacgaatccgaaagagactaagattgtgattgacactaccggcagtaccaaacctaagcaggacgatctcattctcacttgtttcagagggtgggtgaagcagttgcaaatagattacaaaggcaacgaaataatgacggcagctgcctctcaagggctgacccgtaaaggtgtgtatgccgttcggtacaaggtgaatgaaaatcctctgtacgcacccacctcagaacatgtgaacgtcctactgacccgcacggaggaccgcatcgtgtggaaaacactagccggcgacccatggataaaaacactgactgccaagtaccctgggaatttcactgccacgatagaggagtggcaagcagagcatgatgccatcatgaggcacatcttggagagaccggaccctaccgacgtcttccagaataaggcaaacgtgtgttgggccaaggctttagtgccggtgctgaagaccgctggcatagacatgaccactgaacaatggaacactgtggattattttgaaacggacaaagctcactcagcagagatagtattgaaccaactatgcgtgaggttctttggactcgatctggactccggtctattttctgcacccactgttccgttatccattaggaataatcactgggataactccccgtcgcctaacatgtacgggctgaataaagaagtggtccgtcagctctctcgcaggtacccacaactgcctcgggcagttgccactggaagagtctatgacatgaacactggtacactgcgcaattatgatccgcgcataaacctagtacctgtaaacagaagactgcctcatgctttagtcctccaccataatgaacacccacagagtgacttttcttcattcgtcagcaaattgaagggcagaactgtcctggtggtcggggaaaagttgtccgtcccaggcaaaatggttgactggttgtcagaccggcctgaggctaccttcagagctcggctggatttaggcatcccaggtgatgtgcccaaatatgacataatatttgttaatgtgaggaccccatataaataccatcactatcagcagtgtgaagaccatgccattaagcttagcatgttgaccaagaaagcttgtctgcatctgaatcccggcggaacctgtgtcagcataggttatggttacgctgacagggccagcgaaagcatcattggtgctatagcgcggcagttcaagttttcccgggtatgcaaaccgaaatcctcacttgaagagacggaagttctgtttgtattcattgggtacgatcgcaaggcccgtacgcacaatccttacaagctttcatcaaccttgaccaacatttatacaggttccagactccacgaagccggatgtgcaccctcatatcatgtggtgcgaggggatattgccacggccaccgaaggagtgattataaatgctgctaacagcaaaggacaacctggcggaggggtgtgcggagcgctgtataagaaattcccggaaagcttcgatttacagccgatcgaagtaggaaaagcgcgactggtcaaaggtgcagctaaacatatcattcatgccgtaggaccaaacttcaacaaagtttcggaggttgaaggtgacaaacagttggcagaggcttatgagtccatcgctaagattgtcaacgataacaattacaagtcagtagcgattccactgttgtccaccggcatcttttccgggaacaaagatcgactaacccaatcattgaaccatttgctgacagctttagacaccactgatgcagatgtagccatatactgcagggacaagaaatgggaaatgactctcaaggaagcagtggctaggagagaagcagtggaggagatatgcatatccgacgactcttcagtgacagaacctgatgcagagctggtgagggtgcatccgaagagttctttggctggaaggaagggctacagcacaagcgatggcaaaactttctcatatttggaagggaccaagtttcaccaggcggccaaggatatagcagaaattaatgccatgtggcccgttgcaacggaggccaatgagcaggtatgcatgtatatcctcggagaaagcatgagcagtattaggtcgaaatgccccgtcgaagagtcggaagcctccacaccacctagcacgctgccttgcttgtgcatccatgccatgactccagaaagagtacagcgcctaaaagcctcacgtccagaacaaattactgtgtgctcatcctttccattgccgaagtatagaatcactggtgtgcagaagatccaatgctcccagcctatattgttctcaccgaaagtgcctgcgtatattcatccaaggaagtatctcgtggaaacaccaccggtagacgagactccggagccatcggcagagaaccaatccacagaggggacacctgaacaaccaccacttataaccgaggatgagaccaggactagaacgcctgagccgatcatcatcgaagaggaagaagaggatagcataagtttgctgtcagatggcccgacccaccaggtgctgcaagtcgaggcagacattcacgggccgccctctgtatctagctcatcctggtccattcctcatgcatccgactttgatgtggacagtttatccatacttgacaccctggagggagctagcgtgaccagcggggcaacgtcagccgagactaactcttacttcgcaaagagtatggagtttctggcgcgaccggtgcctgcgcctcgaacagtattcaggaaccctccacatcccgctccgcgcacaagaacaccgtcacttgcacccagcagggcctgctcgagaaccagcctagtttccaccccgccaggcgtgaatagggtgatcactagagaggagctcgaggcgcttaccccgtcacgcactcctagcaggtcggtctcgagaaccagcctggtctccaacccgccaggcgtaaatagggtgattacaagagaggagtttgaggcgttcgtagcacaacaacaatgacggtttgatgcgggtgcatacatcttttcctccgacaccggtcaagggcatttacaacaaaaatcagtaaggcaaacggtgctatccgaagtggtgttggagaggaccgaattggagatttcgtatgccccgcgcctcgaccaagaaaaagaagaattactacgcaagaaattacagttaaatcccacacctgctaacagaagcagataccagtccaggaaggtggagaacatgaaagccataacagctagacgtattctgcaaggcctagggcattatttgaaggcagaaggaaaagtggagtgctaccgaaccctgcatcctgttcctttgtattcatctagtgtgaaccgtgccttttcaagccccaaggtcgcagtggaagcctgtaacgccatgttgaaagagaactttccgactgtggcttcttactgtattattccagagtacgatgcctatttggacatggttgacggagcttcatgctgcttagacactgccagtttttgccctgcaaagctgcgcagctttccaaagaaacactcctatttggaacccacaatacgatcggcagtgccttcagcgatccagaacacgctccagaacgtcctggcagctgccacaaaaagaaattgcaatgtcacgcaaatgagagaattgcccgtattggattcggcggcctttaatgtggaatgcttcaagaaatatgcgtgtaataatgaatattgggaaacgtttaaagaaaaccccatcaggcttactgaagaaaacgtggtaaattacattaccaaattaaaaggaccaaaagctgctgctctttttgcgaagacacataatttgaatatgttgcaggacataccaatggacaggtttgtaatggacttaaagagagacgtgaaagtgactccaggaacaaaacatactgaagaacggcccaaggtacaggtgatccaggctgccgatccgctagcaacagcgtatctgtgcggaatccaccgagagctggttaggagattaaatgcggtcctgcttccgaacattcatacactgtttgatatgtcggctgaagactttgacgctattatagccgagcacttccagcctggggattgtgttctggaaactgacatcgcgtcgtttgataaaagtgaggacgacgccatggctctgaccgcgttaatgattctggaagacttaggtgtggacgcagagctgttgacgctgattgaggcggctttcggcgaaatttcatcaatacatttgcccactaaaactaaatttaaattcggagccatgatgaaatctggaatgttcctcacactgtttgtgaacacagtcattaacattgtaatcgcaagcagagtgttgagagaacggctaaccggatcaccatgtgcagcattcattggagatgacaatatcgtgaaaggagtcaaatcggacaaattaatggcagacaggtgcgccacctggttgaatatggaagtcaagattatagatgctgtggtgggcgagaaagcgccttatttctgtggagggtttattttgtgtgactccgtgaccggcacagcgtgccgtgtggcagaccccctaaaaaggctgtttaagcttggcaaacctctggcagcagacgatgaacatgatgatgacaggagaagggcattgcatgaagagtcaacacgctggaaccgagtgggtattctttcagagctgtgcaaggcagtagaatcaaggtatgaaaccgtaggaacttccatcatagttatggccatgactactctagctagcagtgttaaatcattcagctacctgagaggggcccctataactctctacggctaacctgaatggactacgactctagaatagtctttaattaaagtccgccatatgaggccaccatgcagatcttcgtgaagaccctgaccggcaagaccatcaccctagaggtggagcccagtgacaccatcgagaacgtgaaggccaagatccaggataaagagggcatcccccctgaccagcagaggctgatctttgccggcaagcagctggaagatggccgcaccctctctgattacaacatccagaaggagtcaaccctgcacctggtccttcgcctgagaggtggcgctgcttacagtataatcaactttgaaaaactggctgcttacggcatcctgggctttgtgtttacactggctgcctacctgctgtttggctatcctgtgtacgtggccgcttatggactgtgtaccctggtggccatgctggctgcttacaatctggtgcctatggtggccacagtggccgcctattgtcttggcggactgctgacaatggtggcagcctacagcccgagctatgcgtatcatcagtttgcagcctacggcccaggaccaggcgctaaatttgtggctgcctggacactgaaagccgccgctggaccaggtcctggacagtacatcaaggccaacagcaagttcatcggcatcaccgaactcggcccaggaccaggctatccctacgatgtgcctgattacgcctgatagtgatgattcgaacggccgtatcacgcccaaacatttacagccgcggtgtcaaaaaccgcgtggacgtggttaacatccctgctgggaggatcagccgtaattattataattggcttggtgctggctactattgtggccatgtacgtgctgaccaaccagaaacataattgaatacagcagcaattggcaagctgcttacatagaactcgcggcgattggcatgccgccttaaaatttttattttattttttcttttcttttccgaatcggattttgtttttaatatttcaaaaaaaaaaaaaaaaaaaaaaaaaaaaaaaaaaaaaaaaaaaaaaaaaaaaaaaaaaaaaaaaaaaaaaaaaaaaaaaa

SEQ ID NO: 15 - DNA, 9595 bp, synthetic construct
  misc_feature 1..9595: note = Description of Artificial Sequence: Synthetic polynucleotide
  source 1..9595: mol_type = other DNA
atgggcggcgcatgagagaagcccagaccaattacctacccaaaatggagaaagttcacgttgacatcgaggaagacagcccattcctcagagctttgcagcggagcttcccgcagtttgaggtagaagccaagcaggtcactgataatgaccatgctaatgccagagcgttttcgcatctggcttcaaaactgatcgaaacggaggtggacccatccgacacgatccttgacattggaagtgcgcccgcccgcagaatgtattctaagcacaagtatcattgtatctgtccgatgagatgtgcggaagatccggacagattgtataagtatgcaactaagctgaagaaaaactgtaaggaaataactgataaggaattggacaagaaaatgaaggagctcgccgccgtcatgagcgaccctgacctggaaactgagactatgtgcctccacgacgacgagtcgtgtcgctacgaagggcaagtcgctgtttaccaggatgtatacgcggttgacggaccgacaagtctctatcaccaagccaataagggagttagagtcgcctactggataggctttgacaccaccccttttatgtttaagaacttggctggagcatatccatcatactctaccaactgggccgacgaaaccgtgttaacggctcgtaacataggcctatgcagctctgacgttatggagcggtcacgtagagggatgtccattcttagaaagaagtatttgaaaccatccaacaatgttctattctctgttggctcgaccatctaccacgagaagagggacttactgaggagctggcacctgccgtctgtatttcacttacgtggcaagcaaaattacacatgtcggtgtgagactatagttagttgcgacgggtacgtcgttaaaagaatagctatcagtccaggcctgtatgggaagccttcaggctatgctgctacgatgcaccgcgagggattcttgtgctgcaaagtgacagacacattgaacggggagagggtctcttttcccgtgtgcacgtatgtgccagctacattgtgtgaccaaatgactggcatactggcaacagatgtcagtgcggacgacgcgcaaaaactgctggttgggctcaaccagcgtatagtcgtcaacggtcgcacccagagaaacaccaataccatgaaaaattaccttttgcccgtagtggcccaggcatttgctaggtgggcaaaggaatataaggaagatcaagaagatgaaaggccactaggactacgagatagacagttagtcatggggtgttgttgggcttttagaaggcacaagataacatctatttataagcgcccggatacccaaaccatcatcaaagtgaacagcgatttccactcattcgtgctgcccaggataggcagtaacacattggagatcgggctgagaacaagaatcaggaaaatgttagaggagcacaaggagccgtcacctctcattaccgccgaggacgtacaagaagctaagtgcgcagccgatgaggctaaggaggtgcgtgaagccgaggagttgcgcgcagctctaccacctttggcagctgatgttgaggagcccactctggaagccgatgtcgacttgatgttacaagaggctggggccggctcagtggagacacctcgtggcttgataaaggttaccagctacgctggcgaggacaagatcggctcttacgctgtgctttctccgcaggctgtactcaagagtgaaaaattatcttgcatccaccctctcgctgaacaagtcatagtgataacacactctggccgaaaagggcgttatgccgtggaaccataccatggtaaagtagtggtgccagagggacatgcaatacccgtccaggactttcaagctctgagtgaaagtgccaccattgtgtacaacgaacgtgagttcgtaaacaggtacctgcaccatattgccacacatggaggagcgctgaacactgatgaagaatattacaaaactgtcaagcccagcgagcacgacggcgaatacctgtacgacatcgacaggaaacagtgcgtcaagaaagaactagtcactgggctagggctcacaggcgagctggtggatcctcccttccatgaattcgcctacgagagtctgagaacacgaccagccgctccttaccaagtaccaaccataggggtgtatggcgtgccaggatcaggcaagtctggcatcattaaaagcgcagtcaccaaaaaagatctagtggtgagcgccaagaaagaaaactgtgcagaaattataagggacgtcaagaaaatgaaagggctggacgtcaatgccagaactgtggactcagtgctcttgaatggatgcaaacaccccgtagagaccctgtatattgacgaagcttttgcttgtcatgcaggtactctcagagcgctcatagccattataagacctaaaaaggcagtgctctgcggggatcccaaacagtgcggtttttttaacatgatgtgcctgaaagtgcattttaaccacgagatttgcacacaagtcttccacaaaagcatctctcgccgttgcactaaatctgtgacttcggtcgtctcaaccttgttttacgacaaaaaaatgagaacgacgaatccgaaagagactaagattgtgattgacactaccggcagtaccaaacctaagcaggacgatctcattctcacttgtttcagagggtgggtgaagcagttgcaaatagattacaaaggcaacgaaataatgacggcagctgcctctcaagggctgacccgtaaaggtgtgtatgccgttcggtacaaggtgaatgaaaatcctctgtacgcacccacctcagaacatgtgaacgtcctactgacccgcacggaggaccgcatcgtgtggaaaacactagccggcgacccatggataaaaacactgactgccaagtaccctgggaatttcactgccacgatagaggagtggcaagcagagcatgatgccatcatgaggcacatcttggagagaccggaccctaccgacgtcttccagaataaggcaaacgtgtgttgggccaaggctttagtgccggtgctgaagaccgctggcatagacatgaccactgaacaatggaacactgtggattattttgaaacggacaaagctcactcagcagagatagtattgaaccaactatgcgtgaggttctttggactcgatctggactccggtctattttctgcacccactgttccgttatccattaggaataatcactgggataactccccgtcgcctaacatgtacgggctgaataaagaagtggtccgtcagctctctcgcaggtacccacaactgcctcgggcagttgccactggaagagtctatgacatgaacactggtacactgcgcaattatgatccgcgcataaacctagtacctgtaaacagaagactgcctcatgctttagtcctccaccataatgaacacccacagagtgacttttcttcattcgtcagcaaattgaagggcagaactgtcctggtggtcggggaaaagttgtccgtcccaggcaaaatggttgactggttgtcagaccggcctgaggctaccttcagagctcggctggatttaggcatcccaggtgatgtgcccaaatatgacataatatttgttaatgtgaggaccccatataaataccatcactatcagcagtgtgaagaccatgccattaagcttagcatgttgaccaagaaagcttgtctgcatctgaatcccggcggaacctgtgtcagcataggttatggttacgctgacagggccagcgaaagcatcattggtgctatagcgcggcagttcaagttttcccgggtatgcaaaccgaaatcctcacttgaagagacggaagttctgtttgtattcattgggtacgatcgcaaggcccgtacgcacaatccttacaagctttcatcaaccttgaccaacatttatacaggttccagactccacgaagccggatgtgcaccctcatatcatgtggtgcgaggggatattgccacggccaccgaaggagtgattataaatgctgctaacagcaaaggacaacctggcggaggggtgtgcggagcgctgtataagaaattcccggaaagcttcgatttacagccgatcgaagtaggaaaagcgcgactggtcaaaggtgcagctaaacatatcattcatgccgtaggaccaaacttcaacaaagtttcggaggttgaaggtgacaaacagttggcagaggcttatgagtccatcgctaagattgtcaacgataacaattacaagtcagtagcgattccactgttgtccaccggcatcttttccgggaacaaagatcgactaacccaatcattgaaccatttgctgacagctttagacaccactgatgcagatgtagccatatactgcagggacaagaaatgggaaatgactctcaaggaagcagtggctaggagagaagcagtggaggagatatgcatatccgacgactcttcagtgacagaacctgatgcagagctggtgagggtgcatccgaagagttctttggctggaaggaagggctacagcacaagcgatggcaaaactttctcatatttggaagggaccaagtttcaccaggcggccaaggatatagcagaaattaatgccatgtggcccgttgcaacggaggccaatgagcaggtatgcatgtatatcctcggagaaagcatgagcagtattaggtcgaaatgccccgtcgaagagtcggaagcctccacaccacctagcacgctgccttgcttgtgcatccatgccatgactccagaaagagtacagcgcctaaaagcctcacgtccagaacaaattactgtgtgctcatcctttccattgccgaagtatagaatcactggtgtgcagaagatccaatgctcccagcctatattgttctcaccgaaagtgcctgcgtatattcatccaaggaagtatctcgtggaaacaccaccggtagacgagactccggagccatcggcagagaaccaatccacagaggggacacctgaacaaccaccacttataaccgaggatgagaccaggactagaacgcctgagccgatcatcatcgaagaggaagaagaggatagcataagtttgctgtcagatggcccgacccaccaggtgctgcaagtcgaggcagacattcacgggccgccctctgtatctagctcatcctggtccattcctcatgcatccgactttgatgtggacagtttatccatacttgacaccctggagggagctagcgtgaccagcggggcaacgtcagccgagactaactcttacttcgcaaagagtatggagtttctggcgcgaccggtgcctgcgcctcgaacagtattcaggaaccctccacatcccgctccgcgcacaagaacaccgtcacttgcacccagcagggcctgctcgagaaccagcctagtttccaccccgccaggcgtgaatagggtgatcactagagaggagctcgaggcgcttaccccgtcacgcactcctagcaggtcggtctcgagaaccagcctggtctccaacccgccaggcgtaaatagggtgattacaagagaggagtttgaggcgttcgtagcacaacaacaatgacggtttgatgcgggtgcatacatcttttcctccgacaccggtcaagggcatttacaacaaaaatcagtaaggcaaacggtgctatccgaagtggtgttggagaggaccgaattggagatttcgtatgccccgcgcctcgaccaagaaaaagaagaattactacgcaagaaattacagttaaatcccacacctgctaacagaagcagataccagtccaggaaggtggagaacatgaaagccataacagctagacgtattctgcaaggcctagggcattatttgaaggcagaaggaaaagtggagtgctaccgaaccctgcatcctgttcctttgtattcatctagtgtgaaccgtgccttttcaagccccaaggtcgcagtggaagcctgtaacgccatgttgaaagagaactttccgactgtggcttcttactgtattattccagagtacgatgcctatttggacatggttgacggagcttcatgctgcttagacactgccagtttttgccctgcaaagctgcgcagctttccaaagaaacactcctatttggaacccacaatacgatcggcagtgccttcagcgatccagaacacgctccagaacgtcctggcagctgccacaaaaagaaattgcaatgtcacgcaaatgagagaattgcccgtattggattcggcggcctttaatgtggaatgcttcaagaaatatgcgtgtaataatgaatattgggaaacgtttaaagaaaaccccatcaggcttactgaagaaaacgtggtaaattacattaccaaattaaaaggaccaaaagctgctgctctttttgcgaagacacataatttgaatatgttgcaggacataccaatggacaggtttgtaatggacttaaagagagacgtgaaagtgactccaggaacaaaacatactgaagaacggcccaaggtacaggtgatccaggctgccgatccgctagcaacagcgtatctgtgcggaatccaccgagagctggttaggagattaaatgcggtcctgcttccgaacattcatacactgtttgatatgtcggctgaagactttgacgctattatagccgagcacttccagcctggggattgtgttctggaaactgacatcgcgtcgtttgataaaagtgaggacgacgccatggctctgaccgcgttaatgattctggaagacttaggtgtggacgcagagctgttgacgctgattgaggcggctttcggcgaaatttcatcaatacatttgcccactaaaactaaatttaaattcggagccatgatgaaatctggaatgttcctcacactgtttgtgaacacagtcattaacattgtaatcgcaagcagagtgttgagagaacggctaaccggatcaccatgtgcagcattcattggagatgacaatatcgtgaaaggagtcaaatcggacaaattaatggcagacaggtgcgccacctggttgaatatggaagtcaagattatagatgctgtggtgggcgagaaagcgccttatttctgtggagggtttattttgtgtgactccgtgaccggcacagcgtgccgtgtggcagaccccctaaaaaggctgtttaagcttggcaaacctctggcagcagacgatgaacatgatgatgacaggagaagggcattgcatgaagagtcaacacgctggaaccgagtgggtattctttcagagctgtgcaaggcagtagaatcaaggtatgaaaccgtaggaacttccatcatagttatggccatgactactctagctagcagtgttaaatcattcagctacctgagaggggcccctataactctctacggctaacctgaatggactacgactctagaatagtctttaattaaagtccgccatatgagatggaagatgccaaaaacattaagaagggcccagcgccattctacccactcgaagacgggaccgccggcgagcagctgcacaaagccatgaagcgctacgccctggtgcccggcaccatcgcctttaccgacgcacatatcgaggtggacattacctacgccgagtacttcgagatgagcgttcggctggcagaagctatgaagcgctatgggctgaatacaaaccatcggatcgtggtgtgcagcgagaatagcttgcagttcttcatgcccgtgttgggtgccctgttcatcggtgtggctgtggccccagctaacgacatctacaacgagcgcgagctgctgaacagcatgggcatcagccagcccaccgtcgtattcgtgagcaagaaagggctgcaaaagatcctcaacgtgcaaaagaagctaccgatcatacaaaagatcatcatcatggatagcaagaccgactaccagggcttccaaagcatgtacaccttcgtgacttcccatttgccacccggcttcaacgagtacgacttcgtgcccgagagcttcgaccgggacaaaaccatcgccctgatcatgaacagtagtggcagtaccggattgcccaagggcgtagccctaccgcaccgcaccgcttgtgtccgattcagtcatgcccgcgaccccatcttcggcaaccagatcatccccgacaccgctatcctcagcgtggtgccatttcaccacggcttcggcatgttcaccacgctgggctacttgatctgcggctttcgggtcgtgctcatgtaccgcttcgaggaggagctattcttgcgcagcttgcaagactataagattcaatctgccctgctggtgcccacactatttagcttcttcgctaagagcactctcatcgacaagtacgacctaagcaacttgcacgagatcgccagcggcggggcgccgctcagcaaggaggtaggtgaggccgtggccaaacgcttccacctaccaggcatccgccagggctacggcctgacagaaacaaccagcgccattctgatcacccccgaaggggacgacaagcctggcgcagtaggcaaggtggtgcccttcttcgaggctaaggtggtggacttggacaccggtaagacactgggtgtgaaccagcgcggcgagctgtgcgtccgtggccccatgatcatgagcggctacgttaacaaccccgaggctacaaacgctctcatcgacaaggacggctggctgcacagcggcgacatcgcctactgggacgaggacgagcacttcttcatcgtggaccggctgaagagcctgatcaaatacaagggctaccaggtagccccagccgaactggagagcatcctgctgcaacaccccaacatcttcgacgccggggtcgccggcctgcccgacgacgatgccggcgagctgcccgccgcagtcgtcgtgctggaacacggtaaaaccatgaccgagaaggagatcgtggactatgtggccagccaggttacaaccgccaagaagctgcgcggtggtgttgtgttcgtggacgaggtgcctaaaggactgaccggcaagttggacgcccgcaagatccgcgagattctcattaaggccaagaagggcggcaagatcgccgtgtaattcgaacggccgtatcacgcccaaacatttacagccgcggtgtcaaaaaccgcgtggacgtggttaacatccctgctgggaggatcagccgtaattattataattggcttggtgctggctactattgtggccatgtacgtgctgaccaaccagaaacataattgaatacagcagcaattggcaagctgcttacatagaactcgcggcgattggcatgccgccttaaaatttttattttattttttcttttcttttccgaatcggattttgtttttaatatttcaaaaaaaaaaaaaaaaaaaaaaaaaaaaaaaaaaaaaaaaaaaaaaaaaaaaaaaaaaaaaaaaaaaaaaaaaaaaaaaa

SEQ ID NO: 16 - protein, 139 aa, synthetic construct
  REGION 1..139: note = Description of Artificial Sequence: Synthetic polypeptide
PSSLSASVGDRVTITCRASQSINSYLDWYQQKPGKAPKLLIYAASSLQSGVPSRFSGSGSGTDFTLTISSLQPEDFATYYCQQYYSTPFTFGPGTKVEIKRTVAAPSVFIFPPSDEQLKSGTASVVCLLNNFYPREAKV

SEQ ID NO: 17 - protein, 167 aa, synthetic construct
  REGION 1..167: note = Description of Artificial Sequence: Synthetic polypeptide
GVVQPGRSLRLSCAASGFTFSSYGMHWVRQAPGKGLEWVAVIWYDGSNKYYADSVKGRFTISRDNSKNTLYLQMNSLRAEDTAVYYCARDPRGATLYYYYYGMDVWGQGTTVTVSSASTKGPSVFPLAPCSRSTSESTAALGCLVKDYFPEPVTVSWNSGALTSGVH

SEQ ID NO: 18 - protein, 10 aa, synthetic construct
  REGION 1..10: note = Description of Artificial Sequence: Synthetic peptide
GFTFSSYGMH

SEQ ID NO: 19 - protein, 15 aa, synthetic construct
  REGION 1..15: note = Description of Artificial Sequence: Synthetic peptide
VIWYDGSNKYYADSV

SEQ ID NO: 20 - protein, 16 aa, synthetic construct
  REGION 1..16: note = Description of Artificial Sequence: Synthetic peptide
DPRGATLYYYYYGMDV

SEQ ID NO: 21 - protein, 11 aa, synthetic construct
  REGION 1..11: note = Description of Artificial Sequence: Synthetic peptide
RASQSINSYLD

SEQ ID NO: 22 - protein, 7 aa, synthetic construct
  REGION 1..7: note = Description of Artificial Sequence: Synthetic peptide
AASSLQS

SEQ ID NO: 23 - protein, 9 aa, synthetic construct
  REGION 1..9: note = Description of Artificial Sequence: Synthetic peptide
QQYYSTPFT

SEQ ID NO: 24 - protein, 108 aa, synthetic construct
  REGION 1..108: note = Description of Artificial Sequence: Synthetic polypeptide
EIVLTQSPGTLSLSPGERATLSCRASQRVSSSYLAWYQQKPGQAPRLLIYDASSRATGIPDRFSGSGSGTDFTLTISRLEPEDFAVYYCQQYGSLPWTFGQGTKVEIK

SEQ ID NO: 25 - protein, 121 aa, synthetic construct
  REGION 1..121: note = Description of Artificial Sequence: Synthetic polypeptide
EVQLVESGGGLVQPGGSLRLSCAASGFTFSRYWMSWVRQAPGKGLEWVANIKQDGSEKYYVDSVKGRFTISRDNAKNSLYLQMNSLRAEDTAVYYCAREGGWFGELAFDYWGQGTLVTVSS

SEQ ID NO: 26 - protein, 5 aa, synthetic construct
  REGION 1..5: note = Description of Artificial Sequence: Synthetic peptide
RYWMS

SEQ ID NO: 27 - protein, 17 aa, synthetic construct
  REGION 1..17: note = Description of Artificial Sequence: Synthetic peptide
NIKQDGSEKYYVDSVKG

SEQ ID NO: 28 - protein, 12 aa, synthetic construct
  REGION 1..12: note = Description of Artificial Sequence: Synthetic peptide
EGGWFGELAFDY

SEQ ID NO: 29 - protein, 12 aa, synthetic construct
  REGION 1..12: note = Description of Artificial Sequence: Synthetic peptide
RASQRVSSSYLA

SEQ ID NO: 30 - protein, 7 aa, synthetic construct
  REGION 1..7: note = Description of Artificial Sequence: Synthetic peptide
DASSRAT

SEQ ID NO: 31 - protein, 9 aa, synthetic construct
  REGION 1..9: note = Description of Artificial Sequence: Synthetic peptide
QQYGSLPWT

SEQ ID NO: 32 - DNA, 2019 bp, synthetic construct
  misc_feature 1..2019: note = Description of Artificial Sequence: Synthetic polynucleotide
  source 1..2019: mol_type = other DNA
gcccgggcatttaaatgcgatcgcatcgattacgactctagaatagtctagtccgcaggccaccatgcagatcttcgtgaagaccctgaccggcaagaccatcaccctagaggtggagcccagtgacaccatcgagaacgtgaaggccaagatccaggataaagagggcatcccccctgaccagcagaggctgatctttgccggcaagcagctggaagatggccgcaccctctctgattacaacatccagaaggagtcaaccctgcacctggtccttcgcctgagaggtgccatgtttcaggcgctgagcgaaggctgcaccccgtatgatattaaccagatgctgaacgtgctgggcgatcatcaggtctcaggccttgagcagcttgagagtataatcaactttgaaaaactgactgaatggaccagttctaatgttatgcctatcctgtctcctctgacaaagggcatcctgggcttcgtgtttaccctgaccgtgccttctgagagaggacttagctgcattagcgaagcggatgcgaccaccccggaaagcgcgaacctgggcgaagaaattctgagccagctgtatctttggccaagggtgacctaccattcccctagttatgcttaccaccaatttgaaagacgagccaaatataaaagacacttccccggctttggccagagcctgctgtttggctaccctgtgtacgtgttcggcgattgcgtgcagggcgattgggatgcgattcgctttcgctattgcgcgccgccgggctatgcgctgctgcgctgcaacgataccaactatagcgctctgctggctgtgggggccctagaaggacccaggaatcaggactggcttggtgtcccaagacaacttgtaactcggatgcaggctattcagaatgccggcctgtgtaccctggtggccatgctggaagagacaatcttctggctgcaagcgtttctgatggcgctgaccgatagcggcccgaaaaccaacattattgtggatagccagtatgtgatgggcattagcaaaccgagctttcaggaatttgtggattgggaaaacgtgagcccggaactgaacagcaccgatcagccgttttggcaagccggaatcctggccagaaatctggtgcctatggtggccacagtgcagggccagaacctgaagtaccagggtcagtcactagtcatctctgcttctatcattgtcttcaacctgctggaactggaaggtgattatcgagatgatggcaacgtgtgggtgcataccccgctgagcccgcgcaccctgaacgcgtgggtgaaagcggtggaagaaaaaaaaggtattccagttcacctagagctggccagtatgaccaacatggagctcatgagcagtattgtgcatcagcaggtcagaacatacggccccgtgttcatgtgtctcggcggactgcttacaatggtggctggtgctgtgtggctgacagtgcgagtgctcgagctgttccgggccgcgcagctggccaacgacgtggtcctccagatcatggagctttgtggtgcagcgtttcgccaggtgtgccataccaccgtgccgtggccgaacgcgagcctgaccccgaaatggaacaacgaaaccacccagccccagatcgccaactgcagcgtgtatgacttttttgtgtggctccattattattctgttcgagacacactttggccaagggtgacctaccatatgaacaaatatgcgtatcatatgctggaaagacgagccaaatataaaagaggaccaggacctggcgctaaatttgtggccgcctggacactgaaagccgctgctggtcctggacctggccagtacatcaaggccaacagcaagttcatcggcatcaccgaactcggacccggaccaggctgatgatttcgaaatttaaataagcttgcggccgctagggataacagggtaattatcacgcccaaacatttacagccgcggtgtcaaaaaccgcgtgg

SEQ ID NO: 33 - protein, 619 aa, synthetic construct
  REGION 1..619: note = Description of Artificial Sequence: Synthetic polypeptide
MQIFVKTLTGKTITLEVEPSDTIENVKAKIQDKEGIPPDQQRLIFAGKQLEDGRTLSDYNIQKESTLHLVLRLRGAMFQALSEGCTPYDINQMLNVLGDHQVSGLEQLESIINFEKLTEWTSSNVMPILSPLTKGILGFVFTLTVPSERGLSCISEADATTPESANLGEEILSQLYLWPRVTYHSPSYAYHQFERRAKYKRHFPGFGQSLLFGYPVYVFGDCVQGDWDAIRFRYCAPPGYALLRCNDTNYSALLAVGALEGPRNQDWLGVPRQLVTRMQAIQNAGLCTLVAMLEETIFWLQAFLMALTDSGPKTNIIVDSQYVMGISKPSFQEFVDWENVSPELNSTDQPFWQAGILARNLVPMVATVQGQNLKYQGQSLVISASIIVFNLLELEGDYRDDGNVWVHTPLSPRTLNAWVKAVEEKKGIPVHLELASMTNMELMSSIVHQQVRTYGPVFMCLGGLLTMVAGAVWLTVRVLELFRAAQLANDVVLQIMELCGAAFRQVCHTTVPWPNASLTPKWNNETTQPQIANCSVYDFFVWLHYYSVRDTLWPRVTYHMNKYAYHMLERRAKYKRGPGPGAKFVAAWTLKAAAGPGPGQYIKANSKFIGITELGPGPG

SEQ ID NO: 34 - DNA, 1638 bp, synthetic construct
  misc_feature 1..1638: note = Description of Artificial Sequence: Synthetic polynucleotide
  source 1..1638: mol_type = other DNA
atggccgggatgttccaggcactgtccgaaggctgcacaccctatgatattaaccagatgctgaatgtcctgggagaccaccaggtctctggcctggagcagctggagagcatcatcaacttcgagaagctgaccgagtggacaagctccaatgtgatgcctatcctgtccccactgaccaagggcatcctgggcttcgtgtttaccctgacagtgccttctgagcggggcctgtcttgcatcagcgaggcagacgcaaccacaccagagtccgccaatctgggcgaggagatcctgtctcagctgtacctgtggccccgggtgacatatcactccccttcttacgcctatcaccagttcgagcggagagccaagtacaagagacacttcccaggctttggccagtctctgctgttcggctaccccgtgtacgtgttcggcgattgcgtgcagggcgactgggatgccatccggtttagatactgcgcaccacctggatatgcactgctgaggtgtaacgacaccaattattccgccctgctggcagtgggcgccctggagggccctcgcaatcaggattggctgggcgtgccaaggcagctggtgacacgcatgcaggccatccagaacgcaggcctgtgcaccctggtggcaatgctggaggagacaatcttctggctgcaggcctttctgatggccctgaccgacagcggccccaagacaaacatcatcgtggattcccagtacgtgatgggcatctccaagccttctttccaggagtttgtggactgggagaacgtgagcccagagctgaattccaccgatcagccattctggcaggcaggaatcctggcaaggaacctggtgcctatggtggccacagtgcagggccagaatctgaagtaccagggccagagcctggtcatcagcgcctccatcatcgtgtttaacctgctggagctggagggcgactatcgggacgatggcaacgtgtgggtgcacaccccactgagccccagaacactgaacgcctgggtgaaggccgtggaggagaagaagggcatcccagtgcacctggagctggcctccatgaccaatatggagctgatgtctagcatcgtgcaccagcaggtgaggacatacggacccgtgttcatgtgcctgggaggcctgctgaccatggtggcaggagccgtgtggctgacagtgcgggtgctggagctgttcagagccgcccagctggccaacgatgtggtgctgcagatcatggagctgtgcggagcagcctttcgccaggtgtgccacaccacagtgccatggcccaatgcctccctgacccccaagtggaacaatgagacaacacagcctcagatcgccaactgtagcgtgtacgacttcttcgtgtggctgcactactatagcgtgagggataccctgtggccccgcgtgacataccacatgaataagtacgcctatcacatgctggagaggcgcgccaagtataagagaggccctggcccaggcgcaaagtttgtggcagcatggaccctgaaggccgccgccggccccggccccggccagtatatcaaggctaacagtaagttcattggaatcacagagctgggacccggacctgga

SEQ ID NO: 35 - protein, 546 aa, synthetic construct
  REGION 1..546: note = Description of Artificial Sequence: Synthetic polypeptide
MAGMFQALSEGCTPYDINQMLNVLGDHQVSGLEQLESIINFEKLTEWTSSNVMPILSPLTKGILGFVFTLTVPSERGLSCISEADATTPESANLGEEILSQLYLWPRVTYHSPSYAYHQFERRAKYKRHFPGFGQSLLFGYPVYVFGDCVQGDWDAIRFRYCAPPGYALLRCNDTNYSALLAVGALEGPRNQDWLGVPRQLVTRMQAIQNAGLCTLVAMLEETIFWLQAFLMALTDSGPKTNIIVDSQYVMGISKPSFQEFVDWENVSPELNSTDQPFWQAGILARNLVPMVATVQGQNLKYQGQSLVISASIIVFNLLELEGDYRDDGNVWVHTPLSPRTLNAWVKAVEEKKGIPVHLELASMTNMELMSSIVHQQVRTYGPVFMCLGGLLTMVAGAVWLTVRVLELFRAAQLANDVVLQIMELCGAAFRQVCHTTVPWPNASLTPKWNNETTQPQIANCSVYDFFVWLHYYSVRDTLWPRVTYHMNKYAYHMLERRAKYKRGPGPGAKFVAAWTLKAAAGPGPGQYIKANSKFIGITELGPGPG

SEQ ID NO: 36 - DNA, 2019 bp, synthetic construct
  misc_feature 1..2019: note = Description of Artificial Sequence: Synthetic polynucleotide
  source 1..2019: mol_type = other DNA
gcccgggcatttaaatgcgatcgcatcgattacgactctagaatagtctagtccgcaggccaccatgcagatcttcgtgaagaccctgaccggcaagaccatcaccctagaggtggagcccagtgacaccatcgagaacgtgaaggccaagatccaggataaagagggcatcccccctgaccagcagaggctgatctttgccggcaagcagctggaagatggccgcaccctctctgattacaacatccagaaggagtcaaccctgcacctggtccttcgcctgagaggtgccatgtttcaggcgctgagcgaaggctgcaccccgtatgatattaaccagatgctgaacgtgctgggcgatcatcagtttaagcacatcaaagcctttgaccggacatttgctaacaacccaggtcccatggttgtgtttgccacacctgggcctatcctgtctcctctgacaaagggcatcctgggcttcgtgtttaccctgaccgtgccttctgagagaggacttagctgcattagcgaagcggatgcgaccaccccggaaagcgcgaacctgggcgaagaaattctgagccagctgtatctttggccaagggtgacctaccattcccctagttatgcttaccaccaatttgaaagacgagccaaatataaaagacacttccccggctttggccagagcctgctgtttggctaccctgtgtacgtgttcggcgattgcgtgcagggcgattgggatgcgattcgctttcgctattgcgcgccgccgggctatgcgctgctgcgctgcaacgataccaactatagcgctctgctggctgtgggggccctagaaggacccaggaatcaggactggcttggtgtcccaagacaacttgtaactcggatgcaggctattcagaatgccggcctgtgtaccctggtggccatgctggaagagacaatcttctggctgcaagcgtttctgatggcgctgaccgatagcggcccgaaaaccaacattattgtggatagccagtatgtgatgggcattagcaaaccgagctttcaggaatttgtggattgggaaaacgtgagcccggaactgaacagcaccgatcagccgttttggcaagccggaatcctggccagaaatctggtgcctatggtggccacagtgcagggccagaacctgaagtaccagggtcagtcactagtcatctctgcttctatcattgtcttcaacctgctggaactggaaggtgattatcgagatgatggcaacgtgtgggtgcataccccgctgagcccgcgcaccctgaacgcgtgggtgaaagcggtggaagaaaaaaaaggtattccagttcacctagagctggccagtatgaccaacatggagctcatgagcagtattgtgcatcagcaggtcagaacatacggccccgtgttcatgtgtctcggcggactgcttacaatggtggctggtgctgtgtggctgacagtgcgagtgctcgagctgttccgggccgcgcagctggccaacgacgtggtcctccagatcatggagctttgtggtgcagcgtttcgccaggtgtgccataccaccgtgccgtggccgaacgcgagcctgaccccgaaatggaacaacgaaaccacccagccccagatcgccaactgcagcgtgtatgacttttttgtgtggctccattattattctgttcgagacacactttggccaagggtgacctaccatatgaacaaatatgcgtatcatatgctggaaagacgagccaaatataaaagaggaccaggacctggcgctaaatttgtggccgcctggacactgaaagccgctgctggtcctggacctggccagtacatcaaggccaacagcaagttcatcggcatcaccgaactcggacccggaccaggctgatgatttcgaaatttaaataagcttgcggccgctagggataacagggtaattatcacgcccaaacatttacagccgcggtgtcaaaaaccgcgtgg

SEQ ID NO: 37 - protein, 619 aa, synthetic construct
  REGION 1..619: note = Description of Artificial Sequence: Synthetic polypeptide
MQIFVKTLTGKTITLEVEPSDTIENVKAKIQDKEGIPPDQQRLIFAGKQLEDGRTLSDYNIQKESTLHLVLRLRGAMFQALSEGCTPYDINQMLNVLGDHQFKHIKAFDRTFANNPGPMVVFATPGPILSPLTKGILGFVFTLTVPSERGLSCISEADATTPESANLGEEILSQLYLWPRVTYHSPSYAYHQFERRAKYKRHFPGFGQSLLFGYPVYVFGDCVQGDWDAIRFRYCAPPGYALLRCNDTNYSALLAVGALEGPRNQDWLGVPRQLVTRMQAIQNAGLCTLVAMLEETIFWLQAFLMALTDSGPKTNIIVDSQYVMGISKPSFQEFVDWENVSPELNSTDQPFWQAGILARNLVPMVATVQGQNLKYQGQSLVISASIIVFNLLELEGDYRDDGNVWVHTPLSPRTLNAWVKAVEEKKGIPVHLELASMTNMELMSSIVHQQVRTYGPVFMCLGGLLTMVAGAVWLTVRVLELFRAAQLANDVVLQIMELCGAAFRQVCHTTVPWPNASLTPKWNNETTQPQIANCSVYDFFVWLHYYSVRDTLWPRVTYHMNKYAYHMLERRAKYKRGPGPGAKFVAAWTLKAAAGPGPGQYIKANSKFIGITELGPGPG

SEQ ID NO: 38 - DNA, 228 bp, synthetic construct
  misc_feature 1..228: note = Description of Artificial Sequence: Synthetic polynucleotide
  source 1..228: mol_type = other DNA
atgcagatcttcgtgaagaccctgaccggcaagaccatcaccctagaggtggagcccagtgacaccatcgagaacgtgaaggccaagatccaggataaagagggcatcccccctgaccagcagaggctgatctttgccggcaagcagctggaagatggccgcaccctctctgattacaacatccagaaggagtcaaccctgcacctggtccttcgcctgagaggtggc

SEQ ID NO: 39 - DNA, 228 bp, synthetic construct
  misc_feature 1..228: note = Description of Artificial Sequence: Synthetic polynucleotide
  source 1..228: mol_type = other DNA
atgcagatcttcgtgaagaccctgaccggcaagaccatcaccctagaggtggagcccagtgacaccatcgagaacgtgaaggccaagatccaggataaagagggcatcccccctgaccagcagaggctgatctttgccggcaagcagctggaagatggccgcaccctctctgattacaacatccagaaggagtcaaccctgcacctggtccttcgcctgagaggtgcc

SEQ ID NO: 40 - DNA, 78 bp, Homo sapiens
  source 1..78: mol_type = other DNA
atggccgtcatggcgccccgaaccctcgtcctgctactctcgggggctctggccctgacccagacctgggcgggctct

SEQ ID NO: 41 - DNA, 201 bp, Homo sapiens
  source 1..201: mol_type = other DNA
ccgtcttcccagcccaccatccccatcgtgggcatcattgctggcctggttctctttggagctgtgatcactggagctgtggtcgctgctgtgatgtggaggaggaagagctcagatagaaaaggagggagctactctcaggctgcaagcagtgacagtgcccagggctctgatgtgtctctcacagcttgtaaagtgtga

SEQ ID NO: 42 - DNA, 60 bp, synthetic construct
  misc_feature 1..60: note = Description of Artificial Sequence: Synthetic oligonucleotide
  source 1..60: mol_type = other DNA
atggagaccgatacactgctgctgtgggtgctgctcctgtgggtgccaggaagcacaggc

SEQ ID NO: 43 - DNA, 3178 bp, Homo sapiens
  source 1..3178: mol_type = other DNA
ggcaccgattcggggcctgcccggacttcgccgcacgctgcagaacctcgcccagcgcccaccatgccccggcagctcagcgcggcggccgcgctcttcgcgtccctggccgtaattttgcacgatggcagtcaaatgagagcaaaagcatttccagaaaccagagattattctcaacctactgcagcagcaacagtacaggacataaaaaaacctgtccagcaaccagctaagcaagcacctcaccaaactttagcagcaagattcatggatggtcatatcacctttcaaacagcggccacagtaaaaattccaacaactaccccagcaactacaaaaaacactgcaaccaccagcccaattacctacaccctggtcacaacccaggccacacccaacaactcacacacagctcctccagttactgaagttacagtcggccctagcttagccccttattcactgccacccaccatcaccccaccagctcatacagctggaaccagttcatcaaccgtcagccacacaactgggaacaccactcaacccagtaaccagaccacccttccagcaactttatcgatagcactgcacaaaagcacaaccggtcagaagcctgatcaacccacccatgccccaggaacaacggcagctgcccacaataccacccgcacagctgcacctgcctccacggttcctgggcccacccttgcacctcagccatcgtcagtcaagactggaatttatcaggttctaaacggaagcagactctgtataaaagcagagatggggatacagctgattgttcaagacaaggagtcggttttttcacctcggagatacttcaacatcgaccccaacgcaacgcaagcctctgggaactgtggcacccgaaaatccaaccttctgttgaattttcagggcggatttgtgaatctcacatttaccaaggatgaagaatcatattatatcagtgaagtgggagcctatttgaccgtctcagatccagagacagtttaccaaggaatcaaacatgcggtggtgatgttccagacagcagtcgggcattccttcaagtgcgtgagtgaacagagcctccagttgtcagcccacctgcaggtgaaaacaaccgatgtccaacttcaagcctttgattttgaagatgaccactttggaaatgtggatgagtgctcgtctgactacacaattgtgcttcctgtgattggggccatcgtggttggtctctgccttatgggtatgggtgtctataaaatccgcctaaggtgtcaatcatctggataccagagaatctaattgttgcccggggggaatgaaaataatggaatttagagaactctttcatcccttccaggatggatgttgggaaattccctcagagtgtgggtccttcaaacaatgtaaaccaccatcttctattcaaatgaagtgagtcatgtgtgatttaagttcaggcagcacatcaatttctaaatactttttgtttattttatgaaagatatagtgagctgtttattttctagtttcctttagaatattttagccactcaaagtcaacatttgagatatgttgaattaacataatatatgtaaagtagaataagccttcaaattataaaccaagggtcaattgtaactaatactactgtgtgtgcattgaagattttattttacccttgatcttaacaaagcctttgctttgttatcaaatggactttcagtgcttttactatctgtgttttatggtttcatgtaacatacatattcctggtgtagcacttaactccttttccactttaaatttgtttttgttttttgagacggagtttcactcttgtcacccaggctggagtacagtggcacgatctcggcttatggcaacctccgcctcccgggttcaagtgattctcctgcttcagcttcccgagtagctgggattacaggcacacactaccacgcctggctaatttttgtatttttattatagacgggtttcaccatgttggccagactggtcttgaactcttgacctcaggtgatccacccacctcagcctcccaaagtgctgggattacaggcatgagccattgcgcccggccttaaatgttttttttaatcatcaaaaagaacaacatatctcaggttgtctaagtgtttttatgtaaaaccaacaaaaagaacaaatcagcttatattttttatcttgatgactcctgctccagaattgctagactaagaattaggtggctacagatggtagaactaaacaataagcaagagacaataataatggcccttaattattaacaaagtgccagagtctaggctaagcactttatctatatctcatttcattctcacaacttataagtgaatgagtaaactgagacttaagggaactgaatcacttaaatgtcacctggctaactgatggcagagccagagcttgaattcatgttggtctgacatcaaggtctttggtcttctccctacaccaagttacctacaagaacaatgacaccacactctgcctgaaggctcacacctcataccagcatacgctcaccttacagggaaatgggtttatccaggatcatgagacattagggtagatgaaaggagagctttgcagataacaaaatagcctatccttaataaatcctccactctctggaaggagactgaggggctttgtaaaacattagtcagttgctcatttttatgggattgcttagctgggctgtaaagatgaaggcatcaaataaactcaaagtatttttaaatttttttgataatagagaaacttcgctaaccaactgttctttcttgagtgtatagccccatcttgtggtaacttgctgcttctgcacttcatatccatatttcctattgttcactttattctgtagagcagcctgccaagaattttatttctgctgttttttttgctgctaaagaaaggaactaagtcaggatgttaacagaaaagtccacataaccctagaattcttagtcaaggaataattcaagtcagcctagagaccatgttgactttcctcatgtgtttccttatgactcagtaagttggcaaggtcctgactttagtcttaataaaacattgaattgtagtaaaggtttttgcaataaaaacttactttgg

SEQ ID NO: 44 - DNA, 1858 bp, Mus sp.
  source 1..1858: mol_type = other DNA
attccggaggtgaaaaacaatggcacaacgtgtataatggccagcttctctgcctcctttctgaccacctacgagactgcgaatggttctcagatcgtgaacatttccctgccagcctctgcagaagtactgaaaaatggcagttcttgtggtaaagaaaatgtttctgaccccagcctcacaattacttttggaagaggatatttactgacactcaacttcacaaaaaatacaacacgttacagtgtccagcatatgtattttacatataacttgtcagatacagaacattttcccaatgccatcagcaaagagatctacaccatggattccacaactgacatcaaggcagacatcaacaaagcataccggtgtgtcagtgatatccgggtctacatgaagaatgtgaccgttgtgctccgggatgccactatccaggcctacctgtcgagtggcaacttcagcaaggaagagacacactgcacacaggatggaccttccccaaccactgggccacccagcccctcaccaccacttgtgcccacaaaccccactgtatccaagtacaatgttactggtaacaacggaacctgcctgctggcctctatggcactgcaactgaatatcacctacctgaaaaaggacaacaagacggtgaccagagcgttcaacatcagcccaaatgacacatctagtgggagttgcggtatcaacttggtgaccctgaaagtggagaacaagaacagagccctggaattgcagtttgggatgaatgccagctctagcctgtttttcttgcaaggagtgcgcttgaatatgactcttcctgatgccctagtgcccacattcagcatctccaaccattcactgaaagctcttcaggccactgtgggaaactcatacaagtgcaacactgaggaacacatctttgtcagcaagatgctctccctcaatgtcttcagtgtgcaggtccaggctttcaaggtggacagtgacaggtttgggtctgtggaagagtgtgttcaggatggtaacaacatgttgatccccattgctgtgggcggtgccctggcagggctgatcctcatcgtcctcattgcctacctcattggcaggaagaggagtcacgccggctatcagaccatctagcctggtgggcaggtgcaccagagatgcacaggggcctgttctcacatccccaagcttagataggtgtggaagggaggcacactttctggcaaactgttttaaaatctgctttatcaaatgtgaagttcatcttgcaacatttactatgcacaaaggaataactattgaaatgacggtgttaattttgctaactgggttaaatattgatgagaaggctccactgatttgacttttaagacttggtgtttggttcttcattcttttactcagatttaagcctatcaaagggatactctggtccagaccttggcctggcaagggtggctgatggttaggctgcacacacttaagaagcaacgggagcagggaaggcttgcacacaggcacgcacagggtcaacctctggacacttggcttgggctacctggccttgggggggctgaactctggcatctggctgggtacacacccccccaatttctgtgctctgccacccgtgagctgccactttcctaaatagaaaatggcattatttttatttacttttttgtaaagtgatttccagtcttgtgttggcgttcagggtggccctgtctctgcactgtgtacaataatagattcacactgctgacgtgtcttgcagcgtaggtgggttgtacactgggcatcagctcacgtaatgcattgcctgtaacgatgctaataaaaa

SEQ ID NO: 45 - DNA, 2339 bp, Homo sapiens
  source 1..2339: mol_type = other DNA
ggcccaaccgccgcccgcgcccccgctctccgcaccgtacccggccgcctcgcgccatggcggcccccggcagcgcccggcgacccctgctgctgctactgctgttgctgctgctcggcctcatgcattgtgcgtcagcagcaatgtttatggtgaaaaatggcaacgggaccgcgtgcataatggccaacttctctgctgccttctcagtgaactacgacaccaagagtggccctaagaacatgacctttgacctgccatcagatgccacagtggtgctcaaccgcagctcctgtggaaaagagaacacttctgaccccagtctcgtgattgcttttggaagaggacatacactcactctcaatttcacgagaaatgcaacacgttacagcgtccagctcatgagttttgtttataacttgtcagacacacaccttttccccaatgcgagctccaaagaaatcaagactgtggaatctataactgacatcagggcagatatagataaaaaatacagatgtgttagtggcacccaggtccacatgaacaacgtgaccgtaacgctccatgatgccaccatccaggcgtacctttccaacagcagcttcagcaggggagagacacgctgtgaacaagacaggccttccccaaccacagcgccccctgcgccacccagcccctcgccctcacccgtgcccaagagcccctctgtggacaagtacaacgtgagcggcaccaacgggacctgcctgctggccagcatggggctgcagctgaacctcacctatgagaggaaggacaacacgacggtgacaaggcttctcaacatcaaccccaacaagacctcggccagcgggagctgcggcgcccacctggtgactctggagctgcacagcgagggcaccaccgtcctgctcttccagttcgggatgaatgcaagttctagccggtttttcctacaaggaatccagttgaatacaattcttcctgacgccagagaccctgcctttaaagctgccaacggctccctgcgagcgctgcaggccacagtcggcaattcctacaagtgcaacgcggaggagcacgtccgtgtcacgaaggcgttttcagtcaatatattcaaagtgtgggtccaggctttcaaggtggaaggtggccagtttggctctgtggaggagtgtctgctggacgagaacagcatgctgatccccatcgctgtgggtggtgccctggcggggctggtcctcatcgtcctcatcgcctacctcgtcggcaggaagaggagtcacgcaggctaccagactatctagcctggtgcacgcaggcacagcagctgcaggggcctctgttcctttctctgggcttagggtcctgtcgaaggggaggcacactttctggcaaacgtttctcaaatctgcttcatccaatgtgaagttcatcttgcagcatttactatgcacaacagagtaactatcgaaatgacggtgttaattttgctaactgggttaaatattttgctaactggttaaacattaatatttaccaaagtaggattttgagggtgggggtgctctctctgagggggtgggggtgccgctgtctctgaggggtgggggtgccgctgtctctgaggggtgggggtgccgctctctctgagggggtgggggtgccgctttctctgagggggtgggggtgccgctctctctgagggggtgggggtgctgctctctccgaggggtggaatgccgctgtctctgaggggtgggggtgccgctctaaattggctccatatcatttgagtttagggttctggtgtttggtttcttcattctttactgcactcagatttaagccttacaaagggaaagcctctggccgtcacacgtaggacgcatgaaggtcactcgtggtgaggctgacatgctcacacattacaacagtagagagggaaaatcctaagacagaggaactccagagatgagtgtctggagcgcttcagttcagctttaaaggccaggacgggccacacgtggctggcggcctcgttccagtggcggcacgtccttgggcgtctctaatgtctgcagctcaagggctggcacttttttaaatataaaaatgggtgttatttttatttttttttgtaaagtgatttttggtcttctgttgacattcggggtgatcctgttctgcgctgtgtacaatgtgagatcggtgcgttctcctgatgttttgccgtggcttggggattgtacacgggaccagctcacgtaatgcattgcctgtaacaatgtaataaaaagcctctttcttttaaaaaaaaaaaaaaaaaaaaaaaa

SEQ ID NO: 46 - DNA, 45 bp, synthetic construct
  misc_feature 1..45: note = Description of Artificial Sequence: Synthetic oligonucleotide
  source 1..45: mol_type = other DNA
cagtacatcaaggccaacagcaagttcatcggcatcaccgaactc

SEQ ID NO: 47 - protein, 15 aa, synthetic construct
  REGION 1..15: note = Description of Artificial Sequence: Synthetic peptide
QYIKANSKFIGITEL

SEQ ID NO: 48 - DNA, 39 bp, synthetic construct
  misc_feature 1..39: note = Description of Artificial Sequence: Synthetic oligonucleotide
  source 1..39: mol_type = other DNA
gctaaatttgtggctgcctggacactgaaagccgccgct

SEQ ID NO: 49 - protein, 13 aa, synthetic construct
  REGION 1..13: note = Description of Artificial Sequence: Synthetic peptide
AKFVAAWTLKAAA

SEQ ID NO: 50 - DNA, 593 bp, Woodchuck hepatitis virus
  source 1..593: mol_type = other DNA
aatcaacctctggattacaaaatttgtgaaagattgactggtattcttaactatgttgctccttttacgctatgtggatacgctgctttaatgcctttgtatcatgctattgcttcccgtatggctttcattttctcctccttgtataaatcctggttgctgtctctttatgaggagttgtggcccgttgtcaggcaacgtggcgtggtgtgcactgtgtttgctgacgcaacccccactggttggggcattgccaccacctgtcagctcctttccgggactttcgctttccccctccctattgccacggcggaactcatcgccgcctgccttgcccgctgctggacaggggctcggctgttgggcactgacaattccgtggtgttgtcggggaagctgacgtcctttccatggctgctcgcctgtgttgccacctggattctgcgcgggacgtccttctgctacgtcccttcggccctcaatccagcggaccttccttcccgcggcctgctgccggctctgcggcctcttccgcgtcttcgccttcgccctcagacgagtcggatctccctttgggccgcctccccgcctgt

SEQ ID NO: 51 - DNA, 589 bp, synthetic construct
  misc_feature 1..589: note = Description of Artificial Sequence: Synthetic polynucleotide
  source 1..589: mol_type = other DNA
tctcccccccccccctctccctcccccccccctaacgttactggccgaagccgcttggaataaggccggtgtgcgtttgtctatatgttattttccaccatattgccgtcttttggcaatgtgagggcccggaaacctggccctgtcttcttgacgagcattcctaggggtctttcccctctcgccaaaggaatgcaaggtctgttgaatgtcgtgaaggaagcagttcctctggaagcttcttgaagacaaacaacgtctgtagcgaccctttgcaggcagcggaaccccccacctggcgacaggtgcctctgcggccaaaagccacgtgtataagatacacctgcaaaggcggcacaaccccagtgccacgttgtgagttggatagttgtggaaagagtcaaatggctctcctcaagcgtattcaacaaggggctgaaggatgcccagaaggtaccccattgtatgggatctgatctggggcctcggtgcacatgctttacatgtgtttagtcgaggttaaaaaaacgtctaggccccccgaaccacggggacgtggttttcctttgaaaaacacgatgataatatg

SEQ ID NO: 52 - DNA, 720 bp, synthetic construct
  misc_feature 1..720: note = Description of Artificial Sequence: Synthetic polynucleotide
  source 1..720: mol_type = other DNA
atggtgagcaagggcgaggagctgttcaccggggtggtgcccatcctggtcgagctggacggcgacgtaaacggccacaagttcagcgtgtccggcgagggcgagggcgatgccacctacggcaagctgaccctgaagttcatctgcaccaccggcaagctgcccgtgccctggcccaccctcgtgaccaccctgacctacggcgtgcagtgcttcagccgctaccccgaccacatgaagcagcacgacttcttcaagtccgccatgcccgaaggctacgtccaggagcgcaccatcttcttcaaggacgacggcaactacaagacccgcgccgaggtgaagttcgagggcgacaccctggtgaaccgcatcgagctgaagggcatcgacttcaaggaggacggcaacatcctggggcacaagctggagtacaactacaacagccacaacgtctatatcatggccgacaagcagaagaacggcatcaaggtgaacttcaagatccgccacaacatcgaggacggcagcgtgcagctcgccgaccactaccagcagaacacccccatcggcgacggccccgtgctgctgcccgacaaccactacctgagcacccagtccgccctgagcaaagaccccaacgagaagcgcgatcacatggtcctgctggagttcgtgaccgccgccgggatcactctcggcatggacgagctgtacaagtag

SEQ ID NO: 53 - DNA, 1563 bp, synthetic construct
  misc_feature 1..1563: note = Description of Artificial Sequence: Synthetic polynucleotide
  source 1..1563: mol_type = other DNA
atgctgctgctgctgctgctgctgggcctgaggctacagctctccctgggcatcatcccagttgaggaggagaacccggacttctggaaccgcgaggcagccgaggccctgggtgccgccaagaagctgcagcctgcacagacagccgccaagaacctcatcatcttcctgggcgatgggatgggggtgtctacggtgacagctgccaggatcctaaaagggcagaagaaggacaaactggggcctgagatacccctggccatggaccgcttcccatatgtggctctgtccaagacatacaatgtagacaaacatgtgccagacagtggagccacagccacggcctacctgtgcggggtcaagggcaacttccagaccattggcttgagtgcagccgcccgctttaaccagtgcaacacgacacgcggcaacgaggtcatctccgtgatgaatcgggccaagaaagcagggaagtcagtgggagtggtaaccaccacacgagtgcagcacgcctcgccagccggcacctacgcccacacggtgaaccgcaactggtactcggacgccgacgtgcctgcctcggcccgccaggaggggtgccaggacatcgctacgcagctcatctccaacatggacattgacgtgatcctaggtggaggccgaaagtacatgtttcgcatgggaaccccagaccctgagtacccagatgactacagccaaggtgggaccaggctggacgggaagaatctggtgcaggaatggctggcgaagcgccagggtgcccggtatgtgtggaaccgcactgagctcatgcaggcttccctggacccgtctgtgacccatctcatgggtctctttgagcctggagacatgaaatacgagatccaccgagactccacactggacccctccctgatggagatgacagaggctgccctgcgcctgctgagcaggaacccccgcggcttcttcctcttcgtggagggtggtcgcatcgaccatggtcatcatgaaagcagggcttaccgggcactgactgagacgatcatgttcgacgacgccattgagagggcgggccagctcaccagcgaggaggacacgctgagcctcgtcactgccgaccactcccacgtcttctccttcggaggctaccccctgcgagggagctccatcttcgggctggcccctggcaaggcccgggacaggaaggcctacacggtcctcctatacggaaacggtccaggctatgtgctcaaggacggcgcccggccggatgttaccgagagcgagagcgggagccccgagtatcggcagcagtcagcagtgcccctggacgaagagacccacgcaggcgaggacgtggcggtgttcgcgcgcggcccgcaggcgcacctggttcacggcgtgcaggagcagaccttcatagcgcacgtcatggccttcgccgcctgcctggagccctacaccgcctgcgacctggcgccccccgccggcaccaccgacgccgcgcacccgggttactctagagtcggggcggccggccgcttcgagcagacatgataa

SEQ ID NO: 54 - DNA, 1653 bp, synthetic construct
  misc_feature 1..1653: note = Description of Artificial Sequence: Synthetic polynucleotide
  source 1..1653: mol_type = other DNA
atggaagatgccaaaaacattaagaagggcccagcgccattctacccactcgaagacgggaccgccggcgagcagctgcacaaagccatgaagcgctacgccctggtgcccggcaccatcgcctttaccgacgcacatatcgaggtggacattacctacgccgagtacttcgagatgagcgttcggctggcagaagctatgaagcgctatgggctgaatacaaaccatcggatcgtggtgtgcagcgagaatagcttgcagttcttcatgcccgtgttgggtgccctgttcatcggtgtggctgtggccccagctaacgacatctacaacgagcgcgagctgctgaacagcatgggcatcagccagcccaccgtcgtattcgtgagcaagaaagggctgcaaaagatcctcaacgtgcaaaagaagctaccgatcatacaaaagatcatcatcatggatagcaagaccgactaccagggcttccaaagcatgtacaccttcgtgacttcccatttgccacccggcttcaacgagtacgacttcgtgcccgagagcttcgaccgggacaaaaccatcgccctgatcatgaacagtagtggcagtaccggattgcccaagggcgtagccctaccgcaccgcaccgcttgtgtccgattcagtcatgcccgcgaccccatcttcggcaaccagatcatccccgacaccgctatcctcagcgtggtgccatttcaccacggcttcggcatgttcaccacgctgggctacttgatctgcggctttcgggtcgtgctcatgtaccgcttcgaggaggagctattcttgcgcagcttgcaagactataagattcaatctgccctgctggtgcccacactatttagcttcttcgctaagagcactctcatcgacaagtacgacctaagcaacttgcacgagatcgccagcggcggggcgccgctcagcaaggaggtaggtgaggccgtggccaaacgcttccacctaccaggcatccgccagggctacggcctgacagaaacaaccagcgccattctgatcacccccgaaggggacgacaagcctggcgcagtaggcaaggtggtgcccttcttcgaggctaaggtggtggacttggacaccggtaagacactgggtgtgaaccagcgcggcgagctgtgcgtccgtggccccatgatcatgagcggctacgttaacaaccccgaggctacaaacgctctcatcgacaaggacggctggctgcacagcggcgacatcgcctactgggacgaggacgagcacttcttcatcgtggaccggctgaagagcctgatcaaatacaagggctaccaggtagccccagccgaactggagagcatcctgctgcaacaccccaacatcttcgacgccggggtcgccggcctgcccgacgacgatgccggcgagctgcccgccgcagtcgtcgtgctggaacacggtaaaaccatgaccgagaaggagatcgtggactatgtggccagccaggttacaaccgccaagaagctgcgcggtggtgttgtgttcgtggacgaggtgcctaaaggactgaccggcaagttggacgcccgcaagatccgcgagattctcattaaggccaagaagggcggcaagatcgccgtgtaa

SEQ ID NO: 55 - DNA, 66 bp, Foot-and-mouth disease virus
  source 1..66: mol_type = other DNA
gtaaagcaaacactgaactttgaccttctcaagttggctggagacgttgagtccaatcctgggccc

SEQ ID NO: 56 - protein, 5 aa, synthetic construct
  REGION 1..5: note = Description of Artificial Sequence: Synthetic peptide
GPGPG

SEQ ID NO: 57 - protein, 594 aa, synthetic construct
  REGION 1..594: note = Description of Artificial Sequence: Synthetic polypeptide
TSRTLSYYKLGASQRVAGDSGFAAYSRYRIGNYCAAGTTQTACTDDNALAYYNTTKGGWPQIAQFAPSASAFFGMSRIGMEVTPSGTWLTYTGAIKLDDKDPNPANNAAIVLQLPQGTTLPKGFYAEGGVPINTNSSPDDQIGYYRRATRRIRLYLYALVYFLQSINFVRIIMRLWLCSTDVVYRAFDIYNDKVAGFAKFLKTRQKRTATKAYNVTQAFGRRGPEQTQPYVCNAPGCDVTDVTQLYLGGMSYYACLVGLMWLSYFIASFRLFARTRSMWSFNPETNILLNVPLHGTILTRPLLESELVILLNKHIDAYKTFPPTEPKKDKKKKADETQALPQRQKKQQTVTVGDSAEVAVKMFDAYVNTFSSTFNVMDLFMRIFTIGTVTLKQGEIKDATPSDFVRATATIPIQASLPFGWLILLQFAYANRNRFLYIIKLIFLWLLWPVLAVFQSASKIITLKKRWQLALSKGVHFVCNLLLLHVMSKHTDFSSEIIGYKAIDGGVTRDCVVLHSYFTSDYYQLYSTQLSTDTGVEHVTFFIYNKIVDEPEEHVQIHTIDGSSGVCNIVNVSLVKPSFYVYSRVKNLNSSRVP

SEQ ID NO: 58 - protein, 640 aa, synthetic construct
  REGION 1..640: note = Description of Artificial Sequence: Synthetic polypeptide
MAGTSRTLSYYKLGASQRVAGDSGFAAYSRYRIGNYCAAGTTQTACTDDNALAYYNTTKGGWPQIAQFAPSASAFFGMSRIGMEVTPSGTWLTYTGAIKLDDKDPNPANNAAIVLQLPQGTTLPKGFYAEGGVPINTNSSPDDQIGYYRRATRRIRLYLYALVYFLQSINFVRIIMRLWLCSTDVVYRAFDIYNDKVAGFAKFLKTRQKRTATKAYNVTQAFGRRGPEQTQPYVCNAPGCDVTDVTQLYLGGMSYYACLVGLMWLSYFIASFRLFARTRSMWSFNPETNILLNVPLHGTILTRPLLESELVILLNKHIDAYKTFPPTEPKKDKKKKADETQALPQRQKKQQTVTVGDSAEVAVKMFDAYVNTFSSTFNVMDLFMRIFTIGTVTLKQGEIKDATPSDFVRATATIPIQASLPFGWLILLQFAYANRNRFLYIIKLIFLWLLWPVLAVFQSASKIITLKKRWQLALSKGVHFVCNLLLLHVMSKHTDFSSEIIGYKAIDGGVTRDCVVLHSYFTSDYYQLYSTQLSTDTGVEHVTFFIYNKIVDEPEEHVQIHTIDGSSGVCNIVNVSLVKPSFYVYSRVKNLNSSRVPGPGPGAKFVAAWTLKAAAGPGPGQYIKANSKFIGITELGPGPG

SEQ ID NO: 59 - protein, 1273 aa, Severe acute respiratory syndrome-related coronavirus
  source 1..1273: note = Severe acute respiratory syndrome coronavirus 2
MFVFLVLLPLVSSQCVNLTTRTQLPPAYTNSFTRGVYYPDKVFRSSVLHSTQDLFLPFFSNVTWFHAIHVSGTNGTKRFDNPVLPFNDGVYFASTEKSNIIRGWIFGTTLDSKTQSLLIVNNATNVVIKVCEFQFCNDPFLGVYYHKNNKSWMESEFRVYSSANNCTFEYVSQPFLMDLEGKQGNFKNLREFVFKNIDGYFKIYSKHTPINLVRDLPQGFSALEPLVDLPIGINITRFQTLLALHRSYLTPGDSSSGWTAGAAAYYVGYLQPRTFLLKYNENGTITDAVDCALDPLSETKCTLKSFTVEKGIYQTSNFRVQPTESIVRFPNITNLCPFGEVFNATRFASVYAWNRKRISNCVADYSVLYNSASFSTFKCYGVSPTKLNDLCFTNVYADSFVIRGDEVRQIAPGQTGKIADYNYKLPDDFTGCVIAWNSNNLDSKVGGNYNYLYRLFRKSNLKPFERDISTEIYQAGSTPCNGVEGFNCYFPLQSYGFQPTNGVGYQPYRVVVLSFELLHAPATVCGPKKSTNLVKNKCVNFNFNGLTGTGVLTESNKKFLPFQQFGRDIADTTDAVRDPQTLEILDITPCSFGGVSVITPGTNTSNQVAVLYQDVNCTEVPVAIHADQLTPTWRVYSTGSNVFQTRAGCLIGAEHVNNSYECDIPIGAGICASYQTQTNSPRRARSVASQSIIAYTMSLGAENSVAYSNNSIAIPTNFTISVTTEILPVSMTKTSVDCTMYICGDSTECSNLLLQYGSFCTQLNRALTGIAVEQDKNTQEVFAQVKQIYKTPPIKDFGGFNFSQILPDPSKPSKRSFIEDLLFNKVTLADAGFIKQYGDCLGDIAARDLICAQKFNGLTVLPPLLTDEMIAQYTSALLAGTITSGWTFGAGAALQIPFAMQMAYRFNGIGVTQNVLYENQKLIANQFNSAIGKIQDSLSSTASALGKLQDVVNQNAQALNTLVKQLSSNFGAISSVLNDILSRLDKVEAEVQIDRLITGRLQSLQTYVTQQLIRAAEIRASANLAATKMSECVLGQSKRVDFCGKGYHLMSFPQSAPHGVVFLHVTYVPAQEKNFTTAPAICHDGKAHFPREGVFVSNGTHWFVTQRNFYEPQIITTDNTFVSGNCDVVIGIVNNTVYDPLQPELDSFKEELDKYFKNHTSPDVDLGDISGINASVVNIQKEIDRLNEVAKNLNESLIDLQELGKYEQYIKWPWYIWLGFIAGLIAIVMVTIMLCCMTSCCSCLKGCCSCGSCCKFDEDDSEPVLKGVKLHYT

SEQ ID NO: 60 - protein, 1273 aa, synthetic construct
  REGION 1..1273: note = Description of Artificial Sequence: Synthetic polypeptide
MFVFLVLLPLVSSQCVNLTTRTQLPPAYTNSFTRGVYYPDKVFRSSVLHSTQDLFLPFFSNVTWFHAIHVSGTNGTKRFDNPVLPFNDGVYFASTEKSNIIRGWIFGTTLDSKTQSLLIVNNATNVVIKVCEFQFCNDPFLGVYYHKNNKSWMESEFRVYSSANNCTFEYVSQPFLMDLEGKQGNFKNLREFVFKNIDGYFKIYSKHTPINLVRDLPQGFSALEPLVDLPIGINITRFQTLLALHRSYLTPGDSSSGWTAGAAAYYVGYLQPRTFLLKYNENGTITDAVDCALDPLSETKCTLKSFTVEKGIYQTSNFRVQPTESIVRFPNITNLCPFGEVFNATRFASVYAWNRKRISNCVADYSVLYNSASFSTFKCYGVSPTKLNDLCFTNVYADSFVIRGDEVRQIAPGQTGKIADYNYKLPDDFTGCVIAWNSNNLDSKVGGNYNYLYRLFRKSNLKPFERDISTEIYQAGSTPCNGVEGFNCYFPLQSYGFQPTNGVGYQPYRVVVLSFELLHAPATVCGPKKSTNLVKNKCVNFNFNGLTGTGVLTESNKKFLPFQQFGRDIADTTDAVRDPQTLEILDITPCSFGGVSVITPGTNTSNQVAVLYQGVNCTEVPVAIHADQLTPTWRVYSTGSNVFQTRAGCLIGAEHVNNSYECDIPIGAGICASYQTQTNSPVRARSVASQSIIAYTMSLGAENSVAYSNNSIAIPTNFTISVTTEILPVSMTKTSVDCTMYICGDSTECSNLLLQYGSFCTQLNRALTGIAVEQDKNTQEVFAQVKQIYKTPPIKDFGGFNFSQILPDPSKPSKNSFIEDLLFNKVTLADAGFIKQYGDCLGDIAARDLICAQKFNGLTVLPPLLTDEMIAQYTSALLAGTITSGWTFGAGAALQIPFAMQMAYRFNGIGVTQNVLYENQKLIANQFNSAIGKIQDSLSSTASALGKLQDVVNQNAQALNTLVKQLSSNFGAISSVLNDILSRLDPPEAEVQIDRLITGRLQSLQTYVTQQLIRAAEIRASANLAATKMSECVLGQSKRVDFCGKGYHLMSFPQSAPHGVVFLHVTYVPAQEKNFTTAPAICHDGKAHFPREGVFVSNGTHWFVTQRNFYEPQIITTDNTFVSGNCDVVIGIVNNTVYDPLQPELDSFKEELDKYFKNHTSPDVDLGDISGINASVVNIQKEIDRLNEVAKNLNESLIDLQELGKYEQYIKWPWYIWLGFIAGLIAIVMVTIMLCCMTSCCSCLKGCCSCGSCCKFDEDDSEPVLKGVKLHYT

SEQ ID NO: 61 - protein, 222 aa, Severe acute respiratory syndrome-related coronavirus
  source 1..222: note = Severe acute respiratory syndrome coronavirus 2
MADSNGTITVEELKKLLEQWNLVIGFLFLTWICLLQFAYANRNRFLYIIKLIFLWLLWPVTLACFVLAAVYRINWITGGIAIAMACLVGLMWLSYFIASFRLFARTRSMWSFNPETNILLNVPLHGTILTRPLLESELVIGAVILRGHLRIAGHHLGRCDIKDLPKEITVATSRTLSYYKLGASQRVAGDSGFAAYSRYRIGNYKLNTDHSSSSDNIALLVQ

SEQ ID NO: 62 - protein, 419 aa, Severe acute respiratory syndrome-related coronavirus
  source 1..419: note = Severe acute respiratory syndrome coronavirus 2
MSDNGPQNQRNAPRITFGGPSDSTGSNQNGERSGARSKQRRPQGLPNNTASWFTALTQHGKEDLKFPRGQGVPINTNSSPDDQIGYYRRATRRIRGGDGKMKDLSPRWYFYYLGTGPEAGLPYGANKDGIIWVATEGALNTPKDHIGTRNPANNAAIVLQLPQGTTLPKGFYAEGSRGGSQASSRSSSRSRNSSRNSTPGSSRGTSPARMAGNGGDAALALLLLDRLNQLESKMSGKGQQQQGQTVTKKSAAEASKKPRQKRTATKAYNVTQAFGRRGPEQTQGNFGDQELIRQGTDYKHWPQIAQFAPSASAFFGMSRIGMEVTPSGTWLTYTGAIKLDDKDPNFKDQVILLNKHIDAYKTFPPTEPKKDKKKKADETQALPQRQKKQQTVTLLPAADLDDFSKQLQQSMSSADSTQA

SEQ ID NO: 63 - protein, 75 aa, Severe acute respiratory syndrome-related coronavirus
  source 1..75: note = Severe acute respiratory syndrome coronavirus 2
MYSFVSEETGTLIVNSVLLFLAFVVFLLVTLAILTALRLCAYCCNIVNVSLVKPSFYVYSRVKNLNSSRVPDLLV

SEQ ID NO: 64 - DNA, 1920 bp, synthetic construct
  misc_feature 1..1920: note = Description of Artificial Sequence: Synthetic polynucleotide
  source 1..1920: mol_type = other DNA
atggctggcacttcccgcaccttgtcctattacaaacttggcgcgagtcaacgggtggcgggtgactccggatttgcggcatattcacgatataggatcgggaattactgcgcagcaggtactacgcagactgcttgcacggatgataacgcgctggcctattacaatacaacaaaaggaggctggccccagatcgcccaattcgccccatcagccagtgctttcttcggcatgagtcgaatcggtatggaagtaacaccctccggcacatggcttacctacactggcgcgataaagctcgatgacaaagaccctaatcctgcgaataacgctgcaattgttctccagcttcctcagggtacgaccctgccaaaaggtttttacgcagagggcggcgtcccaatcaatacgaatagcagcccggacgatcaaataggatactacagaagggccacacggcggatcaggctgtacctctatgcgcttgtctatttcctccagagtattaatttcgtgaggatcatcatgcggttgtggctctgctctacagacgtagtatatcgagcttttgacatttacaatgacaaagtagccgggtttgccaaatttctcaaaaccagacagaagcggacggcaactaaggcttacaatgtgactcaggcgttcgggcggagaggtccggaacagacccaaccttatgtgtgcaatgcaccgggatgtgatgtcacagatgtgactcagctctaccttggagggatgtcctattatgcgtgtctcgtgggcctcatgtggttgtcctatttcatagcatcatttcgattgtttgctcgaacgaggtctatgtggtccttcaatcctgagacgaacatacttctgaatgtcccactccacggcaccatactgactcggccgctccttgaaagtgaactcgtaatcctccttaacaaacacatcgatgcctacaaaacgtttccaccaacggaaccgaagaaggataaaaagaagaaggccgatgaaacgcaggccctgccccaacgccaaaaaaagcagcagacggtcacggttggcgattctgccgaagtagctgtaaagatgtttgacgcctacgtcaatacattctcatcaacctttaatgtgatggatctgtttatgagaattttcactattggaaccgtcactcttaagcagggagaaatcaaagacgcgacaccatctgattttgttagggcaacagccactatccccatacaagccagcttgccatttggatggctgatccttctccaattcgcgtatgctaaccggaatcgctttctctacataataaagctgatcttcctttggcttctctggcccgttttggctgtattccagtcagccagtaagataataactctcaaaaagcggtggcagcttgcacttagtaaaggcgtccatttcgtctgcaatctccttttgctgcatgttatgtctaagcacacagactttagttcagagattattggatacaaagctattgatggtggtgttactagagattgtgtagttctccattcatacttcacgtcagattattatcaactctacagcacgcagctttccacggatacaggcgtagagcatgtgaccttcttcatctataataagatagtcgacgaacctgaggaacatgtccaaattcatacaattgatgggtcctccggcgtatgcaacatcgttaacgtgagccttgtcaaacctagcttctatgtctattctagggttaagaacctgaattcctccagggtccctggacccggaccaggcgccaaatttgttgctgcttggacactgaaagctgctgctgggcccggaccaggccagtacatcaaggccaactctaagtttatcggcatcaccgaattgggacctggacccggc

SEQ ID NO: 65 - DNA, 2305 bp, synthetic construct
  misc_feature 1..2305: note = Description of Artificial Sequence: Synthetic polynucleotide
  source 1..2305: mol_type = other DNA
gacattgattattgactagttgttaatagtaatcaattacggggtcattagttcatagcccatatatggagttccgcgttacataacttacggtaaatggcccgcctggctgaccgcccaacgacccccgcccattgacgtcaataatgacgtatgttcccatagtaacgccaatagggactttccattgacgtcaatgggtggagtatttacggtaaactgcccacttggcagtacatcaagtgtatcatatgccaagtccgccccctattgacgtcaatgacggtaaatggcccgcctggcattatgcccagtacatgaccttacgggactttcctacttggcagtacatctacgtattagtcatcgctattaccatggtgatgcggttttggcagtacaccaatgggcgtggatagcggtttgactcacggggatttccaagtctccaccccattgacgtcaatgggagtttgttttggcaccaaaatcaacgggactttccaaaatgtcgtaataaccccgccccgttgacgcaaatgggcggtaggcgtgtacggtgggaggtctatataagcagagctcgtttagtgaaccgtcagatcgcctggaacgccatccacgctgttttgacctccatagaagacagcgatcgcgccaccgccgggtttgccaaatttctcaaaaccagacagaagcggacggcaactaaggcttacaatgtgactcaggcgttcgggcggagaggtccggaacagacccaaccttatgtgtgcaatgcaccgggatgtgatgtcacagatgtgactcagctctaccttggagggatgtcctattatgcgtgtctcgtgggcctcatgtggttgtcctatttcatagcatcatttcgattgtttgctcgaacgaggtctatgtggtccttcaatcctgagacgaacatacttctgaatgtcccactccacggcaccatactgactcggccgctccttgaaagtgaactcgtaatcctccttaacaaacacatcgatgcctacaaaacgtttccaccaacggaaccgaagaaggataaaaagaagaaggccgatgaaacgcaggccctgccccaacgccaaaaaaagcagcagacggtcacggttggcgattctgccgaagtagctgtaaagatgtttgacgcctacgtcaatacattctcatcaacctttaatgtgatggatctgtttatgagaattttcactattggaaccgtcactcttaagcagggagaaatcaaagacgcgacaccatctgattttgttagggcaacagccactatccccatacaagccagcttgccatttggatggctgatccttctccaattcgcgtatgctaaccggaatcgctttctctacataataaagctgatcttcctttggcttctctggcccgttttggctgtattccagtcagccagtaagataataactctcaaaaagcggtggcagcttgcacttagtaaaggcgtccatttcgtctgcaatctccttttgctgcatgttatgtctaagcacacagactttagttcagagattattggatacaaagctattgatggtggtgttactagagattgtgtagttctccattcatacttcacgtcagattattatcaactctacagcacgcagctttccacggatacaggcgtagagcatgtgaccttcttcatctataataagatagtcgacgaacctgaggaacatgtccaaattcatacaattgatgggtcctccggcgtatgcaacatcgttaacgtgagccttgtcaaacctagcttctatgtctattctagggttaagaacctgaattcctccagggtccctggacccggaccaggcgccaaatttgttgctgcttggacactgaaagctgctgctgggcccggaccaggccagtacatcaaggccaactctaagtttatcggcatcaccgaattgggacctggacccggctagtgagtttaaactcccatttaaatgtgagggttaatgcttcgagcagagctcgctgatcagcctcgactgtgccttctagttgccagccatctgttgtttgcccctcccccgtgccttccttgaccctggaaggtgccactcccactgtcctttcctaataaaatgaggaaattgcatcgcattgtctgagtaggtgtcattctattctggggggtggggtggggcaggacagcaagggggaggattgggaagacaatagcaggcatgctggggatgcggtgggctctatggcttctgaggcggaaagaacc

SEQ ID NO: 66 - DNA, 5496 bp, synthetic construct
  misc_feature 1..5496: note = Description of Artificial Sequence: Synthetic polynucleotide
  source 1..5496: mol_type = other DNA
gacattgattattgactagttgttaatagtaatcaattacggggtcattagttcatagcccatatatggagttccgcgttacataacttacggtaaatggcccgcctggctgaccgcccaacgacccccgcccattgacgtcaataatgacgtatgttcccatagtaacgccaatagggactttccattgacgtcaatgggtggagtatttacggtaaactgcccacttggcagtacatcaagtgtatcatatgccaagtccgccccctattgacgtcaatgacggtaaatggcccgcctggcattatgcccagtacatgaccttacgggactttcctacttggcagtacatctacgtattagtcatcgctattaccatggtgatgcggttttggcagtacaccaatgggcgtggatagcggtttgactcacggggatttccaagtctccaccccattgacgtcaatgggagtttgttttggcaccaaaatcaacgggactttccaaaatgtcgtaataaccccgccccgttgacgcaaatgggcggtaggcgtgtacggtgggaggtctatataagcagagctcgtttagtgaaccgtcagatcgcctggaacgccatccacgctgttttgacctccatagaagacagcgatcgcgccaccatgtttgtctttctggtcctgcttcccctcgttagttctcagtgtgtgaacctcaccacacggacgcaactccctccagcttacacaaattcttttacgcgaggcgtgtattatccggataaagttttcaggtcctccgtcctgcactccacgcaggacctttttttgccgttcttttctaacgtaacatggtttcatgccattcatgtttccgggacaaacggtacgaaacgctttgataaccctgtgctgccgttcaatgatggcgtttactttgcctctacggaaaagagtaacataatccgaggctggatcttcgggaccaccctggatagcaagactcagagtcttctcatcgttaataacgctacaaacgttgttatcaaggtgtgtgaattccagttttgcaacgatccctttttgggggtatactatcacaaaaacaataaaagttggatggaatcagagtttcgcgtgtattcttctgcgaacaactgcacgtttgaatacgttagtcagccttttctcatggacttggaaggtaagcaggggaactttaaaaacttgcgggagttcgtttttaagaacatagatggttacttcaaaatttatagcaaacatacaccgatcaacctcgtgagagatctcccacagggtttttccgcactcgaaccgctcgtggatctgccgattggaattaacattacccgcttccagaccctgttggctctgcacagaagctatctgacgccaggggattccagcagtggatggacggcgggtgcggccgcgtattatgtaggctatctccaaccccgaacgttcttgctgaagtacaatgagaatgggaccattacggatgctgtggattgtgcattggatcctctctctgagacaaaatgcacccttaaaagcttcactgtagaaaagggtatttatcagactagcaacttccgcgtacaaccaacggagtctatcgttaggttccccaacattactaacttgtgcccatttggcgaagtgtttaacgcaactaggtttgctagtgtctatgcttggaatcgaaagagaataagcaattgtgtcgcagattactccgtattgtataattctgcaagcttttcaacattcaagtgctacggagtgtctcccaccaaattgaacgacctgtgttttactaacgtgtatgccgactctttcgttatccgaggcgatgaggtcaggcaaattgcccccggacaaactgggaaaattgcggattataattacaagcttccagacgactttacgggctgtgttatcgcatggaactccaacaatctcgacagcaaagtgggtggaaattataattatttgtatagattgtttcgcaagtccaacctgaagccattcgagagagacatctccaccgagatttatcaagccggctcaactccttgcaacggagtcgaaggcttcaactgttattttccgcttcagtcctatggttttcaacctacgaacggcgtgggataccagccgtatcgagtcgtggtactgtcctttgaacttttgcacgccccagcaactgtttgcggaccaaaaaagtccacaaatctcgtcaaaaacaagtgcgttaattttaattttaacgggcttacgggtactggtgtactgacggagtccaataagaaattcctgccattccaacagtttggacgggatattgctgatacgaccgacgctgtgcgagatccccagacacttgagatcctcgacataaccccctgtagttttggtggagtgtctgtaattacccccggaacgaacaccagcaaccaagttgcggtgctttatcaggatgttaattgcactgaggttcctgtcgcgatacatgccgaccaactgacgcctacatggcgagtatattcaacgggctccaacgtcttccagacgcgagccggttgtctcattggagctgaacatgtgaacaactcttatgaatgcgatataccaattggggcaggtatctgcgcctcttatcagacgcagactaactcacccagacgagcacggagcgtggcaagccaatccattattgcctacaccatgtccttgggagctgagaattcagtcgcctattctaataatagcattgctataccgacgaactttacaatttccgtaactaccgaaatattgcccgtcagtatgactaagactagcgttgactgcacaatgtacatttgcggcgatagtaccgaatgctctaatcttcttctgcagtatggtagtttttgtacacaactgaatcgagctctgactgggatcgcagtcgaacaggacaaaaatacacaggaagttttcgcgcaagtgaagcaaatctacaaaacgcctcccataaaagatttcggaggattcaatttcagtcagatactccctgatccctctaaaccatctaaacgatcctttatcgaagatttgctgttcaacaaggtgacccttgctgacgctggattcataaagcagtacggggattgtcttggcgatatcgcagcccgagaccttatttgtgcccaaaaatttaacggacttacggtactccctccccttctgactgacgaaatgatagcccagtacaccagtgctctgctggctggcaccataacgagcggatggacttttggtgcgggtgcagcactgcagatccccttcgcgatgcaaatggcatacaggtttaatgggattggggtcacccagaatgtattgtacgagaaccagaagcttatagcgaatcaatttaacagtgcaattggtaagattcaggacagcctttcaagtaccgcgagtgctctcgggaagttgcaggatgtagtaaatcaaaatgcgcaggcgctgaatacgttggttaaacagctcagcagtaattttggagcaatttctagcgtgctgaatgacatcctcagcagactcgataaggtggaggctgaggtacagatagatagactcatcacgggcagattgcagagtttgcagacatacgtcacgcaacaactcattcgagcagcagaaattagagcatccgcaaatctggcggccacgaaaatgtctgagtgcgttctggggcagtccaagagagttgacttttgtgggaaaggatatcatctgatgagttttccgcagtcagcgccacatggtgtggtctttctgcacgttacttatgtccccgcacaggagaagaattttacgaccgcgccagctatttgccatgacggtaaggctcacttcccgagggaaggggtattcgtttctaacggtacgcattggtttgttacgcaacggaacttttatgaaccacagattattaccaccgacaacacattcgtaagtggaaactgtgatgtcgttatcggaatagtaaataataccgtttatgacccccttcagcctgaacttgattccttcaaggaagagctcgataaatactttaagaaccacaccagccccgatgttgacctgggtgatatatctgggatcaacgcttctgtcgtcaacattcaaaaagagatcgatcgcctgaatgaggtggccaaaaacctcaatgaaagtctcattgaccttcaagaactcggtaagtacgagcaatacatcaagtggccatggtacatatggctgggcttcattgctgggttgatagctatagtgatggttacgataatgttgtgttgtatgacatcctgctgtagctgccttaaaggttgttgttcttgcggttcttgttgtaagtttgacgaagatgattcagagcctgttctgaaaggggtgaagctccattatactggcggttctggaggtgtccgtgctgaaggacgcgggtcccttctcacctgcggcgacgttgaggaaaaccctggccctatggctgacagcaatggtactattacggtggaagaactgaaaaagctcttggaacagtggaaccttgtgatcggttttctgtttttgacctggatttgcttgctccagttcgcctatgctaatagaaacaggtttctctatataatcaagttgatttttctgtggctgctctggcccgttacgcttgcgtgttttgtcctggctgctgtgtaccggatcaattggatcactggtggcattgctatcgccatggcttgtcttgtcgggctgatgtggctttcctattttatcgcttcatttaggctgtttgctcgaaccagatcaatgtggtcatttaatccagagactaatattctcttgaatgttccgctgcacggaactatcctcacacgacccctgttggagtccgaattggttatcggtgccgtaattctcaggggccaccttagaatcgcgggccaccatttgggacggtgcgatattaaagacctgcccaaagagatcacagtggccacaagtagaacgctctcatactataaactgggagcttcccagagagtggccggggatagtggcttcgcggcatatagtcgctaccgcatcggtaactataaacttaatacggaccatagtagctctagcgataacattgccttgctggttcagtgataagtttaaactcccatttaaatgtgagggttaatgcttcgagcagacatgataagatacattgatgagtttggacaaaccacaactagaatgcagtgaaaaaaatgctttatttgtgaaatttgtgatgctattgctttatttgtaaccattataagctgcaataaacaagttaacaacaacaattgcattcattttatgtttcaggttcagggggagatgtgggaggttttttaaagcaagtaaaacctctacaaatgtggtaaaa

SEQ ID NO: 67 - DNA, 5536 bp, synthetic construct
  misc_feature 1..5536: note = Description of Artificial Sequence: Synthetic polynucleotide
  source 1..5536: mol_type = other DNA
gacattgattattgactagttgttaatagtaatcaattacggggtcattagttcatagcccatatatggagttccgcgttacataacttacggtaaatggcccgcctggctgaccgcccaacgacccccgcccattgacgtcaataatgacgtatgttcccatagtaacgccaatagggactttccattgacgtcaatgggtggagtatttacggtaaactgcccacttggcagtacatcaagtgtatcatatgccaagtccgccccctattgacgtcaatgacggtaaatggcccgcctggcattatgcccagtacatgaccttacgggactttcctacttggcagtacatctacgtattagtcatcgctattaccatggtgatgcggttttggcagtacaccaatgggcgtggatagcggtttgactcacggggatttccaagtctccaccccattgacgtcaatgggagtttgttttggcaccaaaatcaacgggactttccaaaatgtcgtaataaccccgccccgttgacgcaaatgggcggtaggcgtgtacggtgggaggtctatataagcagagctcgtttagtgaaccgtcagatcgcctggaacgccatccacgctgttttgacctccatagaagacagcgatcgcgccaccatgtttgtctttctggtcctgcttcccctcgttagttctcagtgtgtgaacctcaccacacggacgcaactccctccagcttacacaaattcttttacgcgaggcgtgtattatccggataaagttttcaggtcctccgtcctgcactccacgcaggacctttttttgccgttcttttctaacgtaacatggtttcatgccattcatgtttccgggacaaacggtacgaaacgctttgataaccctgtgctgccgttcaatgatggcgtttactttgcctctacggaaaagagtaacataatccgaggctggatcttcgggaccaccctggatagcaagactcagagtcttctcatcgttaataacgctacaaacgttgttatcaaggtgtgtgaattccagttttgcaacgatccctttttgggggtatactatcacaaaaacaataaaagttggatggaatcagagtttcgcgtgtattcttctgcgaacaactgcacgtttgaatacgttagtcagccttttctcatggacttggaaggtaagcaggggaactttaaaaacttgcgggagttcgtttttaagaacatagatggttacttcaaaatttatagcaaacatacaccgatcaacctcgtgagagatctcccacagggtttttccgcactcgaaccgctcgtggatctgccgattggaattaacattacccgcttccagaccctgttggctctgcacagaagctatctgacgccaggggattccagcagtggatggacggcgggtgcggccgcgtattatgtaggctatctccaaccccgaacgttcttgctgaagtacaatgagaatgggaccattacggatgctgtggattgtgcattggatcctctctctgagacaaaatgcacccttaaaagcttcactgtagaaaagggtatttatcagactagcaacttccgcgtacaaccaacggagtctatcgttaggttccccaacattactaacttgtgcccatttggcgaagtgtttaacgcaactaggtttgctagtgtctatgcttggaatcgaaagagaataagcaattgtgtcgcagattactccgtattgtataattctgcaagcttttcaacattcaagtgctacggagtgtctcccaccaaattgaacgacctgtgttttactaacgtgtatgccgactctttcgttatccgaggcgatgaggtcaggcaaattgcccccggacaaactgggaaaattgcggattataattacaagcttccagacgactttacgggctgtgttatcgcatggaactccaacaatctcgacagcaaagtgggtggaaattataattatttgtatagattgtttcgcaagtccaacctgaagccattcgagagagacatctccaccgagatttatcaagccggctcaactccttgcaacggagtcgaaggcttcaactgttattttccgcttcagtcctatggttttcaacctacgaacggcgtgggataccagccgtatcgagtcgtggtactgtcctttgaacttttgcacgccccagcaactgtttgcggaccaaaaaagtccacaaatctcgtcaaaaacaagtgcgttaattttaattttaacgggcttacgggtactggtgtactgacggagtccaataagaaattcctgccattccaacagtttggacgggatattgctgatacgaccgacgctgtgcgagatccccagacacttgagatcctcgacataaccccctgtagttttggtggagtgtctgtaattacccccggaacgaacaccagcaaccaagttgcggtgctttatcaggatgttaattgcactgaggttcctgtcgcgatacatgccgaccaactgacgcctacatggcgagtatattcaacgggctccaacgtcttccagacgcgagccggttgtctcattggagctgaacatgtgaacaactcttatgaatgcgatataccaattggggcaggtatctgcgcctcttatcagacgcagactaactcacccagacgagcacggagcgtggcaagccaatccattattgcctacaccatgtccttgggagctgagaattcagtcgcctattctaataatagcattgctataccgacgaactttacaatttccgtaactaccgaaatattgcccgtcagtatgactaagactagcgttgactgcacaatgtacatttgcggcgatagtaccgaatgctctaatcttcttctgcagtatggtagtttttgtacacaactgaatcgagctctgactgggatcgcagtcgaacaggacaaaaatacacaggaagttttcgcgcaagtgaagcaaatctacaaaacgcctcccataaaagatttcggaggattcaatttcagtcagatactccctgatccctctaaaccatctaaacgatcctttatcgaagatttgctgttcaacaaggtgacccttgctgacgctggattcataaagcagtacggggattgtcttggcgatatcgcagcccgagaccttatttgtgcccaaaaatttaacggacttacggtactccctccccttctgactgacgaaatgatagcccagtacaccagtgctctgctggctggcaccataacgagcggatggacttttggtgcgggtgcagcactgcagatccccttcgcgatgcaaatggcatacaggtttaatgggattggggtcacccagaatgtattgtacgagaaccagaagcttatagcgaatcaatttaacagtgcaattggtaagattcaggacagcctttcaagtaccgcgagtgctctcgggaagttgcaggatgtagtaaatcaaaatgcgcaggcgctgaatacgttggttaaacagctcagcagtaattttggagcaatttctagcgtgctgaatgacatcctcagcagactcgataaggtggaggctgaggtacagatagatagactcatcacgggcagattgcagagtttgcagacatacgtcacgcaacaactcattcgagcagcagaaattagagcatccgcaaatctggcggccacgaaaatgtctgagtgcgttctggggcagtccaagagagttgacttttgtgggaaaggatatcatctgatgagttttccgcagtcagcgccacatggtgtggtctttctgcacgttacttatgtccccgcacaggagaagaattttacgaccgcgccagctatttgccatgacggtaaggctcacttcccgagggaaggggtattcgtttctaacggtacgcattggtttgttacgcaacggaacttttatgaaccacagattattaccaccgacaacacattcgtaagtggaaactgtgatgtcgttatcggaatagtaaataataccgtttatgacccccttcagcctgaacttgattccttcaaggaagagctcgataaatactttaagaaccacaccagccccgatgttgacctgggtgatatatctgggatcaacgcttctgtcgtcaacattcaaaaagagatcgatcgcctgaatgaggtggccaaaaacctcaatgaaagtctcattgaccttcaagaactcggtaagtacgagcaatacatcaagtggccatggtacatatggctgggcttcattgctgggttgatagctatagtgatggttacgataatgttgtgttgtatgacatcctgctgtagctgccttaaaggttgttgttcttgcggttcttgttgtaagtttgacgaagatgattcagagcctgttctgaaaggggtgaagctccattatactggcggttctggaggtgtccgtgctgaaggacgcgggtcccttctcacctgcggcgacgttgaggaaaaccctggccctatggctgacagcaatggtactattacggtggaagaactgaaaaagctcttggaacagtggaaccttgtgatcggttttctgtttttgacctggatttgcttgctccagttcgcctatgctaatagaaacaggtttctctatataatcaagttgatttttctgtggctgctctggcccgttacgcttgcgtgttttgtcctggctgctgtgtaccggatcaattggatcactggtggcattgctatcgccatggcttgtcttgtcgggctgatgtggctttcctattttatcgcttcatttaggctgtttgctcgaaccagatcaatgtggtcatttaatccagagactaatattctcttgaatgttccgctgcacggaactatcctcacacgacccctgttggagtccgaattggttatcggtgccgtaattctcaggggccaccttagaatcgcgggccaccatttgggacggtgcgatattaaagacctgcccaaagagatcacagtggccacaagtagaacgctctcatactataaactgggagcttcccagagagtggccggggatagtggcttcgcggcatatagtcgctaccgcatcggtaactataaacttaatacggaccatagtagctctagcgataacattgccttgctggttcagtgagtttaaactcccatttaaatgtgagggttaatgcttcgagcagagctcgctgatcagcctcgactgtgccttctagttgccagccatctgttgtttgcccctcccccgtgccttccttgaccctggaaggtgccactcccactgtcctttcctaataaaatgaggaaattgcatcgcattgtctgagtaggtgtcattctattctggggggtggggtggggcaggacagcaagggggaggattgggaagacaatagcaggcatgctggggatgcggtgggctctatggcttctgaggcggaaagaacc

SEQ ID NO: 68 - DNA, 7631 bp, synthetic construct
  misc_feature 1..7631: note = Description of Artificial Sequence: Synthetic polynucleotide
  source 1..7631: mol_type = other DNA
gacattgattattgactagttgttaatagtaatcaattacggggtcattagttcatagcccatatatggagttccgcgttacataacttacggtaaatggcccgcctggctgaccgcccaacgacccccgcccattgacgtcaataatgacgtatgttcccatagtaacgccaatagggactttccattgacgtcaatgggtggagtatttacggtaaactgcccacttggcagtacatcaagtgtatcatatgccaagtccgccccctattgacgtcaatgacggtaaatggcccgcctggcattatgcccagtacatgaccttacgggactttcctacttggcagtacatctacgtattagtcatcgctattaccatggtgatgcggttttggcagtacaccaatgggcgtggatagcggtttgactcacggggatttccaagtctccaccccattgacgtcaatgggagtttgttttggcaccaaaatcaacgggactttccaaaatgtcgtaataaccccgccccgttgacgcaaatgggcggtaggcgtgtacggtgggaggtctatataagcagagctcgtttagtgaaccgtcagatcgcctggaacgccatccacgctgttttgacctccatagaagacagcgatcgcgccaccatgtttgtctttctggtcctgcttcccctcgttagttctcagtgtgtgaacctcaccacacggacgcaactccctccagcttacacaaattcttttacgcgaggcgtgtattatccggataaagttttcaggtcctccgtcctgcactccacgcaggacctttttttgccgttcttttctaacgtaacatggtttcatgccattcatgtttccgggacaaacggtacgaaacgctttgataaccctgtgctgccgttcaatgatggcgtttactttgcctctacggaaaagagtaacataatccgaggctggatcttcgggaccaccctggatagcaagactcagagtcttctcatcgttaataacgctacaaacgttgttatcaaggtgtgtgaattccagttttgcaacgatccctttttgggggtatactatcacaaaaacaataaaagttggatggaatcagagtttcgcgtgtattcttctgcgaacaactgcacgtttgaatacgttagtcagccttttctcatggacttggaaggtaagcaggggaactttaaaaacttgcgggagttcgtttttaagaacatagatggttacttcaaaatttatagcaaacatacaccgatcaacctcgtgagagatctcccacagggtttttccgcactcgaaccgctcgtggatctgccgattggaattaacattacccgcttccagaccctgttggctctgcacagaagctatctgacgccaggggattccagcagtggatggacggcgggtgcggccgcgtattatgtaggctatctccaaccccgaacgttcttgctgaagtacaatgagaatgggaccattacggatgctgtggattgtgcattggatcctctctctgagacaaaatgcacccttaaaagcttcactgtagaaaagggtatttatcagactagcaacttccgcgtacaaccaacggagtctatcgttaggttccccaacattactaacttgtgcccatttggcgaagtgtttaacgcaactaggtttgctagtgtctatgcttggaatcgaaagagaataagcaattgtgtcgcagattactccgtattgtataattctgcaagcttttcaacattcaagtgctacggagtgtctcccaccaaattgaacgacctgtgttttactaacgtgtatgccgactctttcgttatccgaggcgatgaggtcaggcaaattgcccccggacaaactgggaaaattgcggattataattacaagcttccagacgactttacgggctgtgttatcgcatggaactccaacaatctcgacagcaaagtgggtggaaattataattatttgtatagattgtttcgcaagtccaacctgaagccattcgagagagacatctccaccgagatttatcaagccggctcaactccttgcaacggagtcgaaggcttcaactgttattttccgcttcagtcctatggttttcaacctacgaacggcgtgggataccagccgtatcgagtcgtggtactgtcctttgaacttttgcacgccccagcaactgtttgcggaccaaaaaagtccacaaatctcgtcaaaaacaagtgcgttaattttaattttaacgggcttacgggtactggtgtactgacggagtccaataagaaattcctgccattccaacagtttggacgggatattgctgatacgaccgacgctgtgcgagatccccagacacttgagatcctcgacataaccccctgtagttttggtggagtgtctgtaattacccccggaacgaacaccagcaaccaagttgcggtgctttatcaggatgttaattgcactgaggttcctgtcgcgatacatgccgaccaactgacgcctacatggcgagtatattcaacgggctccaacgtcttccagacgcgagccggttgtctcattggagctgaacatgtgaacaactcttatgaatgcgatataccaattggggcaggtatctgcgcctcttatcagacgcagactaactcacccagacgagcacggagcgtggcaagccaatccattattgcctacaccatgtccttgggagctgagaattcagtcgcctattctaataatagcattgctataccgacgaactttacaatttccgtaactaccgaaatattgcccgtcagtatgactaagactagcgttgactgcacaatgtacatttgcggcgatagtaccgaatgctctaatcttcttctgcagtatggtagtttttgtacacaactgaatcgagctctgactgggatcgcagtcgaacaggacaaaaatacacaggaagttttcgcgcaagtgaagcaaatctacaaaacgcctcccataaaagatttcggaggattcaatttcagtcagatactccctgatccctctaaaccatctaaacgatcctttatcgaagatttgctgttcaacaaggtgacccttgctgacgctggattcataaagcagtacggggattgtcttggcgatatcgcagcccgagaccttatttgtgcccaaaaatttaacggacttacggtactccctccccttctgactgacgaaatgatagcccagtacaccagtgctctgctggctggcaccataacgagcggatggacttttggtgcgggtgcagcactgcagatccccttcgcgatgcaaatggcatacaggtttaatgggattggggtcacccagaatgtattgtacgagaaccagaagcttatagcgaatcaatttaacagtgcaattggtaagattcaggacagcctttcaagtaccgcgagtgctctcgggaagttgcaggatgtagtaaatcaaaatgcgcaggcgctgaatacgttggttaaacagctcagcagtaattttggagcaatttctagcgtgctgaatgacatcctcagcagactcgataaggtggaggctgaggtacagatagatagactcatcacgggcagattgcagagtttgcagacatacgtcacgcaacaactcattcgagcagcagaaattagagcatccgcaaatctggcggccacgaaaatgtctgagtgcgttctggggcagtccaagagagttgacttttgtgggaaaggatatcatctgatgagttttccgcagtcagcgccacatggtgtggtctttctgcacgttacttatgtccccgcacaggagaagaattttacgaccgcgccagctatttgccatgacggtaaggctcacttcccgagggaaggggtattcgtttctaacggtacgcattggtttgttacgcaacggaacttttatgaaccacagattattaccaccgacaacacattcgtaagtggaaactgtgatgtcgttatcggaatagtaaataataccgtttatgacccccttcagcctgaacttgattccttcaaggaagagctcgataaatactttaagaaccacaccagccccgatgttgacctgggtgatatatctgggatcaacgcttctgtcgtcaacattcaaaaagagatcgatcgcctgaatgaggtggccaaaaacctcaatgaaagtctcattgaccttcaagaactcggtaagtacgagcaatacatcaagtggccatggtacatatggctgggcttcattgctgggttgatagctatagtgatggttacgataatgttgtgttgtatgacatcctgctgtagctgccttaaaggttgttgttcttgcggttcttgttgtaagtttgacgaagatgattcagagcctgttctgaaaggggtgaagctccattatacttgatgggtttaaactcccatttaaatgtgagggttaatgcttcgagcagacatgataagatacattgatgagtttggacaaaccacaactagaatgcagtgaaaaaaatgctttatttgtgaaatttgtgatgctattgctttatttgtaaccattataagctgcaataaacaagttaacaacaacaattgcattcattttatgtttcaggttcagggggagatgtgggaggttttttaaagcaagtaaaacctctacaaatgtggtaaaataactataacggtcctaaggtagcgagacattgattattgactagttgttaatagtaatcaattacggggtcattagttcatagcccatatatggagttccgcgttacataacttacggtaaatggcccgcctggctgaccgcccaacgacccccgcccattgacgtcaataatgacgtatgttcccatagtaacgccaatagggactttccattgacgtcaatgggtggagtatttacggtaaactgcccacttggcagtacatcaagtgtatcatatgccaagtccgccccctattgacgtcaatgacggtaaatggcccgcctggcattatgcccagtacatgaccttacgggactttcctacttggcagtacatctacgtattagtcatcgctattaccatggtgatgcggttttggcagtacaccaatgggcgtggatagcggtttgactcacggggatttccaagtctccaccccattgacgtcaatgggagtttgttttggcaccaaaatcaacgggactttccaaaatgtcgtaataaccccgccccgttgacgcaaatgggcggtaggcgtgtacggtgggaggtctatataagcagagctcgtttagtgaaccgtcagatcgcctggaacgccatccacgctgttttgacctccatagaagacagcgatcgcgccaccatggctggcacttcccgcaccttgtcctattacaaacttggcgcgagtcaacgggtggcgggtgactccggatttgcggcatattcacgatataggatcgggaattactgcgcagcaggtactacgcagactgcttgcacggatgataacgcgctggcctattacaatacaacaaaaggaggctggccccagatcgcccaattcgccccatcagccagtgctttcttcggcatgagtcgaatcggtatggaagtaacaccctccggcacatggcttacctacactggcgcgataaagctcgatgacaaagaccctaatcctgcgaataacgctgcaattgttctccagcttcctcagggtacgaccctgccaaaaggtttttacgcagagggcggcgtcccaatcaatacgaatagcagcccggacgatcaaataggatactacagaagggccacacggcggatcaggctgtacctctatgcgcttgtctatttcctccagagtattaatttcgtgaggatcatcatgcggttgtggctctgctctacagacgtagtatatcgagcttttgacatttacaatgacaaagtagccgggtttgccaaatttctcaaaaccagacagaagcggacggcaactaaggcttacaatgtgactcaggcgttcgggcggagaggtccggaacagacccaaccttatgtgtgcaatgcaccgggatgtgatgtcacagatgtgactcagctctaccttggagggatgtcctattatgcgtgtctcgtgggcctcatgtggttgtcctatttcatagcatcatttcgattgtttgctcgaacgaggtctatgtggtccttcaatcctgagacgaacatacttctgaatgtcccactccacggcaccatactgactcggccgctccttgaaagtgaactcgtaatcctccttaacaaacacatcgatgcctacaaaacgtttccaccaacggaaccgaagaaggataaaaagaagaaggccgatgaaacgcaggccctgccccaacgccaaaaaaagcagcagacggtcacggttggcgattctgccgaagtagctgtaaagatgtttgacgcctacgtcaatacattctcatcaacctttaatgtgatggatctgtttatgagaattttcactattggaaccgtcactcttaagcagggagaaatcaaagacgcgacaccatctgattttgttagggcaacagccactatccccatacaagccagcttgccatttggatggctgatccttctccaattcgcgtatgctaaccggaatcgctttctctacataataaagctgatcttcctttggcttctctggcccgttttggctgtattccagtcagccagtaagataataactctcaaaaagcggtggcagcttgcacttagtaaaggcgtccatttcgtctgcaatctccttttgctgcatgttatgtctaagcacacagactttagttcagagattattggatacaaagctattgatggtggtgttactagagattgtgtagttctccattcatacttcacgtcagattattatcaactctacagcacgcagctttccacggatacaggcgtagagcatgtgaccttcttcatctataataagatagtcgacgaacctgaggaacatgtccaaattcatacaattgatgggtcctccggcgtatgcaacatcgttaacgtgagccttgtcaaacctagcttctatgtctattctagggttaagaacctgaattcctccagggtccctggacccggaccaggcgccaaatttgttgctgcttggacactgaaagctgctgctgggcccggaccaggccagtacatcaaggccaactctaagtttatcggcatcaccgaattgggacctggacccggctagtgagtttaaactcccatttaaatgtgagggttaatgcttcgagcagacatgataagatacattgatgagtttggacaaaccacaactagaatgcagtgaaaaaaatgctttatttgtgaaatttgtgatgctattgctttatttgtaaccattataagctgcaataaacaagttaacaacaacaattgcattcattttatgtttcaggttcagggggagatgtgggaggttttttaaagcaagtaaaacctctacaaatgtggtaaaa

SEQ ID NO: 69 - DNA, 4752 bp, synthetic construct
  misc_feature 1..4752: note = Description of Artificial Sequence: Synthetic polynucleotide
  source 1..4752: mol_type = other DNA
gacattgattattgactagttgttaatagtaatcaattacggggtcattagttcatagcccatatatggagttccgcgttacataacttacggtaaatggcccgcctggctgaccgcccaacgacccccgcccattgacgtcaataatgacgtatgttcccatagtaacgccaatagggactttccattgacgtcaatgggtggagtatttacggtaaactgcccacttggcagtacatcaagtgtatcatatgccaagtccgccccctattgacgtcaatgacggtaaatggcccgcctggcattatgcccagtacatgaccttacgggactttcctacttggcagtacatctacgtattagtcatcgctattaccatggtgatgcggttttggcagtacaccaatgggcgtggatagcggtttgactcacggggatttccaagtctccaccccattgacgtcaatgggagtttgttttggcaccaaaatcaacgggactttccaaaatgtcgtaataaccccgccccgttgacgcaaatgggcggtaggcgtgtacggtgggaggtctatataagcagagctcgtttagtgaaccgtcagatcgcctggaacgccatccacgctgttttgacctccatagaagacagcgatcgcgccaccatgtttgtctttctggtcctgcttcccctcgttagttctcagtgtgtgaacctcaccacacggacgcaactccctccagcttacacaaattcttttacgcgaggcgtgtattatccggataaagttttcaggtcctccgtcctgcactccacgcaggacctttttttgccgttcttttctaacgtaacatggtttcatgccattcatgtttccgggacaaacggtacgaaacgctttgataaccctgtgctgccgttcaatgatggcgtttactttgcctctacggaaaagagtaacataatccgaggctggatcttcgggaccaccctggatagcaagactcagagtcttctcatcgttaataacgctacaaacgttgttatcaaggtgtgtgaattccagttttgcaacgatccctttttgggggtatactatcacaaaaacaataaaagttggatggaatcagagtttcgcgtgtattcttctgcgaacaactgcacgtttgaatacgttagtcagccttttctcatggacttggaaggtaagcaggggaactttaaaaacttgcgggagttcgtttttaagaacatagatggttacttcaaaatttatagcaaacatacaccgatcaacctcgtgagagatctcccacagggtttttccgcactcgaaccgctcgtggatctgccgattggaattaacattacccgcttccagaccctgttggctctgcacagaagctatctgacgccaggggattccagcagtggatggacggcgggtgcggccgcgtattatgtaggctatctccaaccccgaacgttcttgctgaagtacaatgagaatgggaccattacggatgctgtggattgtgcattggatcctctctctgagacaaaatgcacccttaaaagcttcactgtagaaaagggtatttatcagactagcaacttccgcgtacaaccaacggagtctatcgttaggttccccaacattactaacttgtgcccatttggcgaagtgtttaacgcaactaggtttgctagtgtctatgcttggaatcgaaagagaataagcaattgtgtcgcagattactccgtattgtataattctgcaagcttttcaacattcaagtgctacggagtgtctcccaccaaattgaacgacctgtgttttactaacgtgtatgccgactctttcgttatccgaggcgatgaggtcaggcaaattgcccccggacaaactgggaaaattgcggattataattacaagcttccagacgactttacgggctgtgttatcgcatggaactccaacaatctcgacagcaaagtgggtggaaattataattatttgtatagattgtttcgcaagtccaacctgaagccattcgagagagacatctccaccgagatttatcaagccggctcaactccttgcaacggagtcgaaggcttcaactgttattttccgcttcagtcctatggttttcaacctacgaacggcgtgggataccagccgtatcgagtcgtggtactgtcctttgaacttttgcacgccccagcaactgtttgcggaccaaaaaagtccacaaatctcgtcaaaaacaagtgcgttaattttaattttaacgggcttacgggtactggtgtactgacggagtccaataagaaattcctgccattccaacagtttggacgggatattgctgatacgaccgacgctgtgcgagatccccagacacttgagatcctcgacataaccccctgtagttttggtggagtgtctgtaattacccccggaacgaacaccagcaaccaagttgcggtgctttatcaggatgttaattgcactgaggttcctgtcgcgatacatgccgaccaactgacgcctacatggcgagtatattcaacgggctccaacgtcttccagacgcgagccggttgtctcattggagctgaacatgtgaacaactcttatgaatgcgatataccaattggggcaggtatctgcgcctcttatcagacgcagactaactcacccagacgagcacggagcgtggcaagccaatccattattgcctacaccatgtccttgggagctgagaattcagtcgcctattctaataatagcattgctataccgacgaactttacaatttccgtaactaccgaaatattgcccgtcagtatgactaagactagcgttgactgcacaatgtacatttgcggcgatagtaccgaatgctctaatcttcttctgcagtatggtagtttttgtacacaactgaatcgagctctgactgggatcgcagtcgaacaggacaaaaatacacaggaagttttcgcgcaagtgaagcaaatctacaaaacgcctcccataaaagatttcggaggattcaatttcagtcagatactccctgatccctctaaaccatctaaacgatcctttatcgaagatttgctgttcaacaaggtgacccttgctgacgctggattcataaagcagtacggggattgtcttggcgatatcgcagcccgagaccttatttgtgcccaaaaatttaacggacttacggtactccctccccttctgactgacgaaatgatagcccagtacaccagtgctctgctggctggcaccataacgagcggatggacttttggtgcgggtgcagcactgcagatccccttcgcgatgcaaatggcatacaggtttaatgggattggggtcacccagaatgtattgtacgagaaccagaagcttatagcgaatcaatttaacagtgcaattggtaagattcaggacagcctttcaagtaccgcgagtgctctcgggaagttgcaggatgtagtaaatcaaaatgcgcaggcgctgaatacgttggttaaacagctcagcagtaattttggagcaatttctagcgtgctgaatgacatcctcagcagactcgataaggtggaggctgaggtacagatagatagactcatcacgggcagattgcagagtttgcagacatacgtcacgcaacaactcattcgagcagcagaaattagagcatccgcaaatctggcggccacgaaaatgtctgagtgcgttctggggcagtccaagagagttgacttttgtgggaaaggatatcatctgatgagttttccgcagtcagcgccacatggtgtggtctttctgcacgttacttatgtccccgcacaggagaagaattttacgaccgcgccagctatttgccatgacggtaaggctcacttcccgagggaaggggtattcgtttctaacggtacgcattggtttgttacgcaacggaacttttatgaaccacagattattaccaccgacaacacattcgtaagtggaaactgtgatgtcgttatcggaatagtaaataataccgtttatgacccccttcagcctgaacttgattccttcaaggaagagctcgataaatactttaagaaccacaccagccccgatgttgacctgggtgatatatctgggatcaacgcttctgtcgtcaacattcaaaaagagatcgatcgcctgaatgaggtggccaaaaacctcaatgaaagtctcattgaccttcaagaactcggtaagtacgagcaatacatcaagtggccatggtacatatggctgggcttcattgctgggttgatagctatagtgatggttacgataatgttgtgttgtatgacatcctgctgtagctgccttaaaggttgttgttcttgcggttcttgttgtaagtttgacgaagatgattcagagcctgttctgaaaggggtgaagctccattatacttgatgggtttaaactcccatttaaatgtgagggttaatgcttcgagcagacatgataagatacattgatgagtttggacaaaccacaactagaatgcagtgaaaaaaatgctttatttgtgaaatttgtgatgctattgctttatttgtaaccattataagctgcaataaacaagttaacaacaacaattgcattcattttatgtttcaggttcagggggagatgtgggaggttttttaaagcaagtaaaacctctacaaatgtggtaaaa

SEQ ID NO: 70 - DNA, 4752 bp, synthetic construct
  misc_feature 1..4752: note = Description of Artificial Sequence: Synthetic polynucleotide
  source 1..4752: mol_type = other DNA
gacattgattattgactagttgttaatagtaatcaattacggggtcattagttcatagcccatatatggagttccgcgttacataacttacggtaaatggcccgcctggctgaccgcccaacgacccccgcccattgacgtcaataatgacgtatgttcccatagtaacgccaatagggactttccattgacgtcaatgggtggagtatttacggtaaactgcccacttggcagtacatcaagtgtatcatatgccaagtccgccccctattgacgtcaatgacggtaaatggcccgcctggcattatgcccagtacatgaccttacgggactttcctacttggcagtacatctacgtattagtcatcgctattaccatggtgatgcggttttggcagtacaccaatgggcgtggatagcggtttgactcacggggatttccaagtctccaccccattgacgtcaatgggagtttgttttggcaccaaaatcaacgggactttccaaaatgtcgtaataaccccgccccgttgacgcaaatgggcggtaggcgtgtacggtgggaggtctatataagcagagctcgtttagtgaaccgtcagatcgcctggaacgccatccacgctgttttgacctccatagaagacagcgatcgcgccaccatgtttgtctttctggtcctgcttcccctcgttagttctcagtgtgtgaacctcaccacacggacgcaactccctccagcttacacaaattcttttacgcgaggcgtgtattatccggataaagttttcaggtcctccgtcctgcactccacgcaggacctttttttgccgttcttttctaacgtaacatggtttcatgccattcatgtttccgggacaaacggtacgaaacgctttgataaccctgtgctgccgttcaatgatggcgtttactttgcctctacggaaaagagtaacataatccgaggctggatcttcgggaccaccctggatagcaagactcagagtcttctcatcgttaataacgctacaaacgttgttatcaaggtgtgtgaattccagttttgcaacgatccctttttgggggtatactatcacaaaaacaataaaagttggatggaatcagagtttcgcgtgtattcttctgcgaacaactgcacgtttgaatacgttagtcagccttttctcatggacttggaaggtaagcaggggaactttaaaaacttgcgggagttcgtttttaagaacatagatggttacttcaaaatttatagcaaacatacaccgatcaacctcgtgagagatctcccacagggtttttccgcactcgaaccgctcgtggatctgccgattggaattaacattacccgcttccagaccctgttggctctgcacagaagctatctgacgccaggggattccagcagtggatggacggcgggtgcggccgcgtattatgtaggctatctccaaccccgaacgttcttgctgaagtacaatgagaatgggaccattacggatgctgtggattgtgcattggatcctctctctgagacaaaatgcacccttaaaagcttcactgtagaaaagggtatttatcagactagcaacttccgcgtacaaccaacggagtctatcgttaggttccccaacattactaacttgtgcccatttggcgaagtgtttaacgcaactaggtttgctagtgtctatgcttggaatcgaaagagaataagcaattgtgtcgcagattactccgtattgtataattctgcaagcttttcaacattcaagtgctacggagtgtctcccaccaaattgaacgacctgtgttttactaacgtgtatgccgactctttcgttatccgaggcgatgaggtcaggcaaattgcccccggacaaactgggaaaattgcggattataattacaagcttccagacgactttacgggctgtgttatcgcatggaactccaacaatctcgacagcaaagtgggtggaaattataattatttgtatagattgtttcgcaagtccaacctgaagccattcgagagagacatctccaccgagatttatcaagccggctcaactccttgcaacggagtcgaaggcttcaactgttattttccgcttcagtcctatggttttcaacctacgaacggcgtgggataccagccgtatcgagtcgtggtactgtcctttgaacttttgcacgccccagcaactgtttgcggaccaaaaaagtccacaaatctcgtcaaaaacaagtgcgttaattttaattttaacgggcttacgggtactggtgtactgacggagtccaataagaaattcctgccattccaacagtttggacgggatattgctgatacgaccgacgctgtgcgagatccccagacacttgagatcctcgacataaccccctgtagttttggtggagtgtctgtaattacccccggaacgaacaccagcaaccaagttgcggtgctttatcagggtgttaattgcactgaggttcctgtcgcgatacatgccgaccaactgacgcctacatggcgagtatattcaacgggctccaacgtcttccagacgcgagccggttgtctcattggagctgaacatgtgaacaactcttatgaatgcgatataccaattggggcaggtatctgcgcctcttatcagacgcagactaactcacccgtacgagcacggagcgtggcaagccaatccattattgcctacaccatgtccttgggagctgagaattcagtcgcctattctaataatagcattgctataccgacgaactttacaatttccgtaactaccgaaatattgcccgtcagtatgactaagactagcgttgactgcacaatgtacatttgcggcgatagtaccgaatgctctaatcttcttctgcagtatggtagtttttgtacacaactgaatcgagctctgactgggatcgcagtcgaacaggacaaaaatacacaggaagttttcgcgcaagtgaagcaaatctacaaaacgcctcccataaaagatttcggaggattcaatttcagtcagatactccctgatccctctaaaccatctaaaaactcctttatcgaagatttgctgttcaacaaggtgacccttgctgacgctggattcataaagcagtacggggattgtcttggcgatatcgcagcccgagaccttatttgtgcccaaaaatttaacggacttacggtactccctccccttctgactgacgaaatgatagcccagtacaccagtgctctgctggctggcaccataacgagcggatggacttttggtgcgggtgcagcactgcagatccccttcgcgatgcaaatggcatacaggtttaatgggattggggtcacccagaatgtattgtacgagaaccagaagcttatagcgaatcaatttaacagtgcaattggtaagattcaggacagcctttcaagtaccgcgagtgctctcgggaagttgcaggatgtagtaaatcaaaatgcgcaggcgctgaatacgttggttaaacagctcagcagtaattttggagcaatttctagcgtgctgaatgacatcctcagcagactcgatcccccagaggctgaggtacagatagatagactcatcacgggcagattgcagagtttgcagacatacgtcacgcaacaactcattcgagcagcagaaattagagcatccgcaaatctggcggccacgaaaatgtctgagtgcgttctggggcagtccaagagagttgacttttgtgggaaaggatatcatctgatgagttttccgcagtcagcgccacatggtgtggtctttctgcacgttacttatgtccccgcacaggagaagaattttacgaccgcgccagctatttgccatgacggtaaggctcacttcccgagggaaggggtattcgtttctaacggtacgcattggtttgttacgcaacggaacttttatgaaccacagattattaccaccgacaacacattcgtaagtggaaactgtgatgtcgttatcggaatagtaaataataccgtttatgacccccttcagcctgaacttgattccttcaaggaagagctcgataaatactttaagaaccacaccagccccgatgttgacctgggtgatatatctgggatcaacgcttctgtcgtcaacattcaaaaagagatcgatcgcctgaatgaggtggccaaaaacctcaatgaaagtctcattgaccttcaagaactcggtaagtacgagcaatacatcaagtggccatggtacatatggctgggcttcattgctgggttgatagctatagtgatggttacgataatgttgtgttgtatgacatcctgctgtagctgccttaaaggttgttgttcttgcggttcttgttgtaagtttgacgaagatgattcagagcctgttctgaaaggggtgaagctccattatacttgataagtttaaactcccatttaaatgtgagggttaatgcttcgagcagacatgataagatacattgatgagtttggacaaaccacaactagaatgcagtgaaaaaaatgctttatttgtgaaatttgtgatgctattgctttatttgtaaccattataagctgcaataaacaagttaacaacaacaattgcattcattttatgtttcaggttcagggggagatgtgggaggttttttaaagcaagtaaaacctctacaaatgtggtaaaa

SEQ ID NO: 71 - DNA, 7922 bp, synthetic construct
  misc_feature 1..7922: note = Description of Artificial Sequence: Synthetic polynucleotide
  source 1..7922: mol_type = other DNA
gacattgattattgactagttgttaatagtaatcaattacggggtcattagttcatagcccatatatggagttccgcgttacataacttacggtaaatggcccgcctggctgaccgcccaacgacccccgcccattgacgtcaataatgacgtatgttcccatagtaacgccaatagggactttccattgacgtcaatgggtggagtatttacggtaaactgcccacttggcagtacatcaagtgtatcatatgccaagtccgccccctattgacgtcaatgacggtaaatggcccgcctggcattatgcccagtacatgaccttacgggactttcctacttggcagtacatctacgtattagtcatcgctattaccatggtgatgcggttttggcagtacaccaatgggcgtggatagcggtttgactcacggggatttccaagtctccaccccattgacgtcaatgggagtttgttttggcaccaaaatcaacgggactttccaaaatgtcgtaataaccccgccccgttgacgcaaatgggcggtaggcgtgtacggtgggaggtctatataagcagagctcgtttagtgaaccgtcagatcgcctggaacgccatccacgctgttttgacctccatagaagacagcgatcgcgccaccatgtttgtctttctggtcctgcttcccctcgttagttctcagtgtgtgaacctcaccacacggacgcaactccctccagcttacacaaattcttttacgcgaggcgtgtattatccggataaagttttcaggtcctccgtcctgcactccacgcaggacctttttttgccgttcttttctaacgtaacatggtttcatgccattcatgtttccgggacaaacggtacgaaacgctttgataaccctgtgctgccgttcaatgatggcgtttactttgcctctacggaaaagagtaacataatccgaggctggatcttcgggaccaccctggatagcaagactcagagtcttctcatcgttaataacgctacaaacgttgttatcaaggtgtgtgaattccagttttgcaacgatccctttttgggggtatactatcacaaaaacaataaaagttggatggaatcagagtttcgcgtgtattcttctgcgaacaactgcacgtttgaatacgttagtcagccttttctcatggacttggaaggtaagcaggggaactttaaaaacttgcgggagttcgtttttaagaacatagatggttacttcaaaatttatagcaaacatacaccgatcaacctcgtgagagatctcccacagggtttttccgcactcgaaccgctcgtggatctgccgattggaattaacattacccgcttccagaccctgttggctctgcacagaagctatctgacgccaggggattccagcagtggatggacggcgggtgcggccgcgtattatgtaggctatctccaaccccgaacgttcttgctgaagtacaatgagaatgggaccattacggatgctgtggattgtgcattggatcctctctctgagacaaaatgcacccttaaaagcttcactgtagaaaagggtatttatcagactagcaacttccgcgtacaaccaacggagtctatcgttaggttccccaacattactaacttgtgcccatttggcgaagtgtttaacgcaactaggtttgctagtgtctatgcttggaatcgaaagagaataagcaattgtgtcgcagattactccgtattgtataattctgcaagcttttcaacattcaagtgctacggagtgtctcccaccaaattgaacgacctgtgttttactaacgtgtatgccgactctttcgttatccgaggcgatgaggtcaggcaaattgcccccggacaaactgggaaaattgcggattataattacaagcttccagacgactttacgggctgtgttatcgcatggaactccaacaatctcgacagcaaagtgggtggaaattataattatttgtatagattgtttcgcaagtccaacctgaagccattcgagagagacatctccaccgagatttatcaagccggctcaactccttgcaacggagtcgaaggcttcaactgttattttccgcttcagtcctatggttttcaacctacgaacggcgtgggataccagccgtatcgagtcgtggtactgtcctttgaacttttgcacgccccagcaactgtttgcggaccaaaaaagtccacaaatctcgtcaaaaacaagtgcgttaattttaattttaacgggcttacgggtactggtgtactgacggagtccaataagaaattcctgccattccaacagtttggacgggatattgctgatacgaccgacgctgtgcgagatccccagacacttgagatcctcgacataaccccctgtagttttggtggagtgtctgtaattacccccggaacgaacaccagcaaccaagttgcggtgctttatcaggatgttaattgcactgaggttcctgtcgcgatacatgccgaccaactgacgcctacatggcgagtatattcaacgggctccaacgtcttccagacgcgagccggttgtctcattggagctgaacatgtgaacaactcttatgaatgcgatataccaattggggcaggtatctgcgcctcttatcagacgcagactaactcacccagacgagcacggagcgtggcaagccaatccattattgcctacaccatgtccttgggagctgagaattcagtcgcctattctaataatagcattgctataccgacgaactttacaatttccgtaactaccgaaatattgcccgtcagtatgactaagactagcgttgactgcacaatgtacatttgcggcgatagtaccgaatgctctaatcttcttctgcagtatggtagtttttgtacacaactgaatcgagctctgactgggatcgcagtcgaacaggacaaaaatacacaggaagttttcgcgcaagtgaagcaaatctacaaaacgcctcccataaaagatttcggaggattcaatttcagtcagatactccctgatccctctaaaccatctaaacgatcctttatcgaagatttgctgttcaacaaggtgacccttgctgacgctggattcataaagcagtacggggattgtcttggcgatatcgcagcccgagaccttatttgtgcccaaaaatttaacggacttacggtactccctccccttctgactgacgaaatgatagcccagtacaccagtgctctgctggctggcaccataacgagcggatggacttttggtgcgggtgcagcactgcagatccccttcgcgatgcaaatggcatacaggtttaatgggattggggtcacccagaatgtattgtacgagaaccagaagcttatagcgaatcaatttaacagtgcaattggtaagattcaggacagcctttcaagtaccgcgagtgctctcgggaagttgcaggatgtagtaaatcaaaatgcgcaggcgctgaatacgttggttaaacagctcagcagtaattttggagcaatttctagcgtgctgaatgacatcctcagcagactcgataaggtggaggctgaggtacagatagatagactcatcacgggcagattgcagagtttgcagacatacgtcacgcaacaactcattcgagcagcagaaattagagcatccgcaaatctggcggccacgaaaatgtctgagtgcgttctggggcagtccaagagagttgacttttgtgggaaaggatatcatctgatgagttttccgcagtcagcgccacatggtgtggtctttctgcacgttacttatgtccccgcacaggagaagaattttacgaccgcgccagctatttgccatgacggtaaggctcacttcccgagggaaggggtattcgtttctaacggtacgcattggtttgttacgcaacggaacttttatgaaccacagattattaccaccgacaacacattcgtaagtggaaactgtgatgtcgttatcggaatagtaaataataccgtttatgacccccttcagcctgaacttgattccttcaaggaagagctcgataaatactttaagaaccacaccagccccgatgttgacctgggtgatatatctgggatcaacgcttctgtcgtcaacattcaaaaagagatcgatcgcctgaatgaggtggccaaaaacctcaatgaaagtctcattgaccttcaagaactcggtaagtacgagcaatacatcaagtggccatggtacatatggctgggcttcattgctgggttgatagctatagtgatggttacgataatgttgtgttgtatgacatcctgctgtagctgccttaaaggttgttgttcttgcggttcttgttgtaagtttgacgaagatgattcagagcctgttctgaaaggggtgaagctccattatactggtggaagcggtgggttcgggcagagggcagaggctcactgctcacgtgtggtgatgtagaagagaatccaggtcctatgtactcattcgtatccgaggagaccggcacgttgatcgttaattctgtattgttgtttctcgcttttgtggtatttctccttgttacgcttgcgattcttaccgcccttcgcctctgtgcttactgctgcaacattgtgaatgtctccctcgtgaagccctccttttatgtttactccagagtgaaaaacctcaatagctccagggttccagacctgctggtgtgataaagacatgataagatacattgatgagtttggacaaaccacaactagaatgcagtgaaaaaaatgctttatttgtgaaatttgtgatgctattgctttatttgtaaccattataagctgcaataaacaagttaacaacaacaattgcattcattttatgtttcaggttcagggggagatgtgggaggttttttaaagcaagtaaaacctctacaaatgtggtaaaaggcacgtcgacgttagacattgattattgactagttgttaatagtaatcaattacggggtcattagttcatagcccatatatggagttccgcgttacataacttacggtaaatggcccgcctggctgaccgcccaacgacccccgcccattgacgtcaataatgacgtatgttcccatagtaacgccaatagggactttccattgacgtcaatgggtggagtatttacggtaaactgcccacttggcagtacatcaagtgtatcatatgccaagtccgccccctattgacgtcaatgacggtaaatggcccgcctggcattatgcccagtacatgaccttacgggactttcctacttggcagtacatctacgtattagtcatcgctattaccatggtgatgcggttttggcagtacaccaatgggcgtggatagcggtttgactcacggggatttccaagtctccaccccattgacgtcaatgggagtttgttttggcaccaaaatcaacgggactttccaaaatgtcgtaataaccccgccccgttgacgcaaatgggcggtaggcgtgtacggtgggaggtctatataagcagagctcgtttagtgaaccgtcagatcactcttctggtccccacagactcagagagaacccagtttaaacgccaccatgtcagataatgggcctcagaaccagcggaatgcccccaggatcacgttcggtgggccttcagattcaactggaagcaatcagaacggggaaagatccggtgcaaggtccaagcaacgccgaccccagggattgcctaataatacagcaagttggtttactgcactgacccaacacgggaaagaggaccttaaatttccgcgggggcaaggagtacctataaacactaatagcagccccgatgaccaaattgggtactaccgcagagcaacccggcgaatcagagggggtgacggtaagatgaaggacctctcccccaggtggtacttctactatttgggaacggggccagaagccggactgccctacggcgcaaacaaagacggtataatatgggtcgccactgagggcgctctgaatacgccaaaagatcacattggtactagaaacccggcgaacaatgcggcaattgtgcttcagctccctcaaggaacaacgttgccaaaaggattttacgcagagggatcacgggggggttcccaggctagttctcgcagttcctcaaggagtcgaaattccagtaggaactcaaccccaggctcaagccgcgggacttcacctgcaagaatggccggtaacgggggagacgctgctttggctcttcttctccttgatcgccttaatcagcttgagtctaagatgtctggtaaaggccaacagcaacaaggacagacggtaacgaaaaaatccgccgccgaggcctctaaaaaaccgagacaaaaacggactgctacgaaagcgtataacgtcactcaggcttttggtaggcggggcccggaacaaacccagggtaattttggcgatcaggaactgattagacaaggcaccgactacaagcactggcctcagatcgcgcagtttgcaccctccgcttcagcgttcttcgggatgtcacgcatcgggatggaggttacaccgagtggaacatggctgacatatactggtgcaatcaagctggacgacaaggatcccaacttcaaagatcaagttatactcctcaacaaacatatcgatgcgtataagacattccccccgacggaacccaaaaaagataaaaaaaagaaggccgacgagacccaagccctcccacaacgacaaaagaaacaacaaacagtaacactgctcccagccgcagacttggatgatttctccaaacagttgcagcaatctatgagttcagccgatagtactcaggccggcggttctggaggtgtccgtgctgaaggacgcgggtcccttctcacctgcggcgacgttgaggaaaaccctggccctatggctgacagcaatggtactattacggtggaagaactgaaaaagctcttggaacagtggaaccttgtgatcggttttctgtttttgacctggatttgcttgctccagttcgcctatgctaatagaaacaggtttctctatataatcaagttgatttttctgtggctgctctggcccgttacgcttgcgtgttttgtcctggctgctgtgtaccggatcaattggatcactggtggcattgctatcgccatggcttgtcttgtcgggctgatgtggctttcctattttatcgcttcatttaggctgtttgctcgaaccagatcaatgtggtcatttaatccagagactaatattctcttgaatgttccgctgcacggaactatcctcacacgacccctgttggagtccgaattggttatcggtgccgtaattctcaggggccaccttagaatcgcgggccaccatttgggacggtgcgatattaaagacctgcccaaagagatcacagtggccacaagtagaacgctctcatactataaactgggagcttcccagagagtggccggggatagtggcttcgcggcatatagtcgctaccgcatcggtaactataaacttaatacggaccatagtagctctagcgataacattgccttgctggttcagtgatagatttaaatctgtgccttctagttgccagccatctgttgtttgcccctcccccgtgccttccttgaccctggaaggtgccactcccactgtcctttcctaataaaatgaggaaattgcatcgcattgtctgagtaggtgtcattctattctggggggtggggtggggcaggacagcaagggggaggattgggaagacaatagcaggcatgctggggatgcggtgggctctatgg

SEQ ID NO: 72 - DNA, 7619 bp, synthetic construct
  misc_feature 1..7619: note = Description of Artificial Sequence: Synthetic polynucleotide
  source 1..7619: mol_type = other DNA
gacattgattattgactagttgttaatagtaatcaattacggggtcattagttcatagcccatatatggagttccgcgttacataacttacggtaaatggcccgcctggctgaccgcccaacgacccccgcccattgacgtcaataatgacgtatgttcccatagtaacgccaatagggactttccattgacgtcaatgggtggagtatttacggtaaactgcccacttggcagtacatcaagtgtatcatatgccaagtccgccccctattgacgtcaatgacggtaaatggcccgcctggcattatgcccagtacatgaccttacgggactttcctacttggcagtacatctacgtattagtcatcgctattaccatggtgatgcggttttggcagtacaccaatgggcgtggatagcggtttgactcacggggatttccaagtctccaccccattgacgtcaatgggagtttgttttggcaccaaaatcaacgggactttccaaaatgtcgtaataaccccgccccgttgacgcaaatgggcggtaggcgtgtacggtgggaggtctatataagcagagctcgtttagtgaaccgtcagatcgcctggaacgccatccacgctgttttgacctccatagaagacagcgatcgcgccaccatgtttgtctttctggtcctgcttcccctcgttagttctcagtgtgtgaacctcaccacacggacgcaactccctccagcttacacaaattcttttacgcgaggcgtgtattatccggataaagttttcaggtcctccgtcctgcactccacgcaggacctttttttgccgttcttttctaacgtaacatggtttcatgccattcatgtttccgggacaaacggtacgaaacgctttgataaccctgtgctgccgttcaatgatggcgtttactttgcctctacggaaaagagtaacataatccgaggctggatcttcgggaccaccctggatagcaagactcagagtcttctcatcgttaataacgctacaaacgttgttatcaaggtgtgtgaattccagttttgcaacgatccctttttgggggtatactatcacaaaaacaataaaagttggatggaatcagagtttcgcgtgtattcttctgcgaacaactgcacgtttgaatacgttagtcagccttttctcatggacttggaaggtaagcaggggaactttaaaaacttgcgggagttcgtttttaagaacatagatggttacttcaaaatttatagcaaacatacaccgatcaacctcgtgagagatctcccacagggtttttccgcactcgaaccgctcgtggatctgccgattggaattaacattacccgcttccagaccctgttggctctgcacagaagctatctgacgccaggggattccagcagtggatggacggcgggtgcggccgcgtattatgtaggctatctccaaccccgaacgttcttgctgaagtacaatgagaatgggaccattacggatgctgtggattgtgcattggatcctctctctgagacaaaatgcacccttaaaagcttcactgtagaaaagggtatttatcagactagcaacttccgcgtacaaccaacggagtctatcgttaggttccccaacattactaacttgtgcccatttggcgaagtgtttaacgcaactaggtttgctagtgtctatgcttggaatcgaaagagaataagcaattgtgtcgcagattactccgtattgtataattctgcaagcttttcaacattcaagtgctacggagtgtctcccaccaaattgaacgacctgtgttttactaacgtgtatgccgactctttcgttatccgaggcgatgaggtcaggcaaattgcccccggacaaactgggaaaattgcggattataattacaagcttccagacgactttacgggctgtgttatcgcatggaactccaacaatctcgacagcaaagtgggtggaaattataattatttgtatagattgtttcgcaagtccaacctgaagccattcgagagagacatctccaccgagatttatcaagccggctcaactccttgcaacggagtcgaaggcttcaactgttattttccgcttcagtcctatggttttcaacctacgaacggcgtgggataccagccgtatcgagtcgtggtactgtcctttgaacttttgcacgccccagcaactgtttgcggaccaaaaaagtccacaaatctcgtcaaaaacaagtgcgttaattttaattttaacgggcttacgggtactggtgtactgacggagtccaataagaaattcctgccattccaacagtttggacgggatattgctgatacgaccgacgctgtgcgagatccccagacacttgagatcctcgacataaccccctgtagttttggtggagtgtctgtaattacccccggaacgaacaccagcaaccaagttgcggtgctttatcaggatgttaattgcactgaggttcctgtcgcgatacatgccgaccaactgacgcctacatggcgagtatattcaacgggctccaacgtcttccagacgcgagccggttgtctcattggagctgaacatgtgaacaactcttatgaatgcgatataccaattggggcaggtatctgcgcctcttatcagacgcagactaactcacccagacgagcacggagcgtggcaagccaatccattattgcctacaccatgtccttgggagctgagaattcagtcgcctattctaataatagcattgctataccgacgaactttacaatttccgtaactaccgaaatattgcccgtcagtatgactaagactagcgttgactgcacaatgtacatttgcggcgatagtaccgaatgctctaatcttcttctgcagtatggtagtttttgtacacaactgaatcgagctctgactgggatcgcagtcgaacaggacaaaaatacacaggaagttttcgcgcaagtgaagcaaatctacaaaacgcctcccataaaagatttcggaggattcaatttcagtcagatactccctgatccctctaaaccatctaaacgatcctttatcgaagatttgctgttcaacaaggtgacccttgctgacgctggattcataaagcagtacggggattgtcttggcgatatcgcagcccgagaccttatttgtgcccaaaaatttaacggacttacggtactccctccccttctgactgacgaaatgatagcccagtacaccagtgctctgctggctggcaccataacgagcggatggacttttggtgcgggtgcagcactgcagatccccttcgcgatgcaaatggcatacaggtttaatgggattggggtcacccagaatgtattgtacgagaaccagaagcttatagcgaatcaatttaacagtgcaattggtaagattcaggacagcctttcaagtaccgcgagtgctctcgggaagttgcaggatgtagtaaatcaaaatgcgcaggcgctgaatacgttggttaaacagctcagcagtaattttggagcaatttctagcgtgctgaatgacatcctcagcagactcgataaggtggaggctgaggtacagatagatagactcatcacgggcagattgcagagtttgcagacatacgtcacgcaacaactcattcgagcagcagaaattagagcatccgcaaatctggcggccacgaaaatgtctgagtgcgttctggggcagtccaagagagttgacttttgtgggaaaggatatcatctgatgagttttccgcagtcagcgccacatggtgtggtctttctgcacgttacttatgtccccgcacaggagaagaattttacgaccgcgccagctatttgccatgacggtaaggctcacttcccgagggaaggggtattcgtttctaacggtacgcattggtttgttacgcaacggaacttttatgaaccacagattattaccaccgacaacacattcgtaagtggaaactgtgatgtcgttatcggaatagtaaataataccgtttatgacccccttcagcctgaacttgattccttcaaggaagagctcgataaatactttaagaaccacaccagccccgatgttgacctgggtgatatatctgggatcaacgcttctgtcgtcaacattcaaaaagagatcgatcgcctgaatgaggtggccaaaaacctcaatgaaagtctcattgaccttcaagaactcggtaagtacgagcaatacatcaagtggccatggtacatatggctgggcttcattgctgggttgatagctatagtgatggttacgataatgttgtgttgtatgacatcctgctgtagctgccttaaaggttgttgttcttgcggttcttgttgtaagtttgacgaagatgattcagagcctgttctgaaaggggtgaagctccattatacttgaggagacatgataagatacattgatgagtttggacaaaccacaactagaatgcagtgaaaaaaatgctttatttgtgaaatttgtgatgctattgctttatttgtaaccattataagctgcaataaacaagttaacaacaacaattgcattcattttatgtttcaggttcagggggagatgtgggaggttttttaaagcaagtaaaacctctacaaatgtggtaaaaggcacgtcgacgttagacattgattattgactagttgttaatagtaatcaattacggggtcattagttcatagcccatatatggagttccgcgttacataacttacggtaaatggcccgcctggctgaccgcccaacgacccccgcccattgacgtcaataatgacgtatgttcccatagtaacgccaatagggactttccattgacgtcaatgggtggagtatttacggtaaactgcccacttggcagtacatcaagtgtatcatatgccaagtccgccccctattgacgtcaatgacggtaaatggcccgcctggcattatgcccagtacatgaccttacgggactttcctacttggcagtacatctacgtattagtcatcgctattaccatggtgatgcggttttggcagtacaccaatgggcgtggatagcggtttgactcacggggatttccaagtctccaccccattgacgtcaatgggagtttgttttggcaccaaaatcaacgggactttccaaaatgtcgtaataaccccgccccgttgacgcaaatgggcggtaggcgtgtacggtgggaggtctatataagcagagctcgtttagtgaaccgtcagatcactcttctggtccccacagactcagagagaacccagtttaaacgccaccatgtcagataatgggcctcagaaccagcggaatgcccccaggatcacgttcggtgggccttcagattcaactggaagcaatcagaacggggaaagatccggtgcaaggtccaagcaacgccgaccccagggattgcctaataatacagcaagttggtttactgcactgacccaacacgggaaagaggaccttaaatttccgcgggggcaaggagtacctataaacactaatagcagccccgatgaccaaattgggtactaccgcagagcaacccggcgaatcagagggggtgacggtaagatgaaggacctctcccccaggtggtacttctactatttgggaacggggccagaagccggactgccctacggcgcaaacaaagacggtataatatgggtcgccactgagggcgctctgaatacgccaaaagatcacattggtactagaaacccggcgaacaatgcggcaattgtgcttcagctccctcaaggaacaacgttgccaaaaggattttacgcagagggatcacgggggggttcccaggctagttctcgcagttcctcaaggagtcgaaattccagtaggaactcaaccccaggctcaagccgcgggacttcacctgcaagaatggccggtaacgggggagacgctgctttggctcttcttctccttgatcgccttaatcagcttgagtctaagatgtctggtaaaggccaacagcaacaaggacagacggtaacgaaaaaatccgccgccgaggcctctaaaaaaccgagacaaaaacggactgctacgaaagcgtataacgtcactcaggcttttggtaggcggggcccggaacaaacccagggtaattttggcgatcaggaactgattagacaaggcaccgactacaagcactggcctcagatcgcgcagtttgcaccctccgcttcagcgttcttcgggatgtcacgcatcgggatggaggttacaccgagtggaacatggctgacatatactggtgcaatcaagctggacgacaaggatcccaacttcaaagatcaagttatactcctcaacaaacatatcgatgcgtataagacattccccccgacggaacccaaaaaagataaaaaaaagaaggccgacgagacccaagccctcccacaacgacaaaagaaacaacaaacagtaacactgctcccagccgcagacttggatgatttctccaaacagttgcagcaatctatgagttcagccgatagtactcaggccggcggttctggaggtgtccgtgctgaaggacgcgggtcccttctcacctgcggcgacgttgaggaaaaccctggccctatggctgacagcaatggtactattacggtggaagaactgaaaaagctcttggaacagtggaaccttgtgatcggttttctgtttttgacctggatttgcttgctccagttcgcctatgctaatagaaacaggtttctctatataatcaagttgatttttctgtggctgctctggcccgttacgcttgcgtgttttgtcctggctgctgtgtaccggatcaattggatcactggtggcattgctatcgccatggcttgtcttgtcgggctgatgtggctttcctattttatcgcttcatttaggctgtttgctcgaaccagatcaatgtggtcatttaatccagagactaatattctcttgaatgttccgctgcacggaactatcctcacacgacccctgttggagtccgaattggttatcggtgccgtaattctcaggggccaccttagaatcgcgggccaccatttgggacggtgcgatattaaagacctgcccaaagagatcacagtggccacaagtagaacgctctcatactataaactgggagcttcccagagagtggccggggatagtggcttcgcggcatatagtcgctaccgcatcggtaactataaacttaatacggaccatagtagctctagcgataacattgccttgctggttcagtgatagatttaaatctgtgccttctagttgccagccatctgttgtttgcccctcccccgtgccttccttgaccctggaaggtgccactcccactgtcctttcctaataaaatgaggaaattgcatcgcattgtctgagtaggtgtcattctattctggggggtggggtggggcaggacagcaagggggaggattgggaagacaatagcaggcatgctggggatgcggtgggctctatgg

SEQ ID NO: 73 - DNA, 4484 bp, synthetic construct
  misc_feature 1..4484: note = Description of Artificial Sequence: Synthetic polynucleotide
  source 1..4484: mol_type = other DNA
gacattgattattgactagttgttaatagtaatcaattacggggtcattagttcatagcccatatatggagttccgcgttacataacttacggtaaatggcccgcctggctgaccgcccaacgacccccgcccattgacgtcaataatgacgtatgttcccatagtaacgccaatagggactttccattgacgtcaatgggtggagtatttacggtaaactgcccacttggcagtacatcaagtgtatcatatgccaagtccgccccctattgacgtcaatgacggtaaatggcccgcctggcattatgcccagtacatgaccttacgggactttcctacttggcagtacatctacgtattagtcatcgctattaccatggtgatgcggttttggcagtacaccaatgggcgtggatagcggtttgactcacggggatttccaagtctccaccccattgacgtcaatgggagtttgttttggcaccaaaatcaacgggactttccaaaatgtcgtaataaccccgccccgttgacgcaaatgggcggtaggcgtgtacggtgggaggtctatataagcagagctcgtttagtgaaccgtcagatcgcctggaacgccatccacgctgttttgacctccatagaagacagcgatcgcgccaccatgtttgtctttctggtcctgcttcccctcgttagttctcagtgtgtgaacctcaccacacggacgcaactccctccagcttacacaaattcttttacgcgaggcgtgtattatccggataaagttttcaggtcctccgtcctgcactccacgcaggacctttttttgccgttcttttctaacgtaacatggtttcatgccattcatgtttccgggacaaacggtacgaaacgctttgataaccctgtgctgccgttcaatgatggcgtttactttgcctctacggaaaagagtaacataatccgaggctggatcttcgggaccaccctggatagcaagactcagagtcttctcatcgttaataacgctacaaacgttgttatcaaggtgtgtgaattccagttttgcaacgatccctttttgggggtatactatcacaaaaacaataaaagttggatggaatcagagtttcgcgtgtattcttctgcgaacaactgcacgtttgaatacgttagtcagccttttctcatggacttggaaggtaagcaggggaactttaaaaacttgcgggagttcgtttttaagaacatagatggttacttcaaaatttatagcaaacatacaccgatcaacctcgtgagagatctcccacagggtttttccgcactcgaaccgctcgtggatctgccgattggaattaacattacccgcttccagaccctgttggctctgcacagaagctatctgacgccaggggattccagcagtggatggacggcgggtgcggccgcgtattatgtaggctatctccaaccccgaacgttcttgctgaagtacaatgagaatgggaccattacggatgctgtggattgtgcattggatcctctctctgagacaaaatgcacccttaaaagcttcactgtagaaaagggtatttatcagactagcaacttccgcgtacaaccaacggagtctatcgttaggttccccaacattactaacttgtgcccatttggcgaagtgtttaacgcaactaggtttgctagtgtctatgcttggaatcgaaagagaataagcaattgtgtcgcagattactccgtattgtataattctgcaagcttttcaacattcaagtgctacggagtgtctcccaccaaattgaacgacctgtgttttactaacgtgtatgccgactctttcgttatccgaggcgatgaggtcaggcaaattgcccccggacaaactgggaaaattgcggattataattacaagcttccagacgactttacgggctgtgttatcgcatggaactccaacaatctcgacagcaaagtgggtggaaattataattatttgtatagattgtttcgcaagtccaacctgaagccattcgagagagacatctccaccgagatttatcaagccggctcaactccttgcaacggagtcgaaggcttcaactgttattttccgcttcagtcctatggttttcaacctacgaacggcgtgggataccagccgtatcgagtcgtggtactgtcctttgaacttttgcacgccccagcaactgtttgcggaccaaaaaagtccacaaatctcgtcaaaaacaagtgcgttaattttaattttaacgggcttacgggtactggtgtactgacggagtccaataagaaattcctgccattccaacagtttggacgggatattgctgatacgaccgacgctgtgcgagatccccagacacttgagatcctcgacataaccccctgtagttttggtggagtgtctgtaattacccccggaacgaacaccagcaaccaagttgcggtgctttatcaggatgttaattgcactgaggttcctgtcgcgatacatgccgaccaactgacgcctacatggcgagtatattcaacgggctccaacgtcttccagacgcgagccggttgtctcattggagctgaacatgtgaacaactcttatgaatgcgatataccaattggggcaggtatctgcgcctcttatcagacgcagactaactcacccagacgagcacggagcgtggcaagccaatccattattgcctacaccatgtccttgggagctgagaattcagtcgcctattctaataatagcattgctataccgacgaactttacaatttccgtaactaccgaaatattgcccgtcagtatgactaagactagcgttgactgcacaatgtacatttgcggcgatagtaccgaatgctctaatcttcttctgcagtatggtagtttttgtacacaactgaatcgagctctgactgggatcgcagtcgaacaggacaaaaatacacaggaagttttcgcgcaagtgaagcaaatctacaaaacgcctcccataaaagatttcggaggattcaatttcagtcagatactccctgatccctctaaaccatctaaacgatcctttatcgaagatttgctgttcaacaaggtgacccttgctgacgctggattcataaagcagtacggggattgtcttggcgatatcgcagcccgagaccttatttgtgcccaaaaatttaacggacttacggtactccctccccttctgactgacgaaatgatagcccagtacaccagtgctctgctggctggcaccataacgagcggatggacttttggtgcgggtgcagcactgcagatccccttcgcgatgcaaatggcatacaggtttaatgggattggggtcacccagaatgtattgtacgagaaccagaagcttatagcgaatcaatttaacagtgcaattggtaagattcaggacagcctttcaagtaccgcgagtgctctcgggaagttgcaggatgtagtaaatcaaaatgcgcaggcgctgaatacgttggttaaacagctcagcagtaattttggagcaatttctagcgtgctgaatgacatcctcagcagactcgataaggtggaggctgaggtacagatagatagactcatcacgggcagattgcagagtttgcagacatacgtcacgcaacaactcattcgagcagcagaaattagagcatccgcaaatctggcggccacgaaaatgtctgagtgcgttctggggcagtccaagagagttgacttttgtgggaaaggatatcatctgatgagttttccgcagtcagcgccacatggtgtggtctttctgcacgttacttatgtccccgcacaggagaagaattttacgaccgcgccagctatttgccatgacggtaaggctcacttcccgagggaaggggtattcgtttctaacggtacgcattggtttgttacgcaacggaacttttatgaaccacagattattaccaccgacaacacattcgtaagtggaaactgtgatgtcgttatcggaatagtaaataataccgtttatgacccccttcagcctgaacttgattccttcaaggaagagctcgataaatactttaagaaccacaccagccccgatgttgacctgggtgatatatctgggatcaacgcttctgtcgtcaacattcaaaaagagatcgatcgcctgaatgaggtggccaaaaacctcaatgaaagtctcattgaccttcaagaactcggtaagtacgagcaatacatcaagtggccatggtacatatggctgggcttcattgctgggttgatagctatagtgatggttacgataatgttgtgttgtatgacatcctgctgtagctgccttaaaggttgttgttcttgcggttcttgttgtaagtttgacgaagatgattcagagcctgttctgaaaggggtgaagctccattatacttga

SEQ ID NO: 74 - DNA, 8641 bp, synthetic construct
  misc_feature 1..8641: note = Description of Artificial Sequence: Synthetic polynucleotide
  source 1..8641: mol_type = other DNA
gacattgattattgactagttgttaatagtaatcaattacggggtcattagttcatagcccatatatggagttccgcgttacataacttacggtaaatggcccgcctggctgaccgcccaacgacccccgcccattgacgtcaataatgacgtatgttcccatagtaacgccaatagggactttccattgacgtcaatgggtggagtatttacggtaaactgcccacttggcagtacatcaagtgtatcatatgccaagtccgccccctattgacgtcaatgacggtaaatggcccgcctggcattatgcccagtacatgaccttacgggactttcctacttggcagtacatctacgtattagtcatcgctattaccatggtgatgcggttttggcagtacaccaatgggcgtggatagcggtttgactcacggggatttccaagtctccaccccattgacgtcaatgggagtttgttttggcaccaaaatcaacgggactttccaaaatgtcgtaataaccccgccccgttgacgcaaatgggcggtaggcgtgtacggtgggaggtctatataagcagagctcgtttagtgaaccgtcagatcgcctggaacgccatccacgctgttttgacctccatagaagacagcgatcgcgccaccatgtttgtctttctggtcctgcttcccctcgttagttctcagtgtgtgaacctcaccacacggacgcaactccctccagcttacacaaattcttttacgcgaggcgtgtattatccggataaagttttcaggtcctccgtcctgcactccacgcaggacctttttttgccgttcttttctaacgtaacatggtttcatgccattcatgtttccgggacaaacggtacgaaacgctttgataaccctgtgctgccgttcaatgatggcgtttactttgcctctacggaaaagagtaacataatccgaggctggatcttcgggaccaccctggatagcaagactcagagtcttctcatcgttaataacgctacaaacgttgttatcaaggtgtgtgaattccagttttgcaacgatccctttttgggggtatactatcacaaaaacaataaaagttggatggaatcagagtttcgcgtgtattcttctgcgaacaactgcacgtttgaatacgttagtcagccttttctcatggacttggaaggtaagcaggggaactttaaaaacttgcgggagttcgtttttaagaacatagatggttacttcaaaatttatagcaaacatacaccgatcaacctcgtgagagatctcccacagggtttttccgcactcgaaccgctcgtggatctgccgattggaattaacattacccgcttccagaccctgttggctctgcacagaagctatctgacgccaggggattccagcagtggatggacggcgggtgcggccgcgtattatgtaggctatctccaaccccgaacgttcttgctgaagtacaatgagaatgggaccattacggatgctgtggattgtgcattggatcctctctctgagacaaaatgcacccttaaaagcttcactgtagaaaagggtatttatcagactagcaacttccgcgtacaaccaacggagtctatcgttaggttccccaacattactaacttgtgcccatttggcgaagtgtttaacgcaactaggtttgctagtgtctatgcttggaatcgaaagagaataagcaattgtgtcgcagattactccgtattgtataattctgcaagcttttcaacattcaagtgctacggagtgtctcccaccaaattgaacgacctgtgttttactaacgtgtatgccgactctttcgttatccgaggcgatgaggtcaggcaaattgcccccggacaaactgggaaaattgcggattataattacaagcttccagacgactttacgggctgtgttatcgcatggaactccaacaatctcgacagcaaagtgggtggaaattataattatttgtatagattgtttcgcaagtccaacctgaagccattcgagagagacatctccaccgagatttatcaagccggctcaactccttgcaacggagtcgaaggcttcaactgttattttccgcttcagtcctatggttttcaacctacgaacggcgtgggataccagccgtatcgagtcgtggtactgtcctttgaacttttgcacgccccagcaactgtttgcggaccaaaaaagtccacaaatctcgtcaaaaacaagtgcgttaattttaattttaacgggcttacgggtactggtgtactgacggagtccaataagaaattcctgccattccaacagtttggacgggatattgctgatacgaccgacgctgtgcgagatccccagacacttgagatcctcgacataaccccctgtagttttggtggagtgtctgtaattacccccggaacgaacaccagcaaccaagttgcggtgctttatcaggatgttaattgcactgaggttcctgtcgcgatacatgccgaccaactgacgcctacatggcgagtatattcaacgggctccaacgtcttccagacgcgagccggttgtctcattggagctgaacatgtgaacaactcttatgaatgcgatataccaattggggcaggtatctgcgcctcttatcagacgcagactaactcacccagacgagcacggagcgtggcaagccaatccattattgcctacaccatgtccttgggagctgagaattcagtcgcctattctaataatagcattgctataccgacgaactttacaatttccgtaactaccgaaatattgcccgtcagtatgactaagactagcgttgactgcacaatgtacatttgcggcgatagtaccgaatgctctaatcttcttctgcagtatggtagtttttgtacacaactgaatcgagctctgactgggatcgcagtcgaacaggacaaaaatacacaggaagttttcgcgcaagtgaagcaaatctacaaaacgcctcccataaaagatttcggaggattcaatttcagtcagatactccctgatccctctaaaccatctaaacgatcctttatcgaagatttgctgttcaacaaggtgacccttgctgacgctggattcataaagcagtacggggattgtcttggcgatatcgcagcccgagaccttatttgtgcccaaaaatttaacggacttacggtactccctccccttctgactgacgaaatgatagcccagtacaccagtgctctgctggctggcaccataacgagcggatggacttttggtgcgggtgcagcactgcagatccccttcgcgatgcaaatggcatacaggtttaatgggattggggtcacccagaatgtattgtacgagaaccagaagcttatagcgaatcaatttaacagtgcaattggtaagattcaggacagcctttcaagtaccgcgagtgctctcgggaagttgcaggatgtagtaaatcaaaatgcgcaggcgctgaatacgttggttaaacagctcagcagtaattttggagcaatttctagcgtgctgaatgacatcctcagcagactcgataaggtggaggctgaggtacagatagatagactcatcacgggcagattgcagagtttgcagacatacgtcacgcaacaactcattcgagcagcagaaattagagcatccgcaaatctggcggccacgaaaatgtctgagtgcgttctggggcagtccaagagagttgacttttgtgggaaaggatatcatctgatgagttttccgcagtcagcgccacatggtgtggtctttctgcacgttacttatgtccccgcacaggagaagaattttacgaccgcgccagctatttgccatgacggtaaggctcacttcccgagggaaggggtattcgtttctaacggtacgcattggtttgttacgcaacggaacttttatgaaccacagattattaccaccgacaacacattcgtaagtggaaactgtgatgtcgttatcggaatagtaaataataccgtttatgacccccttcagcctgaacttgattccttcaaggaagagctcgataaatactttaagaaccacaccagccccgatgttgacctgggtgatatatctgggatcaacgcttctgtcgtcaacattcaaaaagagatcgatcgcctgaatgaggtggccaaaaacctcaatgaaagtctcattgaccttcaagaactcggtaagtacgagcaatacatcaagtggccatggtacatatggctgggcttcattgctgggttgatagctatagtgatggttacgataatgttgtgttgtatgacatcctgctgtagctgccttaaaggttgttgttcttgcggttcttgttgtaagtttgacgaagatgattcagagcctgttctgaaaggggtgaagctccattatactggtggaagcggtggggttcgggcagagggcagaggctcactgctcacgtgtggtgatgtagaagagaatccaggtcctatgtactcattcgtatccgaggagaccggcacgttgatcgttaattctgtattgttgtttctcgcttttgtggtatttctccttgttacgcttgcgattcttaccgcccttcgcctctgtgcttactgctgcaacattgtgaatgtctccctcgtgaagccctccttttatgtttactccagagtgaaaaacctcaatagctccagggttccagacctgctggtgggcggttctggaggtgtccgtgctgaaggacgcgggtcccttctcacctgcggcgacgttgaggaaaaccctggccctatggctgacagcaatggtactattacggtggaagaactgaaaaagctcttggaacagtggaaccttgtgatcggttttctgtttttgacctggatttgcttgctccagttcgcctatgctaatagaaacaggtttctctatataatcaagttgatttttctgtggctgctctggcccgttacgcttgcgtgttttgtcctggctgctgtgtaccggatcaattggatcactggtggcattgctatcgccatggcttgtcttgtcgggctgatgtggctttcctattttatcgcttcatttaggctgtttgctcgaaccagatcaatgtggtcatttaatccagagactaatattctcttgaatgttccgctgcacggaactatcctcacacgacccctgttggagtccgaattggttatcggtgccgtaattctcaggggccaccttagaatcgcgggccaccatttgggacggtgcgatattaaagacctgcccaaagagatcacagtggccacaagtagaacgctctcatactataaactgggagcttcccagagagtggccggggatagtggcttcgcggcatatagtcgctaccgcatcggtaactataaacttaatacggaccatagtagctctagcgataacattgccttgctggttcagtgataaagacatgataagatacattgatgagtttggacaaaccacaactagaatgcagtgaaaaaaatgctttatttgtgaaatttgtgatgctattgctttatttgtaaccattataagctgcaataaacaagttaacaacaacaattgcattcattttatgtttcaggttcagggggagatgtgggaggttttttaaagcaagtaaaacctctacaaatgtggtaaaaggcacgtcgacgttagacattgattattgactagttgttaatagtaatcaattacggggtcattagttcatagcccatatatggagttccgcgttacataacttacggtaaatggcccgcctggctgaccgcccaacgacccccgcccattgacgtcaataatgacgtatgttcccatagtaacgccaatagggactttccattgacgtcaatgggtggagtatttacggtaaactgcccacttggcagtacatcaagtgtatcatatgccaagtccgccccctattgacgtcaatgacggtaaatggcccgcctggcattatgcccagtacatgaccttacgggactttcctacttggcagtacatctacgtattagtcatcgctattaccatggtgatgcggttttggcagtacaccaatgggcgtggatagcggtttgactcacggggatttccaagtctccaccccattgacgtcaatgggagtttgttttggcaccaaaatcaacgggactttccaaaatgtcgtaataaccccgccccgttgacgcaaatgggcggtaggcgtgtacggtgggaggtctatataagcagagctcgtttagtgaaccgtcagatcactcttctggtccccacagactcagagagaacccagtttaaacgccaccatggctggcacttcccgcaccttgtcctattacaaacttggcgcgagtcaacgggtggcgggtgactccggatttgcggcatattcacgatataggatcgggaattactgcgcagcaggtactacgcagactgcttgcacggatgataacgcgctggcctattacaatacaacaaaaggaggctggccccagatcgcccaattcgccccatcagccagtgctttcttcggcatgagtcgaatcggtatggaagtaacaccctccggcacatggcttacctacactggcgcgataaagctcgatgacaaagaccctaatcctgcgaataacgctgcaattgttctccagcttcctcagggtacgaccctgccaaaaggtttttacgcagagggcggcgtcccaatcaatacgaatagcagcccggacgatcaaataggatactacagaagggccacacggcggatcaggctgtacctctatgcgcttgtctatttcctccagagtattaatttcgtgaggatcatcatgcggttgtggctctgctctacagacgtagtatatcgagcttttgacatttacaatgacaaagtagccgggtttgccaaatttctcaaaaccagacagaagcggacggcaactaaggcttacaatgtgactcaggcgttcgggcggagaggtccggaacagacccaaccttatgtgtgcaatgcaccgggatgtgatgtcacagatgtgactcagctctaccttggagggatgtcctattatgcgtgtctcgtgggcctcatgtggttgtcctatttcatagcatcatttcgattgtttgctcgaacgaggtctatgtggtccttcaatcctgagacgaacatacttctgaatgtcccactccacggcaccatactgactcggccgctccttgaaagtgaactcgtaatcctccttaacaaacacatcgatgcctacaaaacgtttccaccaacggaaccgaagaaggataaaaagaagaaggccgatgaaacgcaggccctgccccaacgccaaaaaaagcagcagacggtcacggttggcgattctgccgaagtagctgtaaagatgtttgacgcctacgtcaatacattctcatcaacctttaatgtgatggatctgtttatgagaattttcactattggaaccgtcactcttaagcagggagaaatcaaagacgcgacaccatctgattttgttagggcaacagccactatccccatacaagccagcttgccatttggatggctgatccttctccaattcgcgtatgctaaccggaatcgctttctctacataataaagctgatcttcctttggcttctctggcccgttttggctgtattccagtcagccagtaagataataactctcaaaaagcggtggcagcttgcacttagtaaaggcgtccatttcgtctgcaatctccttttgctgcatgttatgtctaagcacacagactttagttcagagattattggatacaaagctattgatggtggtgttactagagattgtgtagttctccattcatacttcacgtcagattattatcaactctacagcacgcagctttccacggatacaggcgtagagcatgtgaccttcttcatctataataagatagtcgacgaacctgaggaacatgtccaaattcatacaattgatgggtcctccggcgtatgcaacatcgttaacgtgagccttgtcaaacctagcttctatgtctattctagggttaagaacctgaattcctccagggtccctggacccggaccaggcgccaaatttgttgctgcttggacactgaaagctgctgctgggcccggaccaggccagtacatcaaggccaactctaagtttatcggcatcaccgaattgggacctggacccggctagtgagtttaaactcccatttaaatgtgagggttaatgcttcgagcagagctcgctgatcagcctcgactgtgccttctagttgccagccatctgttgtttgcccctcccccgtgccttccttgaccctggaaggtgccactcccactgtcctttcctaataaaatgaggaaattgcatcgcattgtctgagtaggtgtcattctattctggggggtggggtggggcaggacagcaagggggaggattgggaagacaatagcaggcatgctggggatgcggtgggctctatgg

SEQ ID NO: 75 - DNA, 28278 bp, synthetic construct
  misc_feature 1..28278: note = Description of Artificial Sequence: Synthetic polynucleotide
  source 1..28278: mol_type = other DNA
catcttcaataatatacctcaaactttttgtgcgcgttaatatgcaaatgaggcgtttgaatttggggaggaagggcggtgattggtcgagggatgagcgaccgttaggggcggggcgagtgacgttttgatgacgtggttgcgaggaggagccagtttgcaagttctcgtgggaaaagtgacgtcaaacgaggtgtggtttgaacacggaaatactcaattttcccgcgctctctgacaggaaatgaggtgtttctgggcggatgcaagtgaaaacgggccattttcgcgcgaaaactgaatgaggaagtgaaaatctgagtaatttcgcgtttatggcagggaggagtatttgccgagggccgagtagactttgaccgattacgtgggggtttcgattaccgtgtttttcacctaaatttccgcgtacggtgtcaaagtccggtgtttttacgtaggtgtcagctgatcgccagggtatttaaacctgcgctctccagtcaagaggccactcttgagtgccagcgagaagagttttctcctccgcgccgcgagtcagatctacactttgaaagtagggataaggtagcgagtgagtagtgttctggggcgggggaggacctgcatgagggccagaataactgaaatctgtgcttttctgtgtgttgcagcagcatgagcggaagcggctcctttgagggaggggtattcagcccttatctgacggggcgtctcccctcctgggcgggagtgcgtcagaatgtgatgggatccacggtggacggccggcccgtgcagcccgcgaactcttcaaccctgacctatgcaaccctgagctcttcgtcgttggacgcagctgccgccgcagctgctgcatctgccgccagcgccgtgcgcggaatggccatgggcgccggctactacggcactctggtggccaactcgagttccaccaataatcccgccagcctgaacgaggagaagctgttgctgctgatggcccagctcgaggccttgacccagcgcctgggcgagctgacccagcaggtggctcagctgcaggagcagacgcgggccgcggttgccacggtgaaatccaaataaaaaatgaatcaataaataaacggagacggttgttgattttaacacagagtctgaatctttatttgatttttcgcgcgcggtaggccctggaccaccggtctcgatcattgagcacccggtggatcttttccaggacccggtagaggtgggcttggatgttgaggtacatgggcatgagcccgtcccgggggtggaggtagctccattgcagggcctcgtgctcgggggtggtgttgtaaatcacccagtcatagcaggggcgcagggcatggtgttgcacaatatctttgaggaggagactgatggccacgggcagccctttggtgtaggtgtttacaaatctgttgagctgggagggatgcatgcggggggagatgaggtgcatcttggcctggatcttgagattggcgatgttaccgcccagatcccgcctggggttcatgttgtgcaggaccaccagcacggtgtatccggtgcacttggggaatttatcatgcaacttggaagggaaggcgtgaaagaatttggcgacgcctttgtgcccgcccaggttttccatgcactcatccatgatgatggcgatgggcccgtgggcggcggcctgggcaaagacgtttcgggggtcggacacatcatagttgtggtcctgggtgaggtcatcataggccattttaatgaatttggggcggagggtgccggactgggggacaaaggtaccctcgatcccgggggcgtagttcccctcacagatctgcatctcccaggctttgagctcggagggggggatcatgtccacctgcggggcgataaagaacacggtttccggggcgggggagatgagctgggccgaaagcaagttccggagcagctgggacttgccgcagccggtggggccgtagatgaccccgatgaccggctgcaggtggtagttgagggagagacagctgccgtcctcccggaggaggggggccacctcgttcatcatctcgcgcacgtgcatgttctcgcgcaccagttccgccaggaggcgctctccccccagggataggagctcctggagcgaggcgaagtttttcagcggcttgagtccgtcggccatgggcattttggagagggtttgttgcaagagttccaggcggtcccagagctcggtgatgtgctctacggcatctcgatccagcagacctcctcgtttcgcgggttgggacggctgcgggagtagggcaccagacgatgggcgtccagcgcagccagggtccggtccttccagggtcgcagcgtccgcgtcagggtggtctccgtcacggtgaaggggtgcgcgccgggctgggcgcttgcgagggtgcgcttcaggctcatccggctggtcgaaaaccgctcccgatcggcgccctgcgcgtcggccaggtagcaattgaccatgagttcgtagttgagcgcctcggccgcgtggcctttggcgcggagcttacctttggaagtctgcccgcaggcgggacagaggagggacttgagggcgtagagcttgggggcgaggaagacggactcgggggcgtaggcgtccgcgccgcagtgggcgcagacggtctcgcactccacgagccaggtgaggtcgggctggtcggggtcaaaaaccagtttcccgccgttctttttgatgcgtttcttacctttggtctccatgagctcgtgtccccgctgggtgacaaagaggctgtccgtgtccccgtagaccgactttatgggccggtcctcgagcggtgtgccgcggtcctcctcgtagaggaaccccgcccactccgagacgaaagcccgggtccaggccagcacgaaggaggccacgtgggacgggtagcggtcgttgtccaccagcgggtccaccttttccagggtatgcaaacacatgtccccctcgtccacatccaggaaggtgattggcttgtaagtgtaggccacgtgaccgggggtcccggccgggggggtataaaagggtgcgggtccctgctcgtcctcactgtcttccggatcgctgtccaggagcgccagctgttggggtaggtattccctctcgaaggcgggcatgacctcggcactcaggttgtcagtttctagaaacgaggaggatttgatattgacggtgccggcggagatgcctttcaagagcccctcgtccatctggtcagaaaagacgatctttttgttgtcgagcttggtggcgaaggagccgtagagggcgttggagaggagcttggcgatggagcgcatggtctggtttttttccttgtcggcgcgctccttggcggcgatgttgagctgcacgtactcgcgcgccacgcacttccattcggggaagacggtggtcagctcgtcgggcacgattctgacctgccagccccgattatgcagggtgatgaggtccacactggtggccacctcgccgcgcaggggctcattagtccagcagaggcgtccgcccttgcgcgagcagaaggggggcagggggtccagcatgacctcgtcgggggggtcggcatcgatggtgaagatgccgggcaggaggtcggggtcaaagtagctgatggaagtggccagatcgtccagggcagcttgccattcgcgcacggccagcgcgcgctcgtagggactgaggggcgtgccccagggcatgggatgggtaagcgcggaggcgtacatgccgcagatgtcgtagacgtagaggggctcctcgaggatgccgatgtaggtggggtagcagcgccccccgcggatgctggcgcgcacgtagtcatacagctcgtgcgagggggcgaggagccccgggcccaggttggtgcgactgggcttttcggcgcggtagacgatctggcggaaaatggcatgcgagttggaggagatggtgggcctttggaagatgttgaagtgggcgtggggcagtccgaccgagtcgcggatgaagtgggcgtaggagtcttgcagcttggcgacgagctcggcggtgactaggacgtccagagcgcagtagtcgagggtctcctggatgatgtcatacttgagctgtcccttttgtttccacagctcgcggttgagaaggaactcttcgcggtccttccagtactcttcgagggggaacccgtcctgatctgcacggtaagagcctagcatgtagaactggttgacggccttgtaggcgcagcagcccttctccacggggagggcgtaggcctgggcggccttgcgcagggaggtgtgcgtgagggcgaaagtgtccctgaccatgaccttgaggaactggtgcttgaagtcgatatcgtcgcagcccccctgctcccagagctggaagtccgtgcgcttcttgtaggcggggttgggcaaagcgaaagtaacatcgttgaagaggatcttgcccgcgcggggcataaagttgcgagtgatgcggaaaggttggggcacctcggcccggttgttgatgacctgggcggcgagcacgatctcgtcgaagccgttgatgttgtggcccacgatgtagagttccacgaatcgcggacggcccttgacgtggggcagtttcttgagctcctcgtaggtgagctcgtcggggtcgctgagcccgtgctgctcgagcgcccagtcggcgagatgggggttggcgcggaggaaggaagtccagagatccacggccagggcggtttgcagacggtcccggtactgacggaactgctgcccgacggccattttttcgggggtgacgcagtagaaggtgcgggggtccccgtgccagcgatcccatttgagctggagggcgagatcgagggcgagctcgacgagccggtcgtccccggagagtttcatgaccagcatgaaggggacgagctgcttgccgaaggaccccatccaggtgtaggtttccacatcgtaggtgaggaagagcctttcggtgcgaggatgcgagccgatggggaagaactggatctcctgccaccaattggaggaatggctgttgatgtgatggaagtagaaatgccgacggcgcgccgaacactcgtgcttgtgtttatacaagcggccacagtgctcgcaacgctgcacgggatgcacgtgctgcacgagctgtacctgagttcctttgacgaggaatttcagtgggaagtggagtcgtggcgcctgcatctcgtgctgtactacgtcgtggtggtcggcctggccctcttctgcctcgatggtggtcatgctgacgagcccgcgcgggaggcaggtccagacctcggcgcgagcgggtcggagagcgaggacgagggcgcgcaggccggagctgtccagggtcctgagacgctgcggagtcaggtcagtgggcagcggcggcgcgcggttgacttgcaggagtttttccagggcgcgcgggaggtccagatggtacttgatctccaccgcgccattggtggcgacgtcgatggcttgcagggtcccgtgcccctggggtgtgaccaccgtcccccgtttcttcttgggcggctggggcgacgggggcggtgcctcttccatggttagaagcggcggcgaggacgcgcgccgggcggcaggggcggctcggggcccggaggcaggggcggcaggggcacgtcggcgccgcgcgcgggtaggttctggtactgcgcccggagaagactggcgtgagcgacgacgcgacggttgacgtcctggatctgacgcctctgggtgaaggccacgggacccgtgagtttgaacctgaaagagagttcgacagaatcaatctcggtatcgttgacggcggcctgccgcaggatctcttgcacgtcgcccgagttgtcctggtaggcgatctcggtcatgaactgctcgatctcctcctcttgaaggtctccgcggccggcgcgctccacggtggccgcgaggtcgttggagatgcggcccatgagctgcgagaaggcgttcatgcccgcctcgttccagacgcggctgtagaccacgacgccctcgggatcgcgggcgcgcatgaccacctgggcgaggttgagctccacgtggcgcgtgaagaccgcgtagttgcagaggcgctggtagaggtagttgagcgtggtggcgatgtgctcggtgacgaagaaatacatgatccagcggcggagcggcatctcgctgacgtcgcccagcgcctccaaacgttccatggcctcgtaaaagtccacggcgaagttgaaaaactgggagttgcgcgccgagacggtcaactcctcctccagaagacggatgagctcggcgatggtggcgcgcacctcgcgctcgaaggcccccgggagttcctccacttcctcttcttcctcctccactaacatctcttctacttcctcctcaggcggcagtggtggcgggggagggggcctgcgtcgccggcggcgcacgggcagacggtcgatgaagcgctcgatggtctcgccgcgccggcgtcgcatggtctcggtgacggcgcgcccgtcctcgcggggccgcagcgtgaagacgccgccgcgcatctccaggtggccgggggggtccccgttgggcagggagagggcgctgacgatgcatcttatcaattgccccgtagggactccgcgcaaggacctgagcgtctcgagatccacgggatctgaaaaccgctgaacgaaggcttcgagccagtcgcagtcgcaaggtaggctgagcacggtttcttctggcgggtcatgttggttgggagcggggcgggcgatgctgctggtgatgaagttgaaataggcggttctgagacggcggatggtggcgaggagcaccaggtctttgggcccggcttgctggatgcgcagacggtcggccatgccccaggcgtggtcctgacacctggccaggtccttgtagtagtcctgcatgagccgctccacgggcacctcctcctcgcccgcgcggccgtgcatgcgcgtgagcccgaagccgcgctggggctggacgagcgccaggtcggcgacgacgcgctcggcgaggatggcttgctggatctgggtgagggtggtctggaagtcatcaaagtcgacgaagcggtggtaggctccggtgttgatggtgtaggagcagttggccatgacggaccagttgacggtctggtggcccggacgcacgagctcgtggtacttgaggcgcgagtaggcgcgcgtgtcgaagatgtagtcgttgcaggtgcgcaccaggtactggtagccgatgaggaagtgcggcggcggctggcggtagagcggccatcgctcggtggcgggggcgccgggcgcgaggtcctcgagcatggtgcggtggtagccgtagatgtacctggacatccaggtgatgccggcggcggtggtggaggcgcgcgggaactcgcggacgcggttccagatgttgcgcagcggcaggaagtagttcatggtgggcacggtctggcccgtgaggcgcgcgcagtcgtggatgctctatacgggcaaaaacgaaagcggtcagcggctcgactccgtggcctggaggctaagcgaacgggttgggctgcgcgtgtaccccggttcgaatctcgaatcaggctggagccgcagctaacgtggtattggcactcccgtctcgacccaagcctgcaccaaccctccaggatacggaggcgggtcgttttgcaacttttttttggaggccggatgagactagtaagcgcggaaagcggccgaccgcgatggctcgctgccgtagtctggagaagaatcgccagggttgcgttgcggtgtgccccggttcgaggccggccggattccgcggctaacgagggcgtggctgccccgtcgtttccaagaccccatagccagccgacttctccagttacggagcgagcccctcttttgttttgtttgtttttgccagatgcatcccgtactgcggcagatgcgcccccaccaccctccaccgcaacaacagccccctccacagccggcgcttctgcccccgccccagcagcaacttccagccacgaccgccgcggccgccgtgagcggggctggacagagttatgatcaccagctggccttggaagagggcgaggggctggcgcgcctgggggcgtcgtcgccggagcggcacccgcgcgtgcagatgaaaagggacgctcgcgaggcctacgtgcccaagcagaacctgttcagagacaggagcggcgaggagcccgaggagatgcgcgcggcccggttccacgcggggcgggagctgcggcgcggcctggaccgaaagagggtgctgagggacgaggatttcgaggcggacgagctgacggggatcagccccgcgcgcgcgcacgtggccgcggccaacctggtcacggcgtacgagcagaccgtgaaggaggagagcaacttccaaaaatccttcaacaaccacgtgcgcaccctgatcgcgcgcgaggaggtgaccctgggcctgatgcacctgtgggacctgctggaggccatcgtgcagaaccccaccagcaagccgctgacggcgcagctgttcctggtggtgcagcatagtcgggacaacgaagcgttcagggaggcgctgctgaatatcaccgagcccgagggccgctggctcctggacctggtgaacattctgcagagcatcgtggtgcaggagcgcgggctgccgctgtccgagaagctggcggccatcaacttctcggtgctgagtttgggcaagtactacgctaggaagatctacaagaccccgtacgtgcccatagacaaggaggtgaagatcgacgggttttacatgcgcatgaccctgaaagtgctgaccctgagcgacgatctgggggtgtaccgcaacgacaggatgcaccgtgcggtgagcgccagcaggcggcgcgagctgagcgaccaggagctgatgcatagtctgcagcgggccctgaccggggccgggaccgagggggagagctactttgacatgggcgcggacctgcactggcagcccagccgccgggccttggaggcggcggcaggaccctacgtagaagaggtggacgatgaggtggacgaggagggcgagtacctggaagactgatggcgcgaccgtatttttgctagatgcaacaacaacagccacctcctgatcccgcgatgcgggcggcgctgcagagccagccgtccggcattaactcctcggacgattggacccaggccatgcaacgcatcatggcgctgacgacccgcaaccccgaagcctttagacagcagccccaggccaaccggctctcggccatcctggaggccgtggtgccctcgcgctccaaccccacgcacgagaaggtcctggccatcgtgaacgcgctggtggagaacaaggccatccgcggcgacgaggccggcctggtgtacaacgcgctgctggagcgcgtggcccgctacaacagcaccaacgtgcagaccaacctggaccgcatggtgaccgacgtgcgcgaggccgtggcccagcgcgagcggttccaccgcgagtccaacctgggatccatggtggcgctgaacgccttcctcagcacccagcccgccaacgtgccccggggccaggaggactacaccaacttcatcagcgccctgcgcctgatggtgaccgaggtgccccagagcgaggtgtaccagtccgggccggactacttcttccagaccagtcgccagggcttgcagaccgtgaacctgagccaggctttcaagaacttgcagggcctgtggggcgtgcaggccccggtcggggaccgcgcgacggtgtcgagcctgctgacgccgaactcgcgcctgctgctgctgctggtggcccccttcacggacagcggcagcatcaaccgcaactcgtacctgggctacctgattaacctgtaccgcgaggccatcggccaggcgcacgtggacgagcagacctaccaggagatcacccacgtgagccgcgccctgggccaggacgacccgggcaacctggaagccaccctgaactttttgctgaccaaccggtcgcagaagatcccgccccagtacgcgctcagcaccgaggaggagcgcatcctgcgttacgtgcagcagagcgtgggcctgttcctgatgcaggagggggccacccccagcgccgcgctcgacatgaccgcgcgcaacatggagcccagcatgtacgccagcaaccgcccgttcatcaataaactgatggactacttgcatcgggcggccgccatgaactctgactatttcaccaacgccatcctgaatccccactggctcccgccgccggggttctacacgggcgagtacgacatgcccgaccccaatgacgggttcctgtgggacgatgtggacagcagcgtgttctccccccgaccgggtgctaacgagcgccccttgtggaagaaggaaggcagcgaccgacgcccgtcctcggcgctgtccggccgcgagggtgctgccgcggcggtgcccgaggccgccagtcctttcccgagcttgcccttctcgctgaacagtatccgcagcagcgagctgggcaggatcacgcgcccgcgcttgctgggcgaagaggagtacttgaatgactcgctgttgagacccgagcgggagaagaacttccccaataacgggatagaaagcctggtggacaagatgagccgctggaagacgtatgcgcaggagcacagggacgatccccgggcgtcgcagggggccacgagccggggcagcgccgcccgtaaacgccggtggcacgacaggcagcggggacagatgtgggacgatgaggactccgccgacgacagcagcgtgttggacttgggtgggagtggtaacccgttcgctcacctgcgcccccgtatcgggcgcatgatgtaagagaaaccgaaaataaatgatactcaccaaggccatggcgaccagcgtgcgttcgtttcttctctgttgttgttgtatctagtatgatgaggcgtgcgtacccggagggtcctcctccctcgtacgagagcgtgatgcagcaggcgatggcggcggcggcgatgcagcccccgctggaggctccttacgtgcccccgcggtacctggcgcctacggaggggcggaacagcattcgttactcggagctggcacccttgtacgataccacccggttgtacctggtggacaacaagtcggcggacatcgcctcgctgaactaccagaacgaccacagcaacttcctgaccaccgtggtgcagaacaatgacttcacccccacggaggccagcacccagaccatcaactttgacgagcgctcgcggtggggcggccagctgaaaaccatcatgcacaccaacatgcccaacgtgaacgagttcatgtacagcaacaagttcaaggcgcgggtgatggtctcccgcaagacccccaatggggtgacagtgacagaggattatgatggtagtcaggatgagctgaagtatgaatgggtggaatttgagctgcccgaaggcaacttctcggtgaccatgaccatcgacctgatgaacaacgccatcatcgacaattacttggcggtggggcggcagaacggggtgctggagagcgacatcggcgtgaagttcgacactaggaacttcaggctgggctgggaccccgtgaccgagctggtcatgcccggggtgtacaccaacgaggctttccatcccgatattgtcttgctgcccggctgcggggtggacttcaccgagagccgcctcagcaacctgctgggcattcgcaagaggcagcccttccaggaaggcttccagatcatgtacgaggatctggaggggggcaacatccccgcgctcctggatgtcgacgcctatgagaaaagcaaggaggatgcagcagctgaagcaactgcagccgtagctaccgcctctaccgaggtcaggggcgataattttgcaagcgccgcagcagtggcagcggccgaggcggctgaaaccgaaagtaagatagtcattcagccggtggagaaggatagcaagaacaggagctacaacgtactaccggacaagataaacaccgcctaccgcagctggtacctagcctacaactatggcgaccccgagaagggcgtgcgctcctggacgctgctcaccacctcggacgtcacctgcggcgtggagcaagtctactggtcgctgcccgacatgatgcaagacccggtcaccttccgctccacgcgtcaagttagcaactacccggtggtgggcgccgagctcctgcccgtctactccaagagcttcttcaacgagcaggccgtctactcgcagcagctgcgcgccttcacctcgcttacgcacgtcttcaaccgcttccccgagaaccagatcctcgtccgcccgcccgcgcccaccattaccaccgtcagtgaaaacgttcctgctctcacagatcacgggaccctgccgctgcgcagcagtatccggggagtccagcgcgtgaccgttactgacgccagacgccgcacctgcccctacgtctacaaggccctgggcatagtcgcgccgcgcgtcctctcgagccgcaccttctaaatgtccattctcatctcgcccagtaataacaccggttggggcctgcgcgcgcccagcaagatgtacggaggcgctcgccaacgctccacgcaacaccccgtgcgcgtgcgcgggcacttccgcgctccctggggcgccctcaagggccgcgtgcggtcgcgcaccaccgtcgacgacgtgatcgaccaggtggtggccgacgcgcgcaactacacccccgccgccgcgcccgtctccaccgtggacgccgtcatcgacagcgtggtggccgacgcgcgccggtacgcccgcgccaagagccggcggcggcgcatcgcccggcggcaccggagcacccccgccatgcgcgcggcgcgagccttgctgcgcagggccaggcgcacgggacgcagggccatgctcagggcggccagacgcgcggcttcaggcgccagcgccggcaggacccggagacgcgcggccacggcggcggcagcggccatcgccagcatgtcccgcccgcggcgagggaacgtgtactgggtgcgcgacgccgccaccggtgtgcgcgtgcccgtgcgcacccgcccccctcgcacttgaagatgttcacttcgcgatgttgatgtgtcccagcggcgaggaggatgtccaagcgcaaattcaaggaagagatgctccaggtcatcgcgcctgagatctacggccctgcggtggtgaaggaggaaagaaagccccgcaaaatcaagcgggtcaaaaaggacaaaaaggaagaagaaagtgatgtggacggattggtggagtttgtgcgcgagttcgccccccggcggcgcgtgcagtggcgcgggcggaaggtgcaaccggtgctgagacccggcaccaccgtggtcttcacgcccggcgagcgctccggcaccgcttccaagcgctcctacgacgaggtgtacggggatgatgatattctggagcaggcggccgagcgcctgggcgagtttgcttacggcaagcgcagccgttccgcaccgaaggaagaggcggtgtccatcccgctggaccacggcaaccccacgccgagcctcaagcccgtgaccttgcagcaggtgctgccgaccgcggcgccgcgccgggggttcaagcgcgagggcgaggatctgtaccccaccatgcagctgatggtgcccaagcgccagaagctggaagacgtgctggagaccatgaaggtggacccggacgtgcagcccgaggtcaaggtgcggcccatcaagcaggtggccccgggcctgggcgtgcagaccgtggacatcaagattcccacggagcccatggaaacgcagaccgagcccatgatcaagcccagcaccagcaccatggaggtgcagacggatccctggatgccatcggctcctagtcgaagaccccggcgcaagtacggcgcggccagcctgctgatgcccaactacgcgctgcatccttccatcatccccacgccgggctaccgcggcacgcgcttctaccgcggtcataccagcagccgccgccgcaagaccaccactcgccgccgccgtcgccgcaccgccgctgcaaccacccctgccgccctggtgcggagagtgtaccgccgcggccgcgcacctctgaccctgccgcgcgcgcgctaccacccgagcatcgccatttaaactttcgcctgctttgcagatcaatggccctcacatgccgccttcgcgttcccattacgggctaccgaggaagaaaaccgcgccgtagaaggctggcggggaacgggatgcgtcgccaccaccaccggcggcggcgcgccatcagcaagcggttggggggaggcttcctgcccgcgctgatccccatcatcgccgcggcgatcggggcgatccccggcattgcttccgtggcggtgcaggcctctcagcgccactgagacacacttggaaacatcttgtaataaaccaatggactctgacgctcctggtcctgtgatgtgttttcgtagacagatggaagacatcaatttttcgtccctggctccgcgacacggcacgcggccgttcatgggcacctggagcgacatcggcaccagccaactgaacgggggcgccttcaattggagcagtctctggagcgggcttaagaatttcgggtccacgcttaaaacctatggcagcaaggcgtggaacagcaccacagggcaggcgctgagggataagctgaaagagcagaacttccagcagaaggtggtcgatgggctcgcctcgggcatcaacggggtggtggacctggccaaccaggccgtgcagcggcagatcaacagccgcctggacccggtgccgcccgccggctccgtggagatgccgcaggtggaggaggagctgcctcccctggacaagcggggcgagaagcgaccccgccccgatgcggaggagacgctgctgacgcacacggacgagccgcccccgtacgaggaggcggtgaaactgggtctgcccaccacgcggcccatcgcgcccctggccaccggggtgctgaaacccgaaaagcccgcgaccctggacttgcctcctccccagccttcccgcccctctacagtggctaagcccctgccgccggtggccgtggcccgcgcgcgacccgggggcaccgcccgccctcatgcgaactggcagagcactctgaacagcatcgtgggtctgggagtgcagagtgtgaagcgccgccgctgctattaaacctaccgtagcgcttaacttgcttgtctgtgtgtgtatgtattatgtcgccgccgccgctgtccaccagaaggaggagtgaagaggcgcgtcgccgagttgcaagatggccaccccatcgatgctgccccagtgggcgtacatgcacatcgccggacaggacgcttcggagtacctgagtccgggtctggtgcagtttgcccgcgccacagacacctacttcagtctggggaacaagtttaggaaccccacggtggcgcccacgcacgatgtgaccaccgaccgcagccagcggctgacgctgcgcttcgtgcccgtggaccgcgaggacaacacctactcgtacaaagtgcgctacacgctggccgtgggcgacaaccgcgtgctggacatggccagcacctactttgacatccgcggcgtgctggatcggggccctagcttcaaaccctactccggcaccgcctacaacagtctggcccccaagggagcacccaacacttgtcagtggacatataaagccgatggtgaaactgccacagaaaaaacctatacatatggaaatgcacccgtgcagggcattaacatcacaaaagatggtattcaacttggaactgacaccgatgatcagccaatctacgcagataaaacctatcagcctgaacctcaagtgggtgatgctgaatggcatgacatcactggtactgatgaaaagtatggaggcagagctcttaagcctgataccaaaatgaagccttgttatggttcttttgccaagcctactaataaagaaggaggtcaggcaaatgtgaaaacaggaacaggcactactaaagaatatgacatagacatggctttctttgacaacagaagtgcggctgctgctggcctagctccagaaattgttttgtatactgaaaatgtggatttggaaactccagatacccatattgtatacaaagcaggcacagatgacagcagctcttctattaatttgggtcagcaagccatgcccaacagacctaactacattggtttcagagacaactttatcgggctcatgtactacaacagcactggcaatatgggggtgctggccggtcaggcttctcagctgaatgctgtggttgacttgcaagacagaaacaccgagctgtcctaccagctcttgcttgactctctgggtgacagaacccggtatttcagtatgtggaatcaggcggtggacagctatgatcctgatgtgcgcattattgaaaatcatggtgtggaggatgaacttcccaactattgtttccctctggatgctgttggcagaacagatacttatcagggaattaaggctaatggaactgatcaaaccacatggaccaaagatgacagtgtcaatgatgctaatgagataggcaagggtaatccattcgccatggaaatcaacatccaagccaacctgtggaggaacttcctctacgccaacgtggccctgtacctgcccgactcttacaagtacacgccggccaatgttaccctgcccaccaacaccaacacctacgattacatgaacggccgggtggtggcgccctcgctggtggactcctacatcaacatcggggcgcgctggtcgctggatcccatggacaacgtgaaccccttcaaccaccaccgcaatgcggggctgcgctaccgctccatgctcctgggcaacgggcgctacgtgcccttccacatccaggtgccccagaaatttttcgccatcaagagcctcctgctcctgcccgggtcctacacctacgagtggaacttccgcaaggacgtcaacatgatcctgcagagctccctcggcaacgacctgcgcacggacggggcctccatctccttcaccagcatcaacctctacgccaccttcttccccatggcgcacaacacggcctccacgctcgaggccatgctgcgcaacgacaccaacgaccagtccttcaacgactacctctcggcggccaacatgctctaccccatcccggccaacgccaccaacgtgcccatctccatcccctcgcgcaactgggccgccttccgcggctggtccttcacgcgtctcaagaccaaggagacgccctcgctgggctccgggttcgacccctacttcgtctactcgggctccatcccctacctcgacggcaccttctacctcaaccacaccttcaagaaggtctccatcaccttcgactcctccgtcagctggcccggcaacgaccggctcctgacgcccaacgagttcgaaatcaagcgcaccgtcgacggcgagggctacaacgtggcccagtgcaacatgaccaaggactggttcctggtccagatgctggcccactacaacatcggctaccagggcttctacgtgcccgagggctacaaggaccgcatgtactccttcttccgcaacttccagcccatgagccgccaggtggtggacgaggtcaactacaaggactaccaggccgtcaccctggcctaccagcacaacaactcgggcttcgtcggctacctcgcgcccaccatgcgccagggccagccctaccccgccaactacccctacccgctcatcggcaagagcgccgtcaccagcgtcacccagaaaaagttcctctgcgacagggtcatgtggcgcatccccttctccagcaacttcatgtccatgggcgcgctcaccgacctcggccagaacatgctctatgccaactccgcccacgcgctagacatgaatttcgaagtcgaccccatggatgagtccacccttctctatgttgtcttcgaagtcttcgacgtcgtccgagtgcaccagccccaccgcggcgtcatcgaggccgtctacctgcgcacccccttctcggccggtaacgccaccacctaagctcttgcttcttgcaagccatggccgcgggctccggcgagcaggagctcagggccatcatccgcgacctgggctgcgggccctacttcctgggcaccttcgataagcgcttcccgggattcatggccccgcacaagctggcctgcgccatcgtcaacacggccggccgcgagaccgggggcgagcactggctggccttcgcctggaacccgcgctcgaacacctgctacctcttcgaccccttcgggttctcggacgagcgcctcaagcagatctaccagttcgagtacgagggcctgctgcgccgcagcgccctggccaccgaggaccgctgcgtcaccctggaaaagtccacccagaccgtgcagggtccgcgctcggccgcctgcgggctcttctgctgcatgttcctgcacgccttcgtgcactggcccgaccgccccatggacaagaaccccaccatgaacttgctgacgggggtgcccaacggcatgctccagtcgccccaggtggaacccaccctgcgccgcaaccaggaggcgctctaccgcttcctcaactcccactccgcctactttcgctcccaccgcgcgcgcatcgagaaggccaccgccttcgaccgcatgaatcaagacatgtaaaccgtgtgtgtatgttaaatgtctttaataaacagcactttcatgttacacatgcatctgagatgatttatttagaaatcgaaagggttctgccgggtctcggcatggcccgcgggcagggacacgttgcggaactggtacttggccagccacttgaactcggggatcagcagtttgggcagcggggtgtcggggaaggagtcggtccacagcttccgcgtcagttgcagggcgcccagcaggtcgggcgcggagatcttgaaatcgcagttgggacccgcgttctgcgcgcgggagttgcggtacacggggttgcagcactggaacaccatcagggccgggtgcttcacgctcgccagcaccgtcgcgtcggtgatgctctccacgtcgaggtcctcggcgttggccatcccgaagggggtcatcttgcaggtctgccttcccatggtgggcacgcacccgggcttgtggttgcaatcgcagtgcagggggatcagcatcatctgggcctggtcggcgttcatccccgggtacatggccttcatgaaagcctccaattgcctgaacgcctgctgggccttggctccctcggtgaagaagaccccgcaggacttgctagagaactggttggtggcgcacccggcgtcgtgcacgcagcagcgcgcgtcgttgttggccagctgcaccacgctgcgcccccagcggttctgggtgatcttggcccggtcggggttctccttcagcgcgcgctgcccgttctcgctcgccacatccatctcgatcatgtgctccttctggatcatggtggtcccgtgcaggcaccgcagcttgccctcggcctcggtgcacccgtgcagccacagcgcgcacccggtgcactcccagttcttgtgggcgatctgggaatgcgcgtgcacgaagccctgcaggaagcggcccatcatggtggtcagggtcttgttgctagtgaaggtcagcggaatgccgcggtgctcctcgttgatgtacaggtggcagatgcggcggtacacctcgccctgctcgggcatcagctggaagttggctttcaggtcggtctccacgcggtagcggtccatcagcatagtcatgatttccatacccttctcccaggccgagacgatgggcaggctcatagggttcttcaccatcatcttagcgctagcagccgcggccagggggtcgctctcgtccagggtctcaaagctccgcttgccgtccttctcggtgatccgcaccggggggtagctgaagcccacggccgccagctcctcctcggcctgtctttcgtcctcgctgtcctggctgacgtcctgcaggaccacatgcttggtcttgcggggtttcttcttgggcggcagcggcggcggagatgttggagatggcgagggggagcgcgagttctcgctcaccactactatctcttcctcttcttggtccgaggccacgcggcggtaggtatgtctcttcgggggcagaggcggaggcgacgggctctcgccgccgcgacttggcggatggctggcagagccccttccgcgttcgggggtgcgctcccggcggcgctctgactgacttcctccgcggccggccattgtgttctcctagggaggaacaacaagcatggagactcagccatcgccaacctcgccatctgcccccaccgccgacgagaagcagcagcagcagaatgaaagcttaaccgccccgccgcccagccccgccacctccgacgcggccgtcccagacatgcaagagatggaggaatccatcgagattgacctgggctatgtgacgcccgcggagcacgaggaggagctggcagtgcgcttttcacaagaagagatacaccaagaacagccagagcaggaagcagagaatgagcagagtcaggctgggctcgagcatgacggcgactacctccacctgagcgggggggaggacgcgctcatcaagcatctggcccggcaggccaccatcgtcaaggatgcgctgctcgaccgcaccgaggtgcccctcagcgtggaggagctcagccgcgcctacgagttgaacctcttctcgccgcgcgtgccccccaagcgccagcccaatggcacctgcgagcccaacccgcgcctcaacttctacccggtcttcgcggtgcccgaggccctggccacctaccacatctttttcaagaaccaaaagatccccgtctcctgccgcgccaaccgcacccgcgccgacgcccttttcaacctgggtcccggcgcccgcctacctgatatcgcctccttggaagaggttcccaagatcttcgagggtctgggcagcgacgagactcgggccgcgaacgctctgcaaggagaaggaggagagcatgagcaccacagcgccctggtcgagttggaaggcgacaacgcgcggctggcggtgctcaaacgcacggtcgagctgacccatttcgcctacccggctctgaacctgccccccaaagtcatgagcgcggtcatggaccaggtgctcatcaagcgcgcgtcgcccatctccgaggacgagggcatgcaagactccgaggagggcaagcccgtggtcagcgacgagcagctggcccggtggctgggtcctaatgctagtccccagagtttggaagagcggcgcaaactcatgatggccgtggtcctggtgaccgtggagctggagtgcctgcgccgcttcttcgccgacgcggagaccctgcgcaaggtcgaggagaacctgcactacctcttcaggcacgggttcgtgcgccaggcctgcaagatctccaacgtggagctgaccaacctggtctcctacatgggcatcttgcacgagaaccgcctggggcagaacgtgctgcacaccaccctgcgcggggaggcccggcgcgactacatccgcgactgcgtctacctctacctctgccacacctggcagacgggcatgggcgtgtggcagcagtgtctggaggagcagaacctgaaagagctctgcaagctcctgcagaagaacctcaagggtctgtggaccgggttcgacgagcgcaccaccgcctcggacctggccgacctcattttccccgagcgcctcaggctgacgctgcgcaacggcctgcccgactttatgagccaaagcatgttgcaaaactttcgctctttcatcctcgaacgctccggaatcctgcccgccacctgctccgcgctgccctcggacttcgtgccgctgaccttccgcgagtgccccccgccgctgtggagccactgctacctgctgcgcctggccaactacctggcctaccactcggacgtgatcgaggacgtcagcggcgagggcctgctcgagtgccactgccgctgcaacctctgcacgccgcaccgctccctggcctgcaacccccagctgctgagcgagacccagatcatcggcaccttcgagttgcaagggcccagcgaaggcgagggttcagccgccaaggggggtctgaaactcaccccggggctgtggacctcggcctacttgcgcaagttcgtgcccgaggactaccatcccttcgagatcaggttctacgaggaccaatcccatccgcccaaggccgagctgtcggcctgcgtcatcacccagggggcgatcctggcccaattgcaagccatccagaaatcccgccaagaattcttgctgaaaaagggccgcggggtctacctcgacccccagaccggtgaggagctcaaccccggcttcccccaggatgccccgaggaaacaagaagctgaaagtggagctgccgcccgtggaggatttggaggaagactgggagaacagcagtcaggcagaggaggaggagatggaggaagactgggacagcactcaggcagaggaggacagcctgcaagacagtctggaggaagacgaggaggaggcagaggaggaggtggaagaagcagccgccgccagaccgtcgtcctcggcgggggagaaagcaagcagcacggataccatctccgctccgggtcggggtcccgctcgaccacacagtagatgggacgagaccggacgattcccgaaccccaccacccagaccggtaagaaggagcggcagggatacaagtcctggcgggggcacaaaaacgccatcgtctcctgcttgcaggcctgcgggggcaacatctccttcacccggcgctacctgctcttccaccgcggggtgaactttccccgcaacatcttgcattactaccgtcacctccacagcccctactacttccaagaagaggcagcagcagcagaaaaagaccagcagaaaaccagcagctagaaaatccacagcggcggcagcaggtggactgaggatcgcggcgaacgagccggcgcaaacccgggagctgaggaaccggatctttcccaccctctatgccatcttccagcagagtcgggggcaggagcaggaactgaaagtcaagaaccgttctctgcgctcgctcacccgcagttgtctgtatcacaagagcgaagaccaacttcagcgcactctcgaggacgccgaggctctcttcaacaagtactgcgcgctcactcttaaagagtagcccgcgcccgcccagtcgcagaaaaaggcgggaattacgtcacctgtgcccttcgccctagccgcctccacccatcatcatgagcaaagagattcccacgccttacatgtggagctaccagccccagatgggcctggccgccggtgccgcccaggactactccacccgcatgaattggctcagcgccgggcccgcgatgatctcacgggtgaatgacatccgcgcccaccgaaaccagatactcctagaacagtcagcgctcaccgccacgccccgcaatcacctcaatccgcgtaattggcccgccgccctggtgtaccaggaaattccccagcccacgaccgtactacttccgcgagacgcccaggccgaagtccagctgactaactcaggtgtccagctggcgggcggcgccaccctgtgtcgtcaccgccccgctcagggtataaagcggctggtgatccggggcagaggcacacagctcaacgacgaggtggtgagctcttcgctgggtctgcgacctgacggagtcttccaactcgccggatcggggagatcttccttcacgcctcgtcaggccgtcctgactttggagagttcgtcctcgcagccccgctcgggtggcatcggcactctccagttcgtggaggagttcactccctcggtctacttcaaccccttctccggctcccccggccactacccggacgagttcatcccgaacttcgacgccatcagcgagtcggtggacggctacgattgaaactaatcacccccttatccagtgaaataaagatcatattgatgatgattttacagaaataaaaaataatcatttgatttgaaataaagatacaatcatattgatgatttgagtttaacaaaaaaataaagaatcacttacttgaaatctgataccaggtctctgtccatgttttctgccaacaccacttcactcccctcttcccagctctggtactgcaggccccggcgggctgcaaacttcctccacacgctgaaggggatgtcaaattcctcctgtccctcaatcttcattttatcttctatcagatgtccaaaaagcgcgtccgggtggatgatgacttcgaccccgtctacccctacgatgcagacaacgcaccgaccgtgcccttcatcaacccccccttcgtctcttcagatggattccaagagaagcccctgggggtgttgtccctgcgactggccgaccccgtcaccaccaagaacggggaaatcaccctcaagctgggagagggggtggacctcgattcctcgggaaaactcatctccaacacggccaccaaggccgccgcccctctcagtttttccaacaacaccatttcccttaacatggatcaccccttttacactaaagatggaaaattatccttacaagtttctccaccattaaatatactgagaacaagcattctaaacacactagctttaggttttggatcaggtttaggactccgtggctctgccttggcagtacagttagtctctccacttacatttgatactgatggaaacataaagcttaccttagacagaggtttgcatgttacaacaggagatgcaattgaaagcaacataagctgggctaaaggtttaaaatttgaagatggagccatagcaaccaacattggaaatgggttagagtttggaagcagtagtacagaaacaggtgttgatgatgcttacccaatccaagttaaacttggatctggccttagctttgacagtacaggagccataatggctggtaacaaagaagacgataaactcactttgtggacaacacctgatccatcaccaaactgtcaaatactcgcagaaaatgatgcaaaactaacactttgcttgactaaatgtggtagtcaaatactggccactgtgtcagtcttagttgtaggaagtggaaacctaaaccccattactggcaccgtaagcagtgctcaggtgtttctacgttttgatgcaaacggtgttcttttaacagaacattctacactaaaaaaatactgggggtataggcagggagatagcatagatggcactccatataccaatgctgtaggattcatgcccaatttaaaagcttatccaaagtcacaaagttctactactaaaaataatatagtagggcaagtatacatgaatggagatgtttcaaaacctatgcttctcactataaccctcaatggtactgatgacagcaacagtacatattcaatgtcattttcatacacctggactaatggaagctatgttggagcaacatttggggctaactcttataccttctcatacatcgcccaagaatgaacactgtatcccaccctgcatgccaacccttcccaccccactctgtggaacaaactctgaaacacaaaataaaataaagttcaagtgttttattgattcaacagttttacaggattcgagcagttatttttcctccaccctcccaggacatggaatacaccaccctctccccccgcacagccttgaacatctgaatgccattggtgatggacatgcttttggtctccacgttccacacagtttcagagcgagccagtctcgggtcggtcagggagatgaaaccctccgggcactcccgcatctgcacctcacagctcaacagctgaggattgtcctcggtggtcgggatcacggttatctggaagaagcagaagagcggcggtgggaatcatagtccgcgaacgggatcggccggtggtgtcgcatcaggccccgcagcagtcgctgccgccgccgctccgtcaagctgctgctcagggggtccgggtccagggactccctcagcatgatgcccacggccctcagcatcagtcgtctggtgcggcgggcgcagcagcgcatgcggatctcgctcaggtcgctgcagtacgtgcaacacagaaccaccaggttgttcaacagtccatagttcaacacgctccagccgaaactcatcgcgggaaggatgctacccacgtggccgtcgtaccagatcctcaggtaaatcaagtggtgccccctccagaacacgctgcccacgtacatgatctccttgggcatgtggcggttcaccacctcccggtaccacatcaccctctggttgaacatgcagccccggatgatcctgcggaaccacagggccagcaccgccccgcccgccatgcagcgaagagaccccgggtcccggcaatggcaatggaggacccaccgctcgtacccgtggatcatctgggagctgaacaagtctatgttggcacagcacaggcatatgctcatgcatctcttcagcactctcaactcctcgggggtcaaaaccatatcccagggcacggggaactcttgcaggacagcgaaccccgcagaacagggcaatcctcgcacagaacttacattgtgcatggacagggtatcgcaatcaggcagcaccgggtgatcctccaccagagaagcgcgggtctcggtctcctcacagcgtggtaagggggccggccgatacgggtgatggcgggacgcggctgatcgtgttcgcgaccgtgtcatgatgcagttgctttcggacattttcgtacttgctgtagcagaacctggtccgggcgctgcacaccgatcgccggcggcggtctcggcgcttggaacgctcggtgttgaaattgtaaaacagccactctctcagaccgtgcagcagatctagggcctcaggagtgatgaagatcccatcatgcctgatggctctgatcacatcgaccaccgtggaatgggccagacccagccagatgatgcaattttgttgggtttcggtgacggcgagcctcgggaacaacgatgaagtaaatgcaagcggtgcgttccagcatggttagttagctgatctgtagaaaaaacaaaaatgaacattaaaccatgctagcctggcgaacaggtgggtaaatcgttctctccagcaccaggcaggccacggggtctccggcgcgaccctcgtaaaaattgtcgctatgattgaaaaccatcacagagagacgttcccggtggccggcgtgaatgattcgacaagatgaatacacccccggaacattggcgtccgcgagtgaaaaaaagcgcccgaggaagcaataaggcactacaatgctcagtctcaagtccagcaaagcgatgccatgcggatgaagcacaaaattctcaggtgcgtacaaaatgtaattactcccctcctgcacaggcagcaaagcccccgatccctccaggtacacatacaaagcctcagcgtccatagcttaccgagcagcagcacacaacaggcgcaagagtcagagaaaggctgagctctaacctgtccacccgctctctgctcaatatatagcccagatctacactgacgtaaaggccaaagtctaaaaatacccgccaaataatcacacacgcccagcacacgcccagaaaccggtgacacactcaaaaaaatacgcgcacttcctcaaacgcccaaaactgccgtcatttccgggttcccacgctacgtcatcaaaacacgactttcaaattccgtcgaccgttaaaaacgtcacccgccccgcccctaacggtcgcccgtctctcagccaatcagcgccccgcatccccaaattcaaacacctcatttgcatattaacgcgcacaaaaagtttgaggtatattattgatgatg

SEQ ID NO: 76 - DNA, 29903 bp, Severe acute respiratory syndrome-related coronavirus
  source 1..29903: mol_type = other DNA; note = Severe acute respiratory syndrome coronavirus 2
attaaaggtttataccttcccaggtaacaaaccaaccaactttcgatctcttgtagatctgttctctaaacgaactttaaaatctgtgtggctgtcactcggctgcatgcttagtgcactcacgcagtataattaataactaattactgtcgttgacaggacacgagtaactcgtctatcttctgcaggctgcttacggtttcgtccgtgttgcagccgatcatcagcacatctaggtttcgtccgggtgtgaccgaaaggtaagatggagagccttgtccctggtttcaacgagaaaacacacgtccaactcagtttgcctgttttacaggttcgcgacgtgctcgtacgtggctttggagactccgtggaggaggtcttatcagaggcacgtcaacatcttaaagatggcacttgtggcttagtagaagttgaaaaaggcgttttgcctcaacttgaacagccctatgtgttcatcaaacgttcggatgctcgaactgcacctcatggtcatgttatggttgagctggtagcagaactcgaaggcattcagtacggtcgtagtggtgagacacttggtgtccttgtccctcatgtgggcgaaataccagtggcttaccgcaaggttcttcttcgtaagaacggtaataaaggagctggtggccatagttacggcgccgatctaaagtcatttgacttaggcgacgagcttggcactgatccttatgaagattttcaagaaaactggaacactaaacatagcagtggtgttacccgtgaactcatgcgtgagcttaacggaggggcatacactcgctatgtcgataacaacttctgtggccctgatggctaccctcttgagtgcattaaagaccttctagcacgtgctggtaaagcttcatgcactttgtccgaacaactggactttattgacactaagaggggtgtatactgctgccgtgaacatgagcatgaaattgcttggtacacggaacgttctgaaaagagctatgaattgcagacaccttttgaaattaaattggcaaagaaatttgacaccttcaatggggaatgtccaaattttgtatttcccttaaattccataatcaagactattcaaccaagggttgaaaagaaaaagcttgatggctttatgggtagaattcgatctgtctatccagttgcgtcaccaaatgaatgcaaccaaatgtgcctttcaactctcatgaagtgtgatcattgtggtgaaacttcatggcagacgggcgattttgttaaagccacttgcgaattttgtggcactgagaatttgactaaagaaggtgccactacttgtggttacttaccccaaaatgctgttgttaaaatttattgtccagcatgtcacaattcagaagtaggacctgagcatagtcttgccgaataccataatgaatctggcttgaaaaccattcttcgtaagggtggtcgcactattgcctttggaggctgtgtgttctcttatgttggttgccataacaagtgtgcctattgggttccacgtgctagcgctaacataggttgtaaccatacaggtgttgttggagaaggttccgaaggtcttaatgacaaccttcttgaaatactccaaaaagagaaagtcaacatcaatattgttggtgactttaaacttaatgaagagatcgccattattttggcatctttttctgcttccacaagtgcttttgtggaaactgtgaaaggtttggattataaagcattcaaacaaattgttgaatcctgtggtaattttaaagttacaaaaggaaaagctaaaaaaggtgcctggaatattggtgaacagaaatcaatactgagtcctctttatgcatttgcatcagaggctgctcgtgttgtacgatcaattttctcccgcactcttgaaactgctcaaaattctgtgcgtgttttacagaaggccgctataacaatactagatggaatttcacagtattcactgagactcattgatgctatgatgttcacatctgatttggctactaacaatctagttgtaatggcctacattacaggtggtgttgttcagttgacttcgcagtggctaactaacatctttggcactgtttatgaaaaactcaaacccgtccttgattggcttgaagagaagtttaaggaaggtgtagagtttcttagagacggttgggaaattgttaaatttatctcaacctgtgcttgtgaaattgtcggtggacaaattgtcacctgtgcaaaggaaattaaggagagtgttcagacattctttaagcttgtaaataaatttttggctttgtgtgctgactctatcattattggtggagctaaacttaaagccttgaatttaggtgaaacatttgtcacgcactcaaagggattgtacagaaagtgtgttaaatccagagaagaaactggcctactcatgcctctaaaagccccaaaagaaattatcttcttagagggagaaacacttcccacagaagtgttaacagaggaagttgtcttgaaaactggtgatttacaaccattagaacaacctactagtgaagctgttgaagctccattggttggtacaccagtttgtattaacgggcttatgttgctcgaaatcaaagacacagaaaagtactgtgcccttgcacctaatatgatggtaacaaacaataccttcacactcaaaggcggtgcaccaacaaaggttacttttggtgatgacactgtgatagaagtgcaaggttacaagagtgtgaatatcacttttgaacttgatgaaaggattgataaagtacttaatgagaagtgctctgcctatacagttgaactcggtacagaagtaaatgagttcgcctgtgttgtggcagatgctgtcataaaaactttgcaaccagtatctgaattacttacaccactgggcattgatttagatgagtggagtatggctacatactacttatttgatgagtctggtgagtttaaattggcttcacatatgtattgttctttctaccctccagatgaggatgaagaagaaggtgattgtgaagaagaagagtttgagccatcaactcaatatgagtatggtactgaagatgattaccaaggtaaacctttggaatttggtgccacttctgctgctcttcaacctgaagaagagcaagaagaagattggttagatgatgatagtcaacaaactgttggtcaacaagacggcagtgaggacaatcagacaactactattcaaacaattgttgaggttcaacctcaattagagatggaacttacaccagttgttcagactattgaagtgaatagttttagtggttatttaaaacttactgacaatgtatacattaaaaatgcagacattgtggaagaagctaaaaaggtaaaaccaacagtggttgttaatgcagccaatgtttaccttaaacatggaggaggtgttgcaggagccttaaataaggctactaacaatgccatgcaagttgaatctgatgattacatagctactaatggaccacttaaagtgggtggtagttgtgttttaagcggacacaatcttgctaaacactgtcttcatgttgtcggcccaaatgttaacaaaggtgaagacattcaacttcttaagagtgcttatgaaaattttaatcagcacgaagttctacttgcaccattattatcagctggtatttttggtgctgaccctatacattctttaagagtttgtgtagatactgttcgcacaaatgtctacttagctgtctttgataaaaatctctatgacaaacttgtttcaagctttttggaaatgaagagtgaaaagcaagttgaacaaaagatcgctgagattcctaaagaggaagttaagccatttataactgaaagtaaaccttcagttgaacagagaaaacaagatgataagaaaatcaaagcttgtgttgaagaagttacaacaactctggaagaaactaagttcctcacagaaaacttgttactttatattgacattaatggcaatcttcatccagattctgccactcttgttagtgacattgacatcactttcttaaagaaagatgctccatatatagtgggtgatgttgttcaagagggtgttttaactgctgtggttatacctactaaaaaggctggtggcactactgaaatgctagcgaaagctttgagaaaagtgccaacagacaattatataaccacttacccgggtcagggtttaaatggttacactgtagaggaggcaaagacagtgcttaaaaagtgtaaaagtgccttttacattctaccatctattatctctaatgagaagcaagaaattcttggaactgtttcttggaatttgcgagaaatgcttgcacatgcagaagaaacacgcaaattaatgcctgtctgtgtggaaactaaagccatagtttcaactatacagcgtaaatataagggtattaaaatacaagagggtgtggttgattatggtgctagattttacttttacaccagtaaaacaactgtagcgtcacttatcaacacacttaacgatctaaatgaaactcttgttacaatgccacttggctatgtaacacatggcttaaatttggaagaagctgctcggtatatgagatctctcaaagtgccagctacagtttctgtttcttcacctgatgctgttacagcgtataatggttatcttacttcttcttctaaaacacctgaagaacattttattgaaaccatctcacttgctggttcctataaagattggtcctattctggacaatctacacaactaggtatagaatttcttaagagaggtgataaaagtgtatattacactagtaatcctaccacattccacctagatggtgaagttatcacctttgacaatcttaagacacttctttctttgagagaagtgaggactattaaggtgtttacaacagtagacaacattaacctccacacgcaagttgtggacatgtcaatgacatatggacaacagtttggtccaacttatttggatggagctgatgttactaaaataaaacctcataattcacatgaaggtaaaacattttatgttttacctaatgatgacactctacgtgttgaggcttttgagtactaccacacaactgatcctagttttctgggtaggtacatgtcagcattaaatcacactaaaaagtggaaatacccacaagttaatggtttaacttctattaaatgggcagataacaactgttatcttgccactgcattgttaacactccaacaaatagagttgaagtttaatccacctgctctacaagatgcttattacagagcaagggctggtgaagctgctaacttttgtgcacttatcttagcctactgtaataagacagtaggtgagttaggtgatgttagagaaacaatgagttacttgtttcaacatgccaatttagattcttgcaaaagagtcttgaacgtggtgtgtaaaacttgtggacaacagcagacaacccttaagggtgtagaagctgttatgtacatgggcacactttcttatgaacaatttaagaaaggtgttcagataccttgtacgtgtggtaaacaagctacaaaatatctagtacaacaggagtcaccttttgttatgatgtcagcaccacctgctcagtatgaacttaagcatggtacatttacttgtgctagtgagtacactggtaattaccagtgtggtcactataaacatataacttctaaagaaactttgtattgcatagacggtgctttacttacaaagtcctcagaatacaaaggtcctattacggatgttttctacaaagaaaacagttacacaacaaccataaaaccagttacttataaattggatggtgttgtttgtacagaaattgaccctaagttggacaattattataagaaagacaattcttatttcacagagcaaccaattgatcttgtaccaaaccaaccatatccaaacgcaagcttcgataattttaagtttgtatgtgataatatcaaatttgctgatgatttaaaccagttaactggttataagaaacctgcttcaagagagcttaaagttacatttttccctgacttaaatggtgatgtggtggctattgattataaacactacacaccctcttttaagaaaggagctaaattgttacataaacctattgtttggcatgttaacaatgcaactaataaagccacgtataaaccaaatacctggtgtatacgttgtctttggagcacaaaaccagttgaaacatcaaattcgtttgatgtactgaagtcagaggacgcgcagggaatggataatcttgcctgcgaagatctaaaaccagtctctgaagaagtagtggaaaatcctaccatacagaaagacgttcttgagtgtaatgtgaaaactaccgaagttgtaggagacattatacttaaaccagcaaataatagtttaaaaattacagaagaggttggccacacagatctaatggctgcttatgtagacaattctagtcttactattaagaaacctaatgaattatctagagtattaggtttgaaaacccttgctactcatggtttagctgctgttaatagtgtcccttgggatactatagctaattatgctaagccttttcttaacaaagttgttagtacaactactaacatagttacacggtgtttaaaccgtgtttgtactaattatatgccttatttctttactttattgctacaattgtgtacttttactagaagtacaaattctagaattaaagcatctatgccgactactatagcaaagaatactgttaagagtgtcggtaaattttgtctagaggcttcatttaattatttgaagtcacctaatttttctaaactgataaatattataatttggtttttactattaagtgtttgcctaggttctttaatctactcaaccgctgctttaggtgttttaatgtctaatttaggcatgccttcttactgtactggttacagagaaggctatttgaactctactaatgtcactattgcaacctactgtactggttctataccttgtagtgtttgtcttagtggtttagattctttagacacctatccttctttagaaactatacaaattaccatttcatcttttaaatgggatttaactgcttttggcttagttgcagagtggtttttggcatatattcttttcactaggtttttctatgtacttggattggctgcaatcatgcaattgtttttcagctattttgcagtacattttattagtaattcttggcttatgtggttaataattaatcttgtacaaatggccccgatttcagctatggttagaatgtacatcttctttgcatcattttattatgtatggaaaagttatgtgcatgttgtagacggttgtaattcatcaacttgtatgatgtgttacaaacgtaatagagcaacaagagtcgaatgtacaactattgttaatggtgttagaaggtccttttatgtctatgctaatggaggtaaaggcttttgcaaactacacaattggaattgtgttaattgtgatacattctgtgctggtagtacatttattagtgatgaagttgcgagagacttgtcactacagtttaaaagaccaataaatcctactgaccagtcttcttacatcgttgatagtgttacagtgaagaatggttccatccatctttactttgataaagctggtcaaaagacttatgaaagacattctctctctcattttgttaacttagacaacctgagagctaataacactaaaggttcattgcctattaatgttatagtttttgatggtaaatcaaaatgtgaagaatcatctgcaaaatcagcgtctgtttactacagtcagcttatgtgtcaacctatactgttactagatcaggcattagtgtctgatgttggtgatagtgcggaagttgcagttaaaatgtttgatgcttacgttaatacgttttcatcaacttttaacgtaccaatggaaaaactcaaaacactagttgcaactgcagaagctgaacttgcaaagaatgtgtccttagacaatgtcttatctacttttatttcagcagctcggcaagggtttgttgattcagatgtagaaactaaagatgttgttgaatgtcttaaattgtcacatcaatctgacatagaagttactggcgatagttgtaataactatatgctcacctataacaaagttgaaaacatgacaccccgtgaccttggtgcttgtattgactgtagtgcgcgtcatattaatgcgcaggtagcaaaaagtcacaacattgctttgatatggaacgttaaagatttcatgtcattgtctgaacaactacgaaaacaaatacgtagtgctgctaaaaagaataacttaccttttaagttgacatgtgcaactactagacaagttgttaatgttgtaacaacaaagatagcacttaagggtggtaaaattgttaataattggttgaagcagttaattaaagttacacttgtgttcctttttgttgctgctattttctatttaataacacctgttcatgtcatgtctaaacatactgacttttcaagtgaaatcataggatacaaggctattgatggtggtgtcactcgtgacatagcatctacagatacttgttttgctaacaaacatgctgattttgacacatggtttagccagcgtggtggtagttatactaatgacaaagcttgcccattgattgctgcagtcataacaagagaagtgggttttgtcgtgcctggtttgcctggcacgatattacgcacaactaatggtgactttttgcatttcttacctagagtttttagtgcagttggtaacatctgttacacaccatcaaaacttatagagtacactgactttgcaacatcagcttgtgttttggctgctgaatgtacaatttttaaagatgcttctggtaagccagtaccatattgttatgataccaatgtactagaaggttctgttgcttatgaaagtttacgccctgacacacgttatgtgctcatggatggctctattattcaatttcctaacacctaccttgaaggttctgttagagtggtaacaacttttgattctgagtactgtaggcacggcacttgtgaaagatcagaagctggtgtttgtgtatctactagtggtagatgggtacttaacaatgattattacagatctttaccaggagttttctgtggtgtagatgctgtaaatttacttactaatatgtttacaccactaattcaacctattggtgctttggacatatcagcatctatagtagctggtggtattgtagctatcgtagtaacatgccttgcctactattttatgaggtttagaagagcttttggtgaatacagtcatgtagttgcctttaatactttactattccttatgtcattcactgtactctgtttaacaccagtttactcattcttacctggtgtttattctgttatttacttgtacttgacattttatcttactaatgatgtttcttttttagcacatattcagtggatggttatgttcacacctttagtacctttctggataacaattgcttatatcatttgtatttccacaaagcatttctattggttctttagtaattacctaaagagacgtgtagtctttaatggtgtttcctttagtacttttgaagaagctgcgctgtgcacctttttgttaaataaagaaatgtatctaaagttgcgtagtgatgtgctattacctcttacgcaatataatagatacttagctctttataataagtacaagtattttagtggagcaatggatacaactagctacagagaagctgcttgttgtcatctcgcaaaggctctcaatgacttcagtaactcaggttctgatgttctttaccaaccaccacaaacctctatcacctcagctgttttgcagagtggttttagaaaaatggcattcccatctggtaaagttgagggttgtatggtacaagtaacttgtggtacaactacacttaacggtctttggcttgatgacgtagtttactgtccaagacatgtgatctgcacctctgaagacatgcttaaccctaattatgaagatttactcattcgtaagtctaatcataatttcttggtacaggctggtaatgttcaactcagggttattggacattctatgcaaaattgtgtacttaagcttaaggttgatacagccaatcctaagacacctaagtataagtttgttcgcattcaaccaggacagactttttcagtgttagcttgttacaatggttcaccatctggtgtttaccaatgtgctatgaggcccaatttcactattaagggttcattccttaatggttcatgtggtagtgttggttttaacatagattatgactgtgtctctttttgttacatgcaccatatggaattaccaactggagttcatgctggcacagacttagaaggtaacttttatggaccttttgttgacaggcaaacagcacaagcagctggtacggacacaactattacagttaatgttttagcttggttgtacgctgctgttataaatggagacaggtggtttctcaatcgatttaccacaactcttaatgactttaaccttgtggctatgaagtacaattatgaacctctaacacaagaccatgttgacatactaggacctctttctgctcaaactggaattgccgttttagatatgtgtgcttcattaaaagaattactgcaaaatggtatgaatggacgtaccatattgggtagtgctttattagaagatgaatttacaccttttgatgttgttagacaatgctcaggtgttactttccaaagtgcagtgaaaagaacaatcaagggtacacaccactggttgttactcacaattttgacttcacttttagttttagtccagagtactcaatggtctttgttcttttttttgtatgaaaatgcctttttaccttttgctatgggtattattgctatgtctgcttttgcaatgatgtttgtcaaacataagcatgcatttctctgtttgtttttgttaccttctcttgccactgtagcttattttaatatggtctatatgcctgctagttgggtgatgcgtattatgacatggttggatatggttgatactagtttgtctggttttaagctaaaagactgtgttatgtatgcatcagctgtagtgttactaatccttatgacagcaagaactgtgtatgatgatggtgctaggagagtgtggacacttatgaatgtcttgacactcgtttataaagtttattatggtaatgctttagatcaagccatttccatgtgggctcttataatctctgttacttctaactactcaggtgtagttacaactgtcatgtttttggccagaggtattgtttttatgtgtgttgagtattgccctattttcttcataactggtaatacacttcagtgtataatgctagtttattgtttcttaggctatttttgtacttgttactttggcctcttttgtttactcaaccgctactttagactgactcttggtgtttatgattacttagtttctacacaggagtttagatatatgaattcacagggactactcccacccaagaatagcatagatgccttcaaactcaacattaaattgttgggtgttggtggcaaaccttgtatcaaagtagccactgtacagtctaaaatgtcagatgtaaagtgcacatcagtagtcttactctcagttttgcaacaactcagagtagaatcatcatctaaattgtgggctcaatgtgtccagttacacaatgacattctcttagctaaagatactactgaagcctttgaaaaaatggtttcactactttctgttttgctttccatgcagggtgctgtagacataaacaagctttgtgaagaaatgctggacaacagggcaaccttacaagctatagcctcagagtttagttcccttccatcatatgcagcttttgctactgctcaagaagcttatgagcaggctgttgctaatggtgattctgaagttgttcttaaaaagttgaagaagtctttgaatgtggctaaatctgaatttgaccgtgatgcagccatgcaacgtaagttggaaaagatggctgatcaagctatgacccaaatgtataaacaggctagatctgaggacaagagggcaaaagttactagtgctatgcagacaatgcttttcactatgcttagaaagttggataatgatgcactcaacaacattatcaacaatgcaagagatggttgtgttcccttgaacataatacctcttacaacagcagccaaactaatggttgtcataccagactataacacatataaaaatacgtgtgatggtacaacatttacttatgcatcagcattgtgggaaatccaacaggttgtagatgcagatagtaaaattgttcaacttagtgaaattagtatggacaattcacctaatttagcatggcctcttattgtaacagctttaagggccaattctgctgtcaaattacagaataatgagcttagtcctgttgcactacgacagatgtcttgtgctgccggtactacacaaactgcttgcactgatgacaatgcgttagcttactacaacacaacaaagggaggtaggtttgtacttgcactgttatccgatttacaggatttgaaatgggctagattccctaagagtgatggaactggtactatctatacagaactggaaccaccttgtaggtttgttacagacacacctaaaggtcctaaagtgaagtatttatactttattaaaggattaaacaacctaaatagaggtatggtacttggtagtttagctgccacagtacgtctacaagctggtaatgcaacagaagtgcctgccaattcaactgtattatctttctgtgcttttgctgtagatgctgctaaagcttacaaagattatctagctagtgggggacaaccaatcactaattgtgttaagatgttgtgtacacacactggtactggtcaggcaataacagttacaccggaagccaatatggatcaagaatcctttggtggtgcatcgtgttgtctgtactgccgttgccacatagatcatccaaatcctaaaggattttgtgacttaaaaggtaagtatgtacaaatacctacaacttgtgctaatgaccctgtgggttttacacttaaaaacacagtctgtaccgtctgcggtatgtggaaaggttatggctgtagttgtgatcaactccgcgaacccatgcttcagtcagctgatgcacaatcgtttttaaacgggtttgcggtgtaagtgcagcccgtcttacaccgtgcggcacaggcactagtactgatgtcgtatacagggcttttgacatctacaatgataaagtagctggttttgctaaattcctaaaaactaattgttgtcgcttccaagaaaaggacgaagatgacaatttaattgattcttactttgtagttaagagacacactttctctaactaccaacatgaagaaacaatttataatttacttaaggattgtccagctgttgctaaacatgacttctttaagtttagaatagacggtgacatggtaccacatatatcacgtcaacgtcttactaaatacacaatggcagacctcgtctatgctttaaggcattttgatgaaggtaattgtgacacattaaaagaaatacttgtcacatacaattgttgtgatgatgattatttcaataaaaaggactggtatgattttgtagaaaacccagatatattacgcgtatacgccaacttaggtgaacgtgtacgccaagctttgttaaaaacagtacaattctgtgatgccatgcgaaatgctggtattgttggtgtactgacattagataatcaagatctcaatggtaactggtatgatttcggtgatttcatacaaaccacgccaggtagtggagttcctgttgtagattcttattattcattgttaatgcctatattaaccttgaccagggctttaactgcagagtcacatgttgacactgacttaacaaagccttacattaagtgggatttgttaaaatatgacttcacggaagagaggttaaaactctttgaccgttattttaaatattgggatcagacataccacccaaattgtgttaactgtttggatgacagatgcattctgcattgtgcaaactttaatgttttattctctacagtgttcccacctacaagttttggaccactagtgagaaaaatatttgttgatggtgttccatttgtagtttcaactggataccacttcagagagctaggtgttgtacataatcaggatgtaaacttacatagctctagacttagttttaaggaattacttgtgtatgctgctgaccctgctatgcacgctgcttctggtaatctattactagataaacgcactacgtgcttttcagtagctgcacttactaacaatgttgcttttcaaactgtcaaacccggtaattttaacaaagacttctatgactttgctgtgtctaagggtttctttaaggaaggaagttctgttgaattaaaacacttcttctttgctcaggatggtaatgctgctatcagcgattatgactactatcgttataatctaccaacaatgtgtgatatcagacaactactatttgtagttgaagttgttgataagtactttgattgttacgatggtggctgtattaatgctaaccaagtcatcgtcaacaacctagacaaatcagctggttttccatttaataaatggggtaaggctagactttattatgattcaatgagttatgaggatcaagatgcacttttcgcatatacaaaacgtaatgtcatccctactataactcaaatgaatcttaagtatgccattagtgcaaagaatagagctcgcaccgtagctggtgtctctatctgtagtactatgaccaatagacagtttcatcaaaaattattgaaatcaatagccgccactagaggagctactgtagtaattggaacaagcaaattctatggtggttggcacaacatgttaaaaactgtttatagtgatgtagaaaaccctcaccttatgggttgggattatcctaaatgtgatagagccatgcctaacatgcttagaattatggcctcacttgttcttgctcgcaaacatacaacgtgttgtagcttgtcacaccgtttctatagattagctaatgagtgtgctcaagtattgagtgaaatggtcatgtgtggcggttcactatatgttaaaccaggtggaacctcatcaggagatgccacaactgcttatgctaatagtgtttttaacatttgtcaagctgtcacggccaatgttaatgcacttttatctactgatggtaacaaaattgccgataagtatgtccgcaatttacaacacagactttatgagtgtctctatagaaatagagatgttgacacagactttgtgaatgagttttacgcatatttgcgtaaacatttctcaatgatgatactctctgacgatgctgttgtgtgtttcaatagcacttatgcatctcaaggtctagtggctagcataaagaactttaagtcagttctttattatcaaaacaatgtttttatgtctgaagcaaaatgttggactgagactgaccttactaaaggacctcatgaattttgctctcaacatacaatgctagttaaacagggtgatgattatgtgtaccttccttacccagatccatcaagaatcctaggggccggctgttttgtagatgatatcgtaaaaacagatggtacacttatgattgaacggttcgtgtctttagctatagatgcttacccacttactaaacatcctaatcaggagtatgctgatgtctttcatttgtacttacaatacataagaaagctacatgatgagttaacaggacacatgttagacatgtattctgttatgcttactaatgataacacttcaaggtattgggaacctgagttttatgaggctatgtacacaccgcatacagtcttacaggctgttggggcttgtgttctttgcaattcacagacttcattaagatgtggtgcttgcatacgtagaccattcttatgttgtaaatgctgttacgaccatgtcatatcaacatcacataaattagtcttgtctgttaatccgtatgtttgcaatgctccaggttgtgatgtcacagatgtgactcaactttacttaggaggtatgagctattattgtaaatcacataaaccacccattagttttccattgtgtgctaatggacaagtttttggtttatataaaaatacatgtgttggtagcgataatgttactgactttaatgcaattgcaacatgtgactggacaaatgctggtgattacattttagctaacacctgtactgaaagactcaagctttttgcagcagaaacgctcaaagctactgaggagacatttaaactgtcttatggtattgctactgtacgtgaagtgctgtctgacagagaattacatctttcatgggaagttggtaaacctagaccaccacttaaccgaaattatgtctttactggttatcgtgtaactaaaaacagtaaagtacaaataggagagtacacctttgaaaaaggtgactatggtgatgctgttgtttaccgaggtacaacaacttacaaattaaatgttggtgattattttgtgctgacatcacatacagtaatgccattaagtgcacctacactagtgccacaagagcactatgttagaattactggcttatacccaacactcaatatctcagatgagttttctagcaatgttgcaaattatcaaaaggttggtatgcaaaagtattctacactccagggaccacctggtactggtaagagtcattttgctattggcctagctctctactacccttctgctcgcatagtgtatacagcttgctctcatgccgctgttgatgcactatgtgagaaggcattaaaatatttgcctatagataaatgtagtagaattatacctgcacgtgctcgtgtagagtgttttgataaattcaaagtgaattcaacattagaacagtatgtcttttgtactgtaaatgcattgcctgagacgacagcagatatagttgtctttgatgaaatttcaatggccacaaattatgatttgagtgttgtcaatgccagattacgtgctaagcactatgtgtacattggcgaccctgctcaattacctgcaccacgcacattgctaactaagggcacactagaaccagaatatttcaattcagtgtgtagacttatgaaaactataggtccagacatgttcctcggaacttgtcggcgttgtcctgctgaaattgttgacactgtgagtgctttggtttatgataataagcttaaagcacataaagacaaatcagctcaatgctttaaaatgttttataagggtgttatcacgcatgatgtttcatctgcaattaacaggccacaaataggcgtggtaagagaattccttacacgtaaccctgcttggagaaaagctgtctttatttcaccttataattcacagaatgctgtagcctcaaagattttgggactaccaactcaaactgttgattcatcacagggctcagaatatgactatgtcatattcactcaaaccactgaaacagctcactcttgtaatgtaaacagatttaatgttgctattaccagagcaaaagtaggcatactttgcataatgtctgatagagacctttatgacaagttgcaatttacaagtcttgaaattccacgtaggaatgtggcaactttacaagctgaaaatgtaacaggactctttaaagattgtagtaaggtaatcactgggttacatcctacacaggcacctacacacctcagtgttgacactaaattcaaaactgaaggtttatgtgttgacatacctggcatacctaaggacatgacctatagaagactcatctctatgatgggttttaaaatgaattatcaagttaatggttaccctaacatgtttatcacccgcgaagaagctataagacatgtacgtgcatggattggcttcgatgtcgaggggtgtcatgctactagagaagctgttggtaccaatttacctttacagctaggtttttctacaggtgttaacctagttgctgtacctacaggttatgttgatacacctaataatacagatttttccagagttagtgctaaaccaccgcctggagatcaatttaaacacctcataccacttatgtacaaaggacttccttggaatgtagtgcgtataaagattgtacaaatgttaagtgacacacttaaaaatctctctgacagagtcgtatttgtcttatgggcacatggctttgagttgacatctatgaagtattttgtgaaaataggacctgagcgcacctgttgtctatgtgatagacgtgccacatgcttttccactgcttcagacacttatgcctgttggcatcattctattggatttgattacgtctataatccgtttatgattgatgttcaacaatggggttttacaggtaacctacaaagcaaccatgatctgtattgtcaagtccatggtaatgcacatgtagctagttgtgatgcaatcatgactaggtgtctagctgtccacgagtgctttgttaagcgtgttgactggactattgaatatcctataattggtgatgaactgaagattaatgcggcttgtagaaaggttcaacacatggttgttaaagctgcattattagcagacaaattcccagttcttcacgacattggtaaccctaaagctattaagtgtgtacctcaagctgatgtagaatggaagttctatgatgcacagccttgtagtgacaaagcttataaaatagaagaattattctattcttatgccacacattctgacaaattcacagatggtgtatgcctattttggaattgcaatgtcgatagatatcctgctaattccattgtttgtagatttgacactagagtgctatctaaccttaacttgcctggttgtgatggtggcagtttgtatgtaaataaacatgcattccacacaccagcttttgataaaagtgcttttgttaatttaaaacaattaccatttttctattactctgacagtccatgtgagtctcatggaaaacaagtagtgtcagatatagattatgtaccactaaagtctgctacgtgtataacacgttgcaatttaggtggtgctgtctgtagacatcatgctaatgagtacagattgtatctcgatgcttataacatgatgatctcagctggctttagcttgtgggtttacaaacaatttgatacttataacctctggaacacttttacaagacttcagagtttagaaaatgtggcttttaatgttgtaaataagggacactttgatggacaacagggtgaagtaccagtttctatcattaataacactgtttacacaaaagttgatggtgttgatgtagaattgtttgaaaataaaacaacattacctgttaatgtagcatttgagctttgggctaagcgcaacattaaaccagtaccagaggtgaaaatactcaataatttgggtgtggacattgctgctaatactgtgatctgggactacaaaagagatgctccagcacatatatctactattggtgtttgttctatgactgacatagccaagaaaccaactgaaacgatttgtgcaccactcactgtcttttttgatggtagagttgatggtcaagtagacttatttagaaatgcccgtaatggtgttcttattacagaaggtagtgttaaaggtttacaaccatctgtaggtcccaaacaagctagtcttaatggagtcacattaattggagaagccgtaaaaacacagttcaattattataagaaagttgatggtgttgtccaacaattacctgaaacttactttactcagagtagaaatttacaagaatttaaacccaggagtcaaatggaaattgatttcttagaattagctatggatgaattcattgaacggtataaattagaaggctatgccttcgaacatatcgtttatggagattttagtcatagtcagttaggtggtttacatctactgattggactagctaaacgttttaaggaatcaccttttgaattagaagattttattcctatggacagtacagttaaaaactatttcataacagatgcgcaaacaggttcatctaagtgtgtgtgttctgttattgatttattacttgatgattttgttgaaataataaaatcccaagatttatctgtagtttctaaggttgtcaaagtgactattgactatacagaaatttcatttatgctttggtgtaaagatggccatgtagaaacattttacccaaaattacaatctagtcaagcgtggcaaccgggtgttgctatgcctaatctttacaaaatgcaaagaatgctattagaaaagtgtgaccttcaaaattatggtgatagtgcaacattacctaaaggcataatgatgaatgtcgcaaaatatactcaactgtgtcaatatttaaacacattaacattagctgtaccctataatatgagagttatacattttggtgctggttctgataaaggagttgcaccaggtacagctgttttaagacagtggttgcctacgggtacgctgcttgtcgattcagatcttaatgactttgtctctgatgcagattcaactttgattggtgattgtgcaactgtacatacagctaataaatgggatctcattattagtgatatgtacgaccctaagactaaaaatgttacaaaagaaaatgactctaaagagggttttttcacttacatttgtgggtttatacaacaaaagctagctcttggaggttccgtggctataaagataacagaacattcttggaatgctgatctttataagctcatgggacacttcgcatggtggacagcctttgttactaatgtgaatgcgtcatcatctgaagcatttttaattggatgtaattatcttggcaaaccacgcgaacaaatagatggttatgtcatgcatgcaaattacatattttggaggaatacaaatccaattcagttgtcttcctattctttatttgacatgagtaaatttccccttaaattaaggggtactgctgttatgtctttaaaagaaggtcaaatcaatgatatgattttatctcttcttagtaaaggtagacttataattagagaaaacaacagagttgttatttctagtgatgttcttgttaacaactaaacgaacaatgtttgtttttcttgttttattgccactagtctctagtcagtgtgttaatcttacaaccagaactcaattaccccctgcatacactaattctttcacacgtggtgtttattaccctgacaaagttttcagatcctcagttttacattcaactcaggacttgttcttacctttcttttccaatgttacttggttccatgctatacatgtctctgggaccaatggtactaagaggtttgataaccctgtcctaccatttaatgatggtgtttattttgcttccactgagaagtctaacataataagaggctggatttttggtactactttagattcgaagacccagtccctacttattgttaataacgctactaatgttgttattaaagtctgtgaatttcaattttgtaatgatccatttttgggtgtttattaccacaaaaacaacaaaagttggatggaaagtgagttcagagtttattctagtgcgaataattgcacttttgaatatgtctctcagccttttcttatggaccttgaaggaaaacagggtaatttcaaaaatcttagggaatttgtgtttaagaatattgatggttattttaaaatatattctaagcacacgcctattaatttagtgcgtgatctccctcagggtttttcggctttagaaccattggtagatttgccaataggtattaacatcactaggtttcaaactttacttgctttacatagaagttatttgactcctggtgattcttcttcaggttggacagctggtgctgcagcttattatgtgggttatcttcaacctaggacttttctattaaaatataatgaaaatggaaccattacagatgctgtagactgtgcacttgaccctctctcagaaacaaagtgtacgttgaaatccttcactgtagaaaaaggaatctatcaaacttctaactttagagtccaaccaacagaatctattgttagatttcctaatattacaaacttgtgcccttttggtgaagtttttaacgccaccagatttgcatctgtttatgcttggaacaggaagagaatcagcaactgtgttgctgattattctgtcctatataattccgcatcattttccacttttaagtgttatggagtgtctcctactaaattaaatgatctctgctttactaatgtctatgcagattcatttgtaattagaggtgatgaagtcagacaaatcgctccagggcaaactggaaagattgctgattataattataaattaccagatgattttacaggctgcgttatagcttggaattctaacaatcttgattctaaggttggtggtaattataattacctgtatagattgtttaggaagtctaatctcaaaccttttgagagagatatttcaactgaaatctatcaggccggtagcacaccttgtaatggtgttgaaggttttaattgttactttcctttacaatcatatggtttccaacccactaatggtgttggttaccaaccatacagagtagtagtactttcttttgaacttctacatgcaccagcaactgtttgtggacctaaaaagtctactaatttggttaaaaacaaatgtgtcaatttcaacttcaatggtttaacaggcacaggtgttcttactgagtctaacaaaaagtttctgcctttccaacaatttggcagagacattgctgacactactgatgctgtccgtgatccacagacacttgagattcttgacattacaccatgttcttttggtggtgtcagtgttataacaccaggaacaaatacttctaaccaggttgctgttctttatcaggatgttaactgcacagaagtccctgttgctattcatgcagatcaacttactcctacttggcgtgtttattctacaggttctaatgtttttcaaacacgtgcaggctgtttaataggggctgaacatgtcaacaactcatatgagtgtgacatacccattggtgcaggtatatgcgctagttatcagactcagactaattctcctcggcgggcacgtagtgtagctagtcaatccatcattgcctacactatgtcacttggtgcagaaaattcagttgcttactctaataactctattgccatacccacaaattttactattagtgttaccacagaaattctaccagtgtctatgaccaagacatcagtagattgtacaatgtacatttgtggtgattcaactgaatgcagcaatcttttgttgcaatatggcagtttttgtacacaattaaaccgtgctttaactggaatagctgttgaacaagacaaaaacacccaagaagtttttgcacaagtcaaacaaatttacaaaacaccaccaattaaagattttggtggttttaatttttcacaaatattaccagatccatcaaaaccaagcaagaggtcatttattgaagatctacttttcaacaaagtgacacttgcagatgctggcttcatcaaacaatatggtgattgccttggtgatattgctgctagagacctcatttgtgcacaaaagtttaacggccttactgttttgccacctttgctcacagatgaaatgattgctcaatacacttctgcactgttagcgggtacaatcacttctggttggacctttggtgcaggtgctgcattacaaataccatttgctatgcaaatggcttataggtttaatggtattggagttacacagaatgttctctatgagaaccaaaaattgattgccaaccaatttaatagtgctattggcaaaattcaagactcactttcttccacagcaagtgcacttggaaaacttcaagatgtggtcaaccaaaatgcacaagctttaaacacgcttgttaaacaacttagctccaattttggtgcaatttcaagtgttttaaatgatatcctttcacgtcttgacaaagttgaggctgaagtgcaaattgataggttgatcacaggcagacttcaaagtttgcagacatatgtgactcaacaattaattagagctgcagaaatcagagcttctgctaatcttgctgctactaaaatgtcagagtgtgtacttggacaatcaaaaagagttgatttttgtggaaagggctatcatcttatgtccttccctcagtcagcacctcatggtgtagtcttcttgcatgtgacttatgtccctgcacaagaaaagaacttcacaactgctcctgccatttgtcatgatggaaaagcacactttcctcgtgaaggtgtctttgtttcaaatggcacacactggtttgtaacacaaaggaatttttatgaaccacaaatcattactacagacaacacatttgtgtctggtaactgtgatgttgtaataggaattgtcaacaacacagtttatgatcctttgcaacctgaattagactcattcaaggaggagttagataaatattttaagaatcatacatcaccagatgttgatttaggtgacatctctggcattaatgcttcagttgtaaacattcaaaaagaaattgaccgcctcaatgaggttgccaagaatttaaatgaatctctcatcgatctccaagaacttggaaagtatgagcagtatataaaatggccatggtacatttggctaggttttatagctggcttgattgccatagtaatggtgacaattatgctttgctgtatgaccagttgctgtagttgtctcaagggctgttgttcttgtggatcctgctgcaaatttgatgaagacgactctgagccagtgctcaaaggagtcaaattacattacacataaacgaacttatggatttgtttatgagaatcttcacaattggaactgtaactttgaagcaaggtgaaatcaaggatgctactccttcagattttgttcgcgctactgcaacgataccgatacaagcctcactccctttcggatggcttattgttggcgttgcacttcttgctgtttttcagagcgcttccaaaatcataaccctcaaaaagagatggcaactagcactctccaagggtgttcactttgtttgcaacttgctgttgttgtttgtaacagtttactcacaccttttgctcgttgctgctggccttgaagccccttttctctatctttatgctttagtctacttcttgcagagtataaactttgtaagaataataatgaggctttggctttgctggaaatgccgttccaaaaacccattactttatgatgccaactattttctttgctggcatactaattgttacgactattgtataccttacaatagtgtaacttcttcaattgtcattacttcaggtgatggcacaacaagtcctatttctgaacatgactaccagattggtggttatactgaaaaatgggaatctggagtaaaagactgtgttgtattacacagttacttcacttcagactattaccagctgtactcaactcaattgagtacagacactggtgttgaacatgttaccttcttcatctacaataaaattgttgatgagcctgaagaacatgtccaaattcacacaatcgacggttcatccggagttgttaatccagtaatggaaccaatttatgatgaaccgacgacgactactagcgtgcctttgtaagcacaagctgatgagtacgaacttatgtactcattcgtttcggaagagacaggtacgttaatagttaatagcgtacttctttttcttgctttcgtggtattcttgctagttacactagccatccttactgcgcttcgattgtgtgcgtactgctgcaatattgttaacgtgagtcttgtaaaaccttctttttacgtttactctcgtgttaaaaatctgaattcttctagagttcctgatcttctggtctaaacgaactaaatattatattagtttttctgtttggaactttaattttagccatggcagattccaacggtactattaccgttgaagagcttaaaaagctccttgaacaatggaacctagtaataggtttcctattccttacatggatttgtcttctacaatttgcctatgccaacaggaataggtttttgtatataattaagttaattttcctctggctgttatggccagtaactttagcttgttttgtgcttgctgctgtttacagaataaattggatcaccggtggaattgctatcgcaatggcttgtcttgtaggcttgatgtggctcagctacttcattgcttctttcagactgtttgcgcgtacgcgttccatgtggtcattcaatccagaaactaacattcttctcaacgtgccactccatggcactattctgaccagaccgcttctagaaagtgaactcgtaatcggagctgtgatccttcgtggacatcttcgtattgctggacaccatctaggacgctgtgacatcaaggacctgcctaaagaaatcactgttgctacatcacgaacgctttcttattacaaattgggagcttcgcagcgtgtagcaggtgactcaggttttgctgcatacagtcgctacaggattggcaactataaattaaacacagaccattccagtagcagtgacaatattgctttgcttgtacagtaagtgacaacagatgtttcatctcgttgactttcaggttactatagcagagatattactaattattatgaggacttttaaagtttccatttggaatcttgattacatcataaacctcataattaaaaatttatctaagtcactaactgagaataaatattctcaattagatgaagagcaaccaatggagattgattaaacgaacatgaaaattattcttttcttggcactgataacactcgctacttgtgagctttatcactaccaagagtgtgttagaggtacaacagtacttttaaaagaaccttgctcttctggaacatacgagggcaattcaccatttcatcctctagctgataacaaatttgcactgacttgctttagcactcaatttgcttttgcttgtcctgacggcgtaaaacacgtctatcagttacgtgccagatcagtttcacctaaactgttcatcagacaagaggaagttcaagaactttactctccaatttttcttattgttgcggcaatagtgtttataacactttgcttcacactcaaaagaaagacagaatgattgaactttcattaattgacttctatttgtgctttttagcctttctgctattccttgttttaattatgcttattatcttttggttctcacttgaactgcaagatcataatgaaacttgtcacgcctaaacgaacatgaaatttcttgttttcttaggaatcatcacaactgtagctgcatttcaccaagaatgtagtttacagtcatgtactcaacatcaaccatatgtagttgatgacccgtgtcctattcacttctattctaaatggtatattagagtaggagctagaaaatcagcacctttaattgaattgtgcgtggatgaggctggttctaaatcacccattcagtacatcgatatcggtaattatacagtttcctgtttaccttttacaattaattgccaggaacctaaattgggtagtcttgtagtgcgttgttcgttctatgaagactttttagagtatcatgacgttcgtgttgttttagatttcatctaaacgaacaaactaaaatgtctgataatggaccccaaaatcagcgaaatgcaccccgcattacgtttggtggaccctcagattcaactggcagtaaccagaatggagaacgcagtggggcgcgatcaaaacaacgtcggccccaaggtttacccaataatactgcgtcttggttcaccgctctcactcaacatggcaaggaagaccttaaattccctcgaggacaaggcgttccaattaacaccaatagcagtccagatgaccaaattggctactaccgaagagctaccagacgaattcgtggtggtgacggtaaaatgaaagatctcagtccaagatggtatttctactacctaggaactgggccagaagctggacttccctatggtgctaacaaagacggcatcatatgggttgcaactgagggagccttgaatacaccaaaagatcacattggcacccgcaatcctgctaacaatgctgcaatcgtgctacaacttcctcaaggaacaacattgccaaaaggcttctacgcagaagggagcagaggcggcagtcaagcctcttctcgttcctcatcacgtagtcgcaacagttcaagaaattcaactccaggcagcagtaggggaacttctcctgctagaatggctggcaatggcggtgatgctgctcttgctttgctgctgcttgacagattgaaccagcttgagagcaaaatgtctggtaaaggccaacaacaacaaggccaaactgtcactaagaaatctgctgctgaggcttctaagaagcctcggcaaaaacgtactgccactaaagcatacaatgtaacacaagctttcggcagacgtggtccagaacaaacccaaggaaattttggggaccaggaactaatcagacaaggaactgattacaaacattggccgcaaattgcacaatttgcccccagcgcttcagcgttcttcggaatgtcgcgcattggcatggaagtcacaccttcgggaacgtggttgacctacacaggtgccatcaaattggatgacaaagatccaaatttcaaagatcaagtcattttgctgaataagcatattgacgcatacaaaacattcccaccaacagagcctaaaaaggacaaaaagaagaaggctgatgaaactcaagccttaccgcagagacagaagaaacagcaaactgtgactcttcttcctgctgcagatttggatgatttctccaaacaattgcaacaatccatgagcagtgctgactcaactcaggcctaaactcatgcagaccacacaaggcagatgggctatataaacgttttcgcttttccgtttacgatatatagtctactcttgtgcagaatgaattctcgtaactacatagcacaagtagatgtagttaactttaatctcacatagcaatctttaatcagtgtgtaacattagggaggacttgaaagagccaccacattttcaccgaggccacgcggagtacgatcgagtgtacagtgaacaatgctagggagagctgcctatatggaagagccctaatgtgtaaaattaattttagtagtgctatccccatgtgattttaatagcttcttaggagaatgacaaaaaaaaaaaaaaaaaaaaaaaaaaaaaaaaa

SEQ ID NO: 77 - DNA, 7912 bp, synthetic construct
  misc_feature 1..7912: note = Description of Artificial Sequence: Synthetic polynucleotide
  source 1..7912: mol_type = other DNA
taatacgactcactataatgggcggcgcatgagagaagcccagaccaattacctacccaaaatggagaaagttcacgttgacatcgaggaagacagcccattcctcagagctttgcagcggagcttcccgcagtttgaggtagaagccaagcaggtcactgataatgaccatgctaatgccagagcgttttcgcatctggcttcaaaactgatcgaaacggaggtggacccatccgacacgatccttgacattggaagtgcgcccgcccgcagaatgtattctaagcacaagtatcattgtatctgtccgatgagatgtgcggaagatccggacagattgtataagtatgcaactaagctgaagaaaaactgtaaggaaataactgataaggaattggacaagaaaatgaaggagctcgccgccgtcatgagcgaccctgacctggaaactgagactatgtgcctccacgacgacgagtcgtgtcgctacgaagggcaagtcgctgtttaccaggatgtatacgcggttgacggaccgacaagtctctatcaccaagccaataagggagttagagtcgcctactggataggctttgacaccaccccttttatgtttaagaacttggctggagcatatccatcatactctaccaactgggccgacgaaaccgtgttaacggctcgtaacataggcctatgcagctctgacgttatggagcggtcacgtagagggatgtccattcttagaaagaagtatttgaaaccatccaacaatgttctattctctgttggctcgaccatctaccacgagaagagggacttactgaggagctggcacctgccgtctgtatttcacttacgtggcaagcaaaattacacatgtcggtgtgagactatagttagttgcgacgggtacgtcgttaaaagaatagctatcagtccaggcctgtatgggaagccttcaggctatgctgctacgatgcaccgcgagggattcttgtgctgcaaagtgacagacacattgaacggggagagggtctcttttcccgtgtgcacgtatgtgccagctacattgtgtgaccaaatgactggcatactggcaacagatgtcagtgcggacgacgcgcaaaaactgctggttgggctcaaccagcgtatagtcgtcaacggtcgcacccagagaaacaccaataccatgaaaaattaccttttgcccgtagtggcccaggcatttgctaggtgggcaaaggaatataaggaagatcaagaagatgaaaggccactaggactacgagatagacagttagtcatggggtgttgttgggcttttagaaggcacaagataacatctatttataagcgcccggatacccaaaccatcatcaaagtgaacagcgatttccactcattcgtgctgcccaggataggcagtaacacattggagatcgggctgagaacaagaatcaggaaaatgttagaggagcacaaggagccgtcacctctcattaccgccgaggacgtacaagaagctaagtgcgcagccgatgaggctaaggaggtgcgtgaagccgaggagttgcgcgcagctctaccacctttggcagctgatgttgaggagcccactctggaagccgatgtcgacttgatgttacaagaggctggggccggctcagtggagacacctcgtggcttgataaaggttaccagctacgctggcgaggacaagatcggctcttacgctgtgctttctccgcaggctgtactcaagagtgaaaaattatcttgcatccaccctctcgctgaacaagtcatagtgataacacactctggccgaaaagggcgttatgccgtggaaccataccatggtaaagtagtggtgccagagggacatgcaatacccgtccaggactttcaagctctgagtgaaagtgccaccattgtgtacaacgaacgtgagttcgtaaacaggtacctgcaccatattgccacacatggaggagcgctgaacactgatgaagaatattacaaaactgtcaagcccagcgagcacgacggcgaatacctgtacgacatcgacaggaaacagtgcgtcaagaaagaactagtcactgggctagggctcacaggcgagctggtggatcctcccttccatgaattcgcctacgagagtctgagaacacgaccagccgctccttaccaagtaccaaccataggggtgtatggcgtgccaggatcaggcaagtctggcatcattaaaagcgcagtcaccaaaaaagatctagtggtgagcgccaagaaagaaaactgtgcagaaattataagggacgtcaagaaaatgaaagggctggacgtcaatgccagaactgtggactcagtgctcttgaatggatgcaaacaccccgtagagaccctgtatattgacgaagcttttgcttgtcatgcaggtactctcagagcgctcatagccattataagacctaaaaaggcagtgctctgcggggatcccaaacagtgcggtttttttaacatgatgtgcctgaaagtgcattttaaccacgagatttgcacacaagtcttccacaaaagcatctctcgccgttgcactaaatctgtgacttcggtcgtctcaaccttgttttacgacaaaaaaatgagaacgacgaatccgaaagagactaagattgtgattgacactaccggcagtaccaaacctaagcaggacgatctcattctcacttgtttcagagggtgggtgaagcagttgcaaatagattacaaaggcaacgaaataatgacggcagctgcctctcaagggctgacccgtaaaggtgtgtatgccgttcggtacaaggtgaatgaaaatcctctgtacgcacccacctcagaacatgtgaacgtcctactgacccgcacggaggaccgcatcgtgtggaaaacactagccggcgacccatggataaaaacactgactgccaagtaccctgggaatttcactgccacgatagaggagtggcaagcagagcatgatgccatcatgaggcacatcttggagagaccggaccctaccgacgtcttccagaataaggcaaacgtgtgttgggccaaggctttagtgccggtgctgaagaccgctggcatagacatgaccactgaacaatggaacactgtggattattttgaaacggacaaagctcactcagcagagatagtattgaaccaactatgcgtgaggttctttggactcgatctggactccggtctattttctgcacccactgttccgttatccattaggaataatcactgggataactccccgtcgcctaacatgtacgggctgaataaagaagtggtccgtcagctctctcgcaggtacccacaactgcctcgggcagttgccactggaagagtctatgacatgaacactggtacactgcgcaattatgatccgcgcataaacctagtacctgtaaacagaagactgcctcatgctttagtcctccaccataatgaacacccacagagtgacttttcttcattcgtcagcaaattgaagggcagaactgtcctggtggtcggggaaaagttgtccgtcccaggcaaaatggttgactggttgtcagaccggcctgaggctaccttcagagctcggctggatttaggcatcccaggtgatgtgcccaaatatgacataatatttgttaatgtgaggaccccatataaataccatcactatcagcagtgtgaagaccatgccattaagcttagcatgttgaccaagaaagcttgtctgcatctgaatcccggcggaacctgtgtcagcataggttatggttacgctgacagggccagcgaaagcatcattggtgctatagcgcggcagttcaagttttcccgggtatgcaaaccgaaatcctcacttgaagagacggaagttctgtttgtattcattgggtacgatcgcaaggcccgtacgcacaatccttacaagctttcatcaaccttgaccaacatttatacaggttccagactccacgaagccggatgtgcaccctcatatcatgtggtgcgaggggatattgccacggccaccgaaggagtgattataaatgctgctaacagcaaaggacaacctggcggaggggtgtgcggagcgctgtataagaaattcccggaaagcttcgatttacagccgatcgaagtaggaaaagcgcgactggtcaaaggtgcagctaaacatatcattcatgccgtaggaccaaacttcaacaaagtttcggaggttgaaggtgacaaacagttggcagaggcttatgagtccatcgctaagattgtcaacgataacaattacaagtcagtagcgattccactgttgtccaccggcatcttttccgggaacaaagatcgactaacccaatcattgaaccatttgctgacagctttagacaccactgatgcagatgtagccatatactgcagggacaagaaatgggaaatgactctcaaggaagcagtggctaggagagaagcagtggaggagatatgcatatccgacgactcttcagtgacagaacctgatgcagagctggtgagggtgcatccgaagagttctttggctggaaggaagggctacagcacaagcgatggcaaaactttctcatatttggaagggaccaagtttcaccaggcggccaaggatatagcagaaattaatgccatgtggcccgttgcaacggaggccaatgagcaggtatgcatgtatatcctcggagaaagcatgagcagtattaggtcgaaatgccccgtcgaagagtcggaagcctccacaccacctagcacgctgccttgcttgtgcatccatgccatgactccagaaagagtacagcgcctaaaagcctcacgtccagaacaaattactgtgtgctcatcctttccattgccgaagtatagaatcactggtgtgcagaagatccaatgctcccagcctatattgttctcaccgaaagtgcctgcgtatattcatccaaggaagtatctcgtggaaacaccaccggtagacgagactccggagccatcggcagagaaccaatccacagaggggacacctgaacaaccaccacttataaccgaggatgagaccaggactagaacgcctgagccgatcatcatcgaagaggaagaagaggatagcataagtttgctgtcagatggcccgacccaccaggtgctgcaagtcgaggcagacattcacgggccgccctctgtatctagctcatcctggtccattcctcatgcatccgactttgatgtggacagtttatccatacttgacaccctggagggagctagcgtgaccagcggggcaacgtcagccgagactaactcttacttcgcaaagagtatggagtttctggcgcgaccggtgcctgcgcctcgaacagtattcaggaaccctccacatcccgctccgcgcacaagaacaccgtcacttgcacccagcagggcctgctcgagaaccagcctagtttccaccccgccaggcgtgaatagggtgatcactagagaggagctcgaggcgcttaccccgtcacgcactcctagcaggtcggtctcgagaaccagcctggtctccaacccgccaggcgtaaatagggtgattacaagagaggagtttgaggcgttcgtagcacaacaacaatgacggtttgatgcgggtgcatacatcttttcctccgacaccggtcaagggcatttacaacaaaaatcagtaaggcaaacggtgctatccgaagtggtgttggagaggaccgaattggagatttcgtatgccccgcgcctcgaccaagaaaaagaagaattactacgcaagaaattacagttaaatcccacacctgctaacagaagcagataccagtccaggaaggtggagaacatgaaagccataacagctagacgtattctgcaaggcctagggcattatttgaaggcagaaggaaaagtggagtgctaccgaaccctgcatcctgttcctttgtattcatctagtgtgaaccgtgccttttcaagccccaaggtcgcagtggaagcctgtaacgccatgttgaaagagaactttccgactgtggcttcttactgtattattccagagtacgatgcctatttggacatggttgacggagcttcatgctgcttagacactgccagtttttgccctgcaaagctgcgcagctttccaaagaaacactcctatttggaacccacaatacgatcggcagtgccttcagcgatccagaacacgctccagaacgtcctggcagctgccacaaaaagaaattgcaatgtcacgcaaatgagagaattgcccgtattggattcggcggcctttaatgtggaatgcttcaagaaatatgcgtgtaataatgaatattgggaaacgtttaaagaaaaccccatcaggcttactgaagaaaacgtggtaaattacattaccaaattaaaaggaccaaaagctgctgctctttttgcgaagacacataatttgaatatgttgcaggacataccaatggacaggtttgtaatggacttaaagagagacgtgaaagtgactccaggaacaaaacatactgaagaacggcccaaggtacaggtgatccaggctgccgatccgctagcaacagcgtatctgtgcggaatccaccgagagctggttaggagattaaatgcggtcctgcttccgaacattcatacactgtttgatatgtcggctgaagactttgacgctattatagccgagcacttccagcctggggattgtgttctggaaactgacatcgcgtcgtttgataaaagtgaggacgacgccatggctctgaccgcgttaatgattctggaagacttaggtgtggacgcagagctgttgacgctgattgaggcggctttcggcgaaatttcatcaatacatttgcccactaaaactaaatttaaattcggagccatgatgaaatctggaatgttcctcacactgtttgtgaacacagtcattaacattgtaatcgcaagcagagtgttgagagaacggctaaccggatcaccatgtgcagcattcattggagatgacaatatcgtgaaaggagtcaaatcggacaaattaatggcagacaggtgcgccacctggttgaatatggaagtcaagattatagatgctgtggtgggcgagaaagcgccttatttctgtggagggtttattttgtgtgactccgtgaccggcacagcgtgccgtgtggcagaccccctaaaaaggctgtttaagcttggcaaacctctggcagcagacgatgaacatgatgatgacaggagaagggcattgcatgaagagtcaacacgctggaaccgagtgggtattctttcagagctgtgcaaggcagtagaatcaaggtatgaaaccgtaggaacttccatcatagttatggccatgactactctagctagcagtgttaaatcattcagctacctgagaggggcccctataactctctacggctaacctgaatggactacgacttatcacgcccaaacatttacagccgcggtgtcaaaaaccgcgtggacgtggttaacatccctgctgggaggatcagccgtaattattataattggcttggtgctggctactattgtggccatgtacgtgctgaccaaccagaaacataattgaatacagcagcaattggcaagctgcttacatagaactcgcggcgattggcatgccgccttaaaatttttattttattttttcttttcttttccgaatcggattttgtttttaatatttcaaaaaaaaaaaaaaaaaaaaaaaaaaaaaaaaaaaaaaaaaaaaaaaaaaaaaaaaaaaaaaaaaaaaaaaaaaaaaaaa

SEQ ID NO: 78 - DNA, 3822 bp, Severe acute respiratory syndrome-related coronavirus
  source 1..3822: mol_type = other DNA; note = Severe acute respiratory syndrome coronavirus 2
atgtttgtttttcttgttttattgccactagtctctagtcagtgtgttaatcttacaaccagaactcaattaccccctgcatacactaattctttcacacgtggtgtttattaccctgacaaagttttcagatcctcagttttacattcaactcaggacttgttcttacctttcttttccaatgttacttggttccatgctatacatgtctctgggaccaatggtactaagaggtttgataaccctgtcctaccatttaatgatggtgtttattttgcttccactgagaagtctaacataataagaggctggatttttggtactactttagattcgaagacccagtccctacttattgttaataacgctactaatgttgttattaaagtctgtgaatttcaattttgtaatgatccatttttgggtgtttattaccacaaaaacaacaaaagttggatggaaagtgagttcagagtttattctagtgcgaataattgcacttttgaatatgtctctcagccttttcttatggaccttgaaggaaaacagggtaatttcaaaaatcttagggaatttgtgtttaagaatattgatggttattttaaaatatattctaagcacacgcctattaatttagtgcgtgatctccctcagggtttttcggctttagaaccattggtagatttgccaataggtattaacatcactaggtttcaaactttacttgctttacatagaagttatttgactcctggtgattcttcttcaggttggacagctggtgctgcagcttattatgtgggttatcttcaacctaggacttttctattaaaatataatgaaaatggaaccattacagatgctgtagactgtgcacttgaccctctctcagaaacaaagtgtacgttgaaatccttcactgtagaaaaaggaatctatcaaacttctaactttagagtccaaccaacagaatctattgttagatttcctaatattacaaacttgtgcccttttggtgaagtttttaacgccaccagatttgcatctgtttatgcttggaacaggaagagaatcagcaactgtgttgctgattattctgtcctatataattccgcatcattttccacttttaagtgttatggagtgtctcctactaaattaaatgatctctgctttactaatgtctatgcagattcatttgtaattagaggtgatgaagtcagacaaatcgctccagggcaaactggaaagattgctgattataattataaattaccagatgattttacaggctgcgttatagcttggaattctaacaatcttgattctaaggttggtggtaattataattacctgtatagattgtttaggaagtctaatctcaaaccttttgagagagatatttcaactgaaatctatcaggccggtagcacaccttgtaatggtgttgaaggttttaattgttactttcctttacaatcatatggtttccaacccactaatggtgttggttaccaaccatacagagtagtagtactttcttttgaacttctacatgcaccagcaactgtttgtggacctaaaaagtctactaatttggttaaaaacaaatgtgtcaatttcaacttcaatggtttaacaggcacaggtgttcttactgagtctaacaaaaagtttctgcctttccaacaatttggcagagacattgctgacactactgatgctgtccgtgatccacagacacttgagattcttgacattacaccatgttcttttggtggtgtcagtgttataacaccaggaacaaatacttctaaccaggttgctgttctttatcaggatgttaactgcacagaagtccctgttgctattcatgcagatcaacttactcctacttggcgtgtttattctacaggttctaatgtttttcaaacacgtgcaggctgtttaataggggctgaacatgtcaacaactcatatgagtgtgacatacccattggtgcaggtatatgcgctagttatcagactcagactaattctcctcggcgggcacgtagtgtagctagtcaatccatcattgcctacactatgtcacttggtgcagaaaattcagttgcttactctaataactctattgccatacccacaaattttactattagtgttaccacagaaattctaccagtgtctatgaccaagacatcagtagattgtacaatgtacatttgtggtgattcaactgaatgcagcaatcttttgttgcaatatggcagtttttgtacacaattaaaccgtgctttaactggaatagctgttgaacaagacaaaaacacccaagaagtttttgcacaagtcaaacaaatttacaaaacaccaccaattaaagattttggtggttttaatttttcacaaatattaccagatccatcaaaaccaagcaagaggtcatttattgaagatctacttttcaacaaagtgacacttgcagatgctggcttcatcaaacaatatggtgattgccttggtgatattgctgctagagacctcatttgtgcacaaaagtttaacggccttactgttttgccacctttgctcacagatgaaatgattgctcaatacacttctgcactgttagcgggtacaatcacttctggttggacctttggtgcaggtgctgcattacaaataccatttgctatgcaaatggcttataggtttaatggtattggagttacacagaatgttctctatgagaaccaaaaattgattgccaaccaatttaatagtgctattggcaaaattcaagactcactttcttccacagcaagtgcacttggaaaacttcaagatgtggtcaaccaaaatgcacaagctttaaacacgcttgttaaacaacttagctccaattttggtgcaatttcaagtgttttaaatgatatcctttcacgtcttgacaaagttgaggctgaagtgcaaattgataggttgatcacaggcagacttcaaagtttgcagacatatgtgactcaacaattaattagagctgcagaaatcagagcttctgctaatcttgctgctactaaaatgtcagagtgtgtacttggacaatcaaaaagagttgatttttgtggaaagggctatcatcttatgtccttccctcagtcagcacctcatggtgtagtcttcttgcatgtgacttatgtccctgcacaagaaaagaacttcacaactgctcctgccatttgtcatgatggaaaagcacactttcctcgtgaaggtgtctttgtttcaaatggcacacactggtttgtaacacaaaggaatttttatgaaccacaaatcattactacagacaacacatttgtgtctggtaactgtgatgttgtaataggaattgtcaacaacacagtttatgatcctttgcaacctgaattagactcattcaaggaggagttagataaatattttaagaatcatacatcaccagatgttgatttaggtgacatctctggcattaatgcttcagttgtaaacattcaaaaagaaattgaccgcctcaatgaggttgccaagaatttaaatgaatctctcatcgatctccaagaacttggaaagtatgagcagtatataaaatggccatggtacatttggctaggttttatagctggcttgattgccatagtaatggtgacaattatgctttgctgtatgaccagttgctgtagttgtctcaagggctgttgttcttgtggatcctgctgcaaatttgatgaagacgactctgagccagtgctcaaaggagtcaaattacattacacataa

SEQ ID NO: 79 - DNA, 3822 bp, synthetic construct
  misc_feature 1..3822: note = Description of Artificial Sequence: Synthetic polynucleotide
  source 1..3822: mol_type = other DNA
atgtttgtcttcctggtcttgctgccgctggtgagcagccagtgcgtgaatctcaccacccgcacccagcttccacctgcctacactaacagcttcacccgaggggtgtattaccctgacaaggtattccggtcctccgtcctccatagcacgcaggacctttttctgcccttcttctcaaatgtgacatggttccatgccattcacgtgagcggcacgaatggaacgaagcgctttgataaccccgtgctgcctttcaatgacggcgtctacttcgcctccactgaaaagtcaaacatcatccggggctggatctttggcaccactcttgattcaaagacccagtcactgctgattgtgaacaatgctacaaacgtggttatcaaggtgtgtgagtttcagttctgtaacgatccatttttgggagtgtactaccacaagaacaacaagtcctggatggagtctgagttcagagtgtatagctctgctaacaactgcaccttcgagtacgtgtcccagcctttccttatggacctggaaggcaaacagggcaatttcaaaaacctgagagagttcgtgtttaagaacattgacggatacttcaaaatttattctaagcacacaccaattaacttagtgcgggacctaccccaaggctttagcgccctagagcccctggttgacctgcccattgggatcaatataacaaggttccaaactctactggctctgcatagaagttatctgaccccaggagacagctctagtggttggaccgccggcgcagcagcctactatgtcgggtacttacagccacgcacgttccttctgaagtacaatgagaacgggacaatcactgacgcagtagactgtgcactggacccgctaagcgagactaagtgcacacttaaatccttcacggtggagaaaggcatttatcagacctctaacttcagggtgcagccaacagaaagcattgtgcgattcccaaatattactaatctttgccctttcggggaggtctttaatgcaactagattcgcatcagtctatgcgtggaaccgcaaacgcatttccaattgtgtcgcagactactcagtgctgtacaactctgcctctttcagtacgttcaagtgttacggagtgtcacccactaaactgaacgacctgtgctttacaaatgtctacgctgactccttcgtgattaggggagacgaggtgagacaaattgcccccggacagactgggaagattgccgactacaattataagcttcctgatgatttcactggctgtgttattgcctggaatagtaacaatctggatagcaaggtgggaggcaactataactacttatatcgactgtttaggaagagtaatctgaaaccatttgagcgggatatttccacagaaatttaccaggccgggagcacaccatgtaatggggtggagggatttaattgttacttcccactccagagctatggtttccaacccaccaatggagtgggttaccagccctatagagtcgtggtgcttagttttgagctgcttcacgccccagcaaccgtctgcggtcccaaaaagtcgaccaatctcgtgaaaaacaaatgcgtaaacttcaactttaacggcttaacaggaaccggcgtgctcaccgaaagcaacaagaaattccttccatttcagcaattcggaagggacatcgccgacacaacagacgcggtgagggacccacagactctggagatactggacatcactccttgttcgtttgggggcgtctcggtcatcacacccgggactaatactagtaatcaggtagcagttttatatcaaggcgtcaactgtaccgaagtacctgtggccatacacgctgatcagctaacgccaacatggcgagtctattccaccggctctaacgtttttcagaccagggctgggtgcctgataggggcagagcacgtcaataattcctatgagtgtgatatccccataggtgcggggatctgtgccagctatcaaacccaaaccaattcaccaaggcgagcacggtctgtggcttctcagagcataattgcatatacaatgtcactgggcgctgagaatagcgttgcatactctaataacagcatagccattcccacgaactttactatcagtgtgacaaccgaaatattgccagtttcgatgaccaaaactagcgtggattgcacgatgtacatctgtggagactctaccgaatgcagcaatctgctattacaatatggcagcttctgtacacagttaaatcgagccttgacaggcatcgcagtggaacaggacaaaaatactcaagaggtgtttgcacaggtgaagcaaatctacaaaacgccccccattaaagattttggcgggttcaatttttcacaaattctccccgacccgtctaagccgagtaagcggtccttcatcgaagatctgctctttaacaaagtaaccctcgccgatgccggctttattaagcagtatggcgactgcctgggggatatagccgctcgtgacctgatttgcgcccagaagttcaatggtctgaccgtgttgcctcctttattgaccgatgaaatgattgcccagtacactagtgccctgctggccggcactatcacgtctgggtggaccttcggagctggtgccgccttgcagataccttttgcaatgcagatggcctataggtttaatggtatcggagtgactcagaacgtactgtacgagaaccagaagctcatcgctaatcaatttaactccgctatcggaaaaatccaggacagcctctcttctacagctagcgctctgggcaaactgcaggatgtcgttaatcagaatgcccaggccctgaacaccttggttaaacaactatcttccaacttcggggccatatccagtgtgttgaatgatattctctcccgcttggataaggtggaagctgaggtgcagatcgatcgcttgatcaccggcagactgcagtccctccagacatatgtaactcagcagctgattagagccgccgagataagggcaagtgcgaatctggctgccaccaagatgagcgaatgtgtattgggccagagcaaacgagttgatttttgcggtaaggggtatcatttaatgtctttccctcaatccgcacctcatggcgtagttttcctgcatgtgacttatgtcccggctcaggagaagaattttaccacagcccccgcgatctgccatgacggaaaggcccacttcccccgggaaggcgtgtttgtatccaatgggactcactggtttgtcactcagcgaaatttttatgaaccacagatcatcaccactgacaacacatttgttagtggaaactgcgatgtggtcatcggcatcgtgaataacactgtctatgatccactgcaacctgaactggattcttttaaagaggaactcgacaagtattttaaaaaccacactagccctgacgtggatctcggtgacatttctggcatcaacgctagcgtagtgaacattcagaaagagatagatagacttaatgaggtggccaagaacctcaacgaaagtctgatcgacctccaggaactggggaaatacgagcagtacattaaatggccttggtacatatggctggggttcattgctgggctgatcgcaatagtgatggtgaccataatgctctgttgcatgactagctgctgcagctgcctgaagggctgctgtagttgtgggtcatgttgtaagtttgacgaagatgatagcgagcctgtccttaaaggagtgaagctccactacacctag

SEQ ID NO: 80 - DNA, 3822 bp, synthetic construct
  misc_feature 1..3822: note = Description of Artificial Sequence: Synthetic polynucleotide
  source 1..3822: mol_type = other DNA
atgttcgtatttctggtgctgctgcccctagtgagctcccagtgcgtgaacctgaccaccagaacccagcttcctcccgcctacaccaatagcttcacaaggggagtgtactaccccgataaggttttccggtcgtctgtcttgcatagcactcaggacctctttctgccgttcttctctaacgtgacttggtttcacgccattcacgtgagcggtacaaacggaactaagaggtttgataaccctgttctcccatttaacgatggggtctacttcgccagcacggagaagtctaatatcatccgcgggtggattttcggcacgacactagacagtaagacccagtcacttttaatagttaataacgcgactaatgttgtgataaaagtatgtgaattccagttctgcaatgatccgtttctcggtgtatactaccataagaataataagtcttggatggagtccgaattccgtgtttactcgtcagctaataactgtacattcgagtacgtaagccaaccctttctgatggatctggagggtaaacagggaaactttaaaaacctaagggaatttgttttcaagaatattgacggatactttaagatctattccaagcatacccctataaacttggtgagagatctgccacagggcttttccgctctagagcccttggttgacttacctattggtatcaatattactagatttcaaacgctgcttgccctacatagatcttatttgaccccgggtgactcgagttccggctggaccgcaggtgcggcggcatactacgttggttacctgcagccgcgcacttttctcctcaaatacaatgagaatgggaccatcacggatgccgtcgactgcgcattagatccgctgtccgagaccaaatgcaccctaaaaagctttactgttgaaaagggtatttaccaaacgtctaatttccgcgtacaacccactgagtcgatagttcggttccccaatatcaccaatctatgccctttcggtgaagtctttaacgcaacacgtttcgcgtccgtttacgcctggaaccgtaagcggataagcaactgcgtggctgattatagtgtgctatataactctgcgtcctttagcactttcaaatgctatggagtatcccccacgaagctgaatgacttgtgttttacgaatgtttatgccgattcgttcgtcatacgtggagacgaggtgagacagatagctccaggccagactgggaaaatcgctgactacaactacaaacttcctgacgatttcacgggttgcgtgatagcatggaacagtaataacctagattcaaaagttggcggcaattataattatttgtatcgcctgttccgtaagtccaatttaaagccatttgagcgggatataagtacagaaatctaccaagcgggttcgacgccgtgtaacggagtagaaggctttaactgctattttccgttacagtcgtacgggttccagcctaccaacggcgtggggtaccagccgtatagagtcgtagtattgtcgtttgaactcctccatgccccagcgacggtatgtgggccgaagaaatccactaacttagtcaaaaacaagtgtgttaacttcaattttaacggcttaacggggacgggggtcctcacggagtcgaataagaaattcctaccattccagcaatttggtagggacatagccgacaccactgacgcggtgagggacccgcagacgctcgagatattagacataacgccttgctcgttcggtggtgtgagcgtcataactccgggaaccaatactagcaatcaggtagcggtattatatcagggagtaaattgtactgaggtacctgttgcgatccatgctgaccaattaacacccacgtggcgcgtctactccactggcagtaatgtatttcagactcgggccgggtgcctaataggagcagaacatgtaaataacagttacgagtgcgatataccgataggcgcagggatatgtgctagttaccagacacaaactaatagcccccgtagggcgcgctccgtagcgtcccagtctattatagcgtataccatgagcctcggggctgagaacagcgtagcatatagtaacaacagcatagcgattccgacgaacttcactatatccgtgacgactgagatcttgcctgtctcgatgactaagacaagcgtagactgtacgatgtatatctgcggtgatagtacggaatgcagcaacctcctattacagtacggctccttttgtacgcagctgaaccgcgcgttgacaggcattgcggtcgagcaggataaaaatacgcaggaggtcttcgcccaagttaagcagatatacaagacgccccccataaaggactttgggggatttaatttctcgcagatccttcccgatccctctaaacctagcaagcgttcgttcattgaggatttactttttaacaaggtgacgctggcagatgcaggcttcataaagcaatacggcgactgtctgggtgacatcgcagcccgtgacctgatttgtgcgcaaaaattcaatggcctgaccgtcctaccccctctgttgactgatgaaatgattgcacagtatacgtctgccctattagcaggtacaattacaagcggttggacgtttggagcaggggccgcgctacagatacctttcgctatgcagatggcgtataggttcaacggcattggggtcactcagaacgtgctttatgaaaaccagaaactgatagctaaccagttcaacagcgctataggcaaaatacaggactcgctctcctctacggcatcagccctaggtaagctccaagacgtcgtgaatcagaatgcccaggcgttaaataccttagtgaaacaactgtcgtccaacttcggcgcgatatcgtcggtacttaatgacattttgagcagacttgacaaggtcgaggccgaggtgcaaatcgatagacttatcacaggccgcttacagagtcttcaaacctacgtaactcagcagttgataagagcggcagagattagggcaagcgctaatctagccgctacaaagatgagtgaatgtgtcctaggccagtcgaagcgcgtcgatttctgtgggaaaggctatcatctcatgtcttttccccagtcggccccgcacggcgttgtattcctccacgtgacatatgttcccgcgcaagagaagaactttacgaccgcgcctgcgatctgtcatgacggtaaagcccactttcccagggagggcgttttcgtctcgaacgggactcactggttcgtgacccagcgtaacttctacgagccgcagataattaccacggacaatacgttcgtgtcgggtaattgtgacgtggtaatcggcatagtcaataatactgtctatgaccccttgcaaccagagttagactccttcaaagaagaattggacaagtattttaagaaccacacgtcgcctgacgtagatttgggcgacatctcgggtattaatgcatctgtagtgaacatccagaaagagatagataggttaaacgaagtagctaagaatttgaatgagagcctgattgatctacaagagttgggtaaatatgagcagtacataaagtggccgtggtatatttggctcggctttatagccggtcttatagctatagtgatggttacgattatgctgtgttgcatgactagttgctgtagctgcctgaagggctgctgttcatgcggctcatgttgtaaattcgatgaggatgacagtgaaccggtgcttaagggcgtaaagctacactatacctga

SEQ ID NO: 81 - DNA, 3822 bp, synthetic construct
  misc_feature 1..3822: note = Description of Artificial Sequence: Synthetic polynucleotide
  source 1..3822: mol_type = other DNA
atgttcgtgttcctagtgctgctgcctctggtgagcagtcagtgtgtgaacctgaccactagaacacagctccccccagcatacactaatagctttacccgcggcgtgtactaccctgacaaagtgttccggtctagcgtcctgcatagcacccaagacctgttcctgccattcttcagcaacgtgacctggttccacgccattcacgtgagtggcaccaatgggacaaaaaggtttgacaatcccgtcctcccctttaatgatggggtctacttcgcctctactgagaaatctaatattatccgggggtggattttcggaaccactttagattcaaagacacagagcttgttgatagtgaataatgcaaccaacgtggtaatcaaagtctgtgaattccagttctgcaacgacccgttcctgggagtttattaccacaagaataataagtcctggatggagtcagaattcagagtgtatagcagcgccaataattgcacttttgagtacgtgagccagcccttcctgatggaccttgaaggaaaacagggcaacttcaagaacctgcgagagtttgtgtttaaaaacatcgacggctactttaaaatctattctaaacatactccaatcaacctcgtaagagatctgccacagggcttcagcgctctggagcccctcgtggacctcccgatcggcattaacatcactcggttccaaaccctgctggctcttcaccgcagctatttgactcctggggatagtagtagcggctggaccgccggcgcagccgcctattatgtgggctacctgcagcccaggacattcctgcttaaatataatgagaacggcaccattacagacgccgtggattgtgctctagatcccctgtcagagactaagtgcacactgaagtctttcacagttgagaagggaatttatcagacctctaatttccgcgtccagcctaccgagtccattgtcagatttcctaatataaccaatctttgtccattcggagaagtttttaatgccacccggttcgcatctgtctacgcctggaatagaaaaaggattagcaattgtgtggctgattattcagtcttgtacaattcagcatccttctccacctttaaatgctacggtgtgtcacctaccaagctgaatgatctttgcttcactaacgtttatgccgattcttttgtgatcaggggcgatgaggtgcgacagatcgcccctggccagactggcaaaattgcagactacaattacaagctgccagatgatttcaccggctgtgtaatcgcttggaactcaaacaaccttgatagcaaagtaggaggaaattataattacctttatagactgttcaggaagagcaacttgaagcctttcgagcgggatatttcaactgagatctaccaggctggaagcaccccctgtaatggtgtcgaggggtttaactgctattttcctcttcagtcctatggattccagccgaccaacggagtggggtaccagccttacagagtggtggtgctctcatttgaactcttgcatgcaccagccaccgtgtgcggaccgaagaagtctactaacctggtgaagaacaaatgcgtcaattttaatttcaatggtctaacgggtacaggagtgctcactgagtctaacaagaagttccttccctttcaacaatttggccgggacatagccgataccacagatgctgtgagagacccccagactctcgaaatcctggacataactccttgcagctttggtggggtgtcggttattacaccagggactaataccagcaaccaggtcgccgtgttgtatcagggtgtcaactgtacagaggtgccagtggcaattcacgcagatcagctgacccctacctggcgggtttacagcacaggcagcaatgtgtttcagacccgggccggatgcctgattggcgccgagcatgtcaacaacagttacgaatgtgacataccaataggcgctggcatttgtgcatcttaccagacccagacaaattctcccagaagggcccgtagcgtcgctagccagtccataatagcctacactatgtctctgggggctgagaactctgtggcgtattcaaataattcaattgccatcccaactaacttcacaattagtgtcacaaccgagattcttcctgtgtctatgaccaaaacaagtgtggactgcacaatgtacatatgcggggacagcactgaatgttccaacctcttgctccagtacgggtctttctgtacccagctgaaccgagccctgactgggattgcggtggaacaggataagaatactcaggaggtctttgcgcaggtaaagcagatttacaaaaccccccccattaaagactttgggggttttaacttttctcagatacttcccgacccctctaagccatccaagaggtccttcattgaggatcttctgtttaataaggtcacattagctgatgccggcttcattaagcaatatggcgactgtctgggtgacattgctgctagagacctgatttgcgcccagaaattcaacggactgactgtcctgccgcctctgctgaccgatgaaatgattgcccaatacacctcagccctgctcgccggaacgattactagcggatggacatttggggcaggggcagcactccaaattccatttgccatgcagatggcttatcgctttaacggcatcggcgtcactcagaatgtcctctatgaaaatcagaagctcattgcaaatcaatttaattccgcaattggaaagattcaggacagcctctcttccactgcctccgcactggggaagctgcaggacgttgtcaaccagaacgctcaggctttgaacactctcgtgaaacagctgagctcaaatttcggcgctatctcctccgtgttaaatgacattttgtcacggttagataaagtggaggccgaggttcagattgaccgcctcattaccgggagattgcagtctctgcagacctacgtgacacagcagttaatccgagctgctgagataagagccagtgccaacctggctgccacgaagatgtcggagtgtgttctgggccagagcaaaagggtggacttctgcgggaaggggtatcatctcatgagcttccctcagtctgcaccccacggggtggtttttctgcacgtcacttacgtcccagctcaagagaaaaattttaccaccgccccggcaatctgtcatgatggcaaggcccactttccccgggagggcgtttttgtaagtaatggaacacactggtttgtgactcagagaaatttctacgaaccccagatcattacgactgacaacaccttcgtgtcaggaaactgtgatgtcgtcattggaatcgtgaacaacactgtgtatgaccctctacagcccgagttggactcctttaaggaggagctggacaagtacttcaaaaatcacacgagtcccgatgttgatttgggcgatatctcaggcatcaacgcctccgtcgtgaatatccaaaaggaaatagatcgtcttaacgaggtggcaaagaatctgaacgaaagccttattgacttacaggaactgggaaagtacgaacagtacattaagtggccctggtacatctggctcggatttattgctggattgattgctatcgtgatggtcaccatcatgttgtgctgcatgacgtcctgttgctcctgccttaagggctgttgtagctgtggaagttgctgcaagtttgatgaagacgacagtgagcctgtgctcaagggggtgaagctccactacacatga

SEQ ID NO: 82 - DNA, 3822 bp, synthetic construct
  misc_feature 1..3822: note = Description of Artificial Sequence: Synthetic polynucleotide
  source 1..3822: mol_type = other DNA
atgtttgttttcctggtgctgcttccactagtgtcctcccagtgcgtgaaccttaccactagaacacaactccccccagcttacactaatagcttcactaggggagtgtactacccagataaagtgttccgctcctctgtgctgcatagcactcaggacctgtttctgcctttcttctctaacgttacttggttccacgccatccacgtgagtgggaccaacggcaccaagcggtttgataaccccgtcctgccatttaatgacggtgtttactttgccagcactgaaaagtctaacatcatccgtggttggatcttcggtaccacactggactctaaaacccagtcactgctgattgtgaataacgccacaaacgtggtgatcaaggtgtgcgagtttcagttctgcaatgacccattccttggcgtctactaccataaaaacaataagtcctggatggagagcgaatttagagtttactcctcagctaataattgtacctttgagtatgtttcccagcccttcctgatggatctcgaaggcaaacagggaaacttcaagaacctaagagagtttgtgtttaaaaatatcgacgggtatttcaaaatctacagcaagcatacccctatcaatctggtcagggacttgccacaggggttctctgccctggagcctctcgtcgaccttccaattggtatcaacattactagattccagaccttgctggcactccacaggagttaccttacaccaggcgattcatcgagcggctggacagccggcgctgcagcctattacgtcggctatctgcaaccccgaacattcctcctaaaatataacgagaatggaacaatcaccgatgctgtcgattgtgcgctggaccccctgtctgagactaagtgcaccttgaaatcctttacggtggaaaaaggcatatatcaaacctccaacttcagagttcagcctacagagtccattgtccggtttcctaatattaccaacctatgcccctttggagaggtcttcaatgccaccaggttcgcgtctgtgtacgcttggaataggaagaggataagtaactgtgtcgcagactatagcgtcctgtataattccgccagcttctccaccttcaagtgctacggggtgagcccaaccaaactgaatgatctgtgttttactaacgtgtatgccgactcgttcgttattcgcggtgatgaagttaggcagatagccccaggccagaccggaaagatcgccgattacaattacaaattacctgacgacttcaccgggtgtgttattgcctggaacagcaataacctcgatagtaaagttggaggtaattataactacctatatagactctttagaaaaagtaacctcaagccttttgaaagagacattagcaccgagatctaccaggcaggctcaacgccatgtaacggggtcgagggattcaactgctacttcccacttcagtcttacgggttccagccaactaacggagtgggctatcagccttatagggtggtcgtgctaagttttgagctcctccacgctcccgcaacagtgtgcggccctaaaaagagtaccaacttggtgaagaataagtgcgttaatttcaattttaatggccttaccggaaccggagtcctgacagaatctaataagaagtttttaccattccagcagttcgggcgcgacatagccgacaccaccgacgcagtgcgagacccccagacattggaaatcttggatatcacaccatgcagtttcggcggggtctcagtgatcactcctgggactaacacaagcaaccaggtagccgtgctgtatcagggtgttaactgtactgaagtgcccgtggcaatccatgctgatcagctgacacccacttggagggtgtacagcaccggcagcaatgtttttcagacacgcgcaggctgcctaatcggcgccgagcacgtaaataattcatacgagtgcgatatacctatcggggctggcatttgtgccagctaccagacacagaccaactcacctagacgcgcacggtctgtcgcctcacaaagcataattgcttataccatgtccttaggagccgagaactccgtcgcgtattccaacaatagcattgcgatccctaccaatttcactataagcgttactactgaaattcttcccgtctccatgacaaaaacctctgttgactgcactatgtatatctgtggggattccactgagtgtagtaatctcctgctgcagtacggatccttctgcacacagctgaaccgggccctgactgggattgcagttgagcaggacaagaatacccaggaagtcttcgcccaggtcaagcaaatctataaaacacctcccatcaaagattttggggggtttaactttagtcagatcctgcccgaccctagtaaaccctctaaacgctcatttattgaggacttactttttaacaaagtcactcttgctgacgccggctttatcaagcagtatggagactgtttgggcgacattgccgcccgggaccttatctgcgcccagaaattcaacgggctaaccgttctcccgcccctactgactgacgagatgatcgctcagtatacgtctgcactgctagcaggtaccatcactagcggatggacctttggcgcaggagcagccctccagatcccattcgctatgcagatggcctaccgttttaacggtatcggcgtaactcagaatgtgctctatgagaaccagaagctaattgccaatcagtttaattcagctataggcaaaattcaggatagcttatccagtacagcctccgcccttggcaaactgcaggatgtggtgaatcagaacgcacaggcccttaatacactggtgaaacagctctcatcaaatttcggggcaatttccagcgttttgaatgacatcctctctcgactggacaaggtggaggcagaggtgcagattgatcggctcatcaccggccgcctgcagtccttgcagacatatgttacacaacagttgatcagagctgccgaaataagagcctcagcaaacctggccgccactaaaatgagtgagtgcgtcctcggccagtcaaagcgggtggatttttgtgggaagggctaccacctgatgagcttcccgcagtcagccccacacggcgtggtgttcctgcatgtgacctatgtgcctgcccaggagaagaactttacaaccgccccagccatctgtcatgatggtaaggctcactttccaagggagggcgtgttcgtgtcaaatgggacccactggtttgtgacccaaaggaatttttacgaaccccagattatcacaactgacaacacttttgtgtctggcaactgcgacgtcgtcatcggcattgtcaataacaccgtgtacgaccctctccagcccgagcttgatagtttcaaggaggaactcgacaaatactttaagaaccacacctcaccggatgttgacctgggagacatcagcggcattaacgcttccgtcgttaatatccagaaggaaatcgatcgtttgaacgaggtggccaaaaatctgaacgaaagcctaattgatctccaggaactggggaaatatgagcagtacataaaatggccctggtacatctggcttgggttcatcgctggcctcattgccattgtgatggtgacaatcatgctttgttgtatgaccagttgctgctcgtgccttaagggttgttgttcttgcggaagctgctgtaagttcgatgaggacgatagcgagccagtgcttaaaggcgtgaagcttcattatacatga

SEQ ID NO: 83 - DNA, 3822 bp, synthetic construct
  misc_feature 1..3822: note = Description of Artificial Sequence: Synthetic polynucleotide
  source 1..3822: mol_type = other DNA
atgtttgtgttcttggtgctgctacccctggtgagtagccagtgcgtgaacctgactactaggacacagctgccccccgcctataccaactcctttacaaggggcgtgtactaccctgacaaggtattcagaagcagtgtgctgcacagcactcaggatctctttctgccattcttcagcaatgtgacttggttccatgccatccacgtgagcggaaccaacgggacaaaacggtttgacaaccctgtgcttcctttcaatgatggtgtctactttgcctccactgagaaatccaatatcatccgcggctggatcttcgggaccacactcgattctaaaacacagtcactgctgattgtgaataatgctactaatgttgtgatcaaggtctgtgaattccagttttgcaatgatcctttcctgggagtatactatcataaaaacaacaagtcttggatggagagtgagttccgcgtctatagctccgcaaacaattgtacctttgagtacgtgtcacagccttttctaatggacttagagggaaaacaggggaattttaaaaacctgagagagttcgtcttcaagaatattgatggctatttcaagatctactccaaacacacacctatcaacttggtccgcgatctacctcagggattctcagccttagaacctctggtagatcttcccatagggatcaacataacccggttccagaccttactcgccctgcataggagttacctgacccccggagactcttcgtccggatggacagccggcgctgccgcatattacgtgggctacctccagcccagaacttttctgcttaagtataatgaaaatggaacaataaccgatgcagtggattgtgccctggaccccctgtccgagaccaagtgcactctgaaaagctttaccgtggaaaaaggaatttaccaaacctcaaattttcgagtgcagcctacagagagcattgttagatttcctaacatcactaacctatgtccatttggagaagtgtttaatgccactcggttcgcttccgtttatgcatggaatcggaaacggataagcaactgtgtcgcagactacagcgtgttgtacaacagcgcttcttttagtactttcaagtgttacggagtcagtccaactaaactcaacgacctatgcttcaccaacgtctacgccgacagctttgttattagaggagacgaggtgaggcagattgctccaggtcagaccggcaagatcgccgactacaattacaagctgcctgatgattttaccgggtgcgttattgcctggaactccaacaatttggattcaaaggttgggggtaactataactatctgtacagactgtttagaaagtctaacttgaagccatttgaacgtgacatctctacagaaatatatcaggcgggaagcacgccatgtaacggggtggaggggttcaactgctattttccactgcagtcttacggttttcagcccaccaatggtgtggggtaccagccatatagggtggtggtcctgagtttcgagctcctgcacgcacctgccacagtctgtggccctaagaagagcaccaatcttgtgaagaataagtgcgtcaacttcaactttaatgggctaactggtacaggcgtgctgaccgaatcgaacaaaaagttcctccccttccaacagtttggtagagacatcgcagataccacagacgccgtgcgggatcctcagaccctcgagattctcgatatcacgccttgctcctttggcggagtctccgtgattacgccaggaacaaatacttctaaccaggtggccgtgctttatcagggggtgaattgcaccgaagtgcctgtcgctattcatgcagaccagctgactccgacctggagggtgtattcaacaggatcgaacgtatttcagactcgcgctggttgccttattggggccgagcacgtcaataacagttatgagtgcgacatccctatcggggctggcatctgcgcatcgtaccagacacagactaactctcctaggagagcccgttccgtcgcatctcagtctatcatcgcctacactatgtctctgggagccgagaatagcgtggcctatagtaataattctattgcgatacctacgaacttcactatcagtgtgacgaccgaaattctgcccgtgtccatgaccaagacaagcgttgactgcaccatgtacatctgtggtgactctaccgagtgctccaacctgcttttacagtacggctcattttgtacacagttgaaccgcgcactcaccggaatcgctgtggagcaagataaaaatacgcaggaagtcttcgctcaagttaagcagatttataagactcccccaatcaaagacttcggcggcttcaattttagtcagatactgccagatcctagcaagcccagcaagaggtccttcattgaagatctccttttcaacaaggtgactttggctgacgctggcttcatcaagcagtatggagactgtctgggcgacatagccgcacgagacctgatttgtgcgcagaaattcaacgggctgacagtgctaccacctttactgactgatgaaatgatcgcccagtacaccagtgctctattggcaggaactatcacttctggttggacctttggggcaggcgccgctcttcagattccttttgctatgcagatggcataccgctttaacggcataggtgttacccagaatgtgctgtatgagaaccagaagctcattgcgaatcagtttaactcagccattgggaagatccaggattcactgtccagtactgcgtcagcattaggaaagctgcaagatgtagtgaatcagaacgcacaggctctgaatacactcgtgaaacaactctcttctaatttcggggcaatcagctccgtactgaatgatatcttgagtagactggacaaagtggaggctgaggtgcagatcgataggctgatcacaggccgcctccagagtctgcagacttacgtgacccagcagctcatccgggccgccgagatcagagcttcagccaatctggccgccacaaaaatgtcagagtgtgtgttaggccagagtaagcgggtagacttctgtggaaagggttaccatctgatgagctttccacagagcgccccccatggagttgtttttcttcatgtgacatacgtaccggcccaggaaaagaatttcaccacagcccctgcaatttgccatgacgggaaggcccacttccctcgggagggagtgttcgtgagcaacggaacccactggtttgtaacacagcgcaatttttacgaaccccagattatcaccaccgataatacattcgtttccggcaattgtgacgtggtcataggtatcgttaataacaccgtgtatgacccgttgcagcccgaattggactccttcaaggaagaactcgataagtacttcaaaaatcacacctccccggatgtggatttaggcgatataagcggaatcaatgctagtgtcgtgaatatccagaaagagatagacagattgaatgaagtggccaagaaccttaatgagtccctgatcgacctgcaggagttgggcaaatacgagcagtacatcaaatggccctggtatatctggctgggctttattgctggactgatcgcaatcgtcatggtgaccatcatgctctgctgcatgacctcctgctgctcatgcctgaagggctgttgttcctgcgggtcttgttgtaaatttgatgaagacgacagtgagccagtattgaaaggcgtaaaacttcattatacatga

SEQ ID NO: 84 - DNA, 3822 bp, synthetic construct
  misc_feature 1..3822: note = Description of Artificial Sequence: Synthetic polynucleotide
  source 1..3822: mol_type = other DNA
atgttcgtgttccttgtcctcctcccgttggtaagtagtcaatgtgtaaacctcaccactcggacacaactacccccggcatacacaaactcgttcacacggggcgtatattaccccgacaaagtttttaggagctctgttctacattccacacaagacctgtttctaccatttttcagcaatgtcacatggttccatgcaatacacgtgtctggtacaaacggcaccaagcgcttcgacaatcctgtgcttcccttcaacgacggggtttactttgcgagtaccgaaaagtccaatatcattcgcggctggatattcggaacaaccctagactctaagacacagagcttactgattgtaaataatgctacgaacgtcgtcattaaagtgtgcgaatttcagttctgcaatgaccccttcctcggcgtgtattatcacaaaaataacaagtcatggatggaaagcgaattccgagtctactcaagtgccaacaactgcaccttcgagtacgtttcacagccgtttctgatggacctagaaggaaagcaaggaaatttcaaaaaccttagagagtttgtgtttaagaatattgatggatactttaaaatatattcaaaacatacacccatcaacctcgtcagggatctccctcaggggttcagcgcattagagcctctcgttgacctacccatcgggattaatatcacgaggtttcaaacattgctagcactccataggtcctatctaacgcctggagattcttcttctgggtggacagcaggggctgcagcatattatgtcggctatctgcagcccaggaccttcttattgaaatataatgagaacgggacgatcacagacgccgtcgactgtgcgctcgatcctttaagtgaaacgaagtgtacactcaaaagctttaccgtggaaaaaggtatctatcagactagcaactttagggtccaacccacagaatctatcgtaaggttccctaatattacaaatctctgtccatttggtgaagttttcaacgcaacaagatttgcatcagtatatgcgtggaatagaaaacgcatctcaaactgcgtagcggactactcggtgctatacaactctgcttcattttccacttttaaatgttacggggtatccccgactaaacttaatgatctatgttttactaatgtctatgccgatagctttgtcatacgaggggatgaggttcgacagatagcccctggccaaacggggaagattgctgattataactataaattgccggatgacttcacaggatgcgttatagcatggaactcgaataatttagattctaaagtcggaggcaattacaattacctatacagattgtttagaaaatcgaacttgaaaccttttgaacgagatatttccacagagatatatcaggctgggtcaactccgtgtaatggggttgaaggcttcaattgctatttccctctacaatcatacggcttccagccgacgaacggagtggggtaccagccctaccgagttgttgtactaagttttgagcttcttcacgcacctgcaactgtatgtgggccgaagaagagcacaaacctagtgaagaacaagtgcgtaaactttaattttaacggcttgaccgggaccggtgtcctgacggagtccaacaaaaagttcctgcctttccagcagtttggtcgtgatattgcagataccactgatgcggtgagggacccgcagaccctggaaatcctagatataaccccatgcagcttcggcggagtatccgtgatcacgccgggtacgaatacaagtaaccaggtcgctgtcctttatcaaggagtaaactgtacggaggttccagtagctatccacgcggaccaactgacgcctacgtggcgtgtttattcgacgggatcaaatgtctttcagactcgtgcggggtgcctcatcggggcggagcatgtcaataatagctatgagtgcgacatccccataggcgcaggaatatgtgcatcctaccaaacccagacaaattcaccccgtagggcacgcagtgttgcgtctcaaagcattattgcatatacgatgtcgcttggcgcggagaactctgtggcctacagtaataacagtatcgccatacccactaatttcactattagcgttactacggaaatactgccagtgtccatgacgaaaacatccgtagactgtaccatgtacatatgcggggattcgactgagtgtagcaacctattgctccaatacggatctttttgcacgcaactaaatcgggccctaacgggcatagcggttgaacaggacaaaaacacccaggaagtatttgcgcaggtgaaacaaatttataagacgcctccgattaaagattttggcggattcaacttctcgcaaatcttaccagacccctctaagccctcaaagagaagtttcatagaggatctcttattcaacaaggtcaccttggcagatgcaggttttataaagcaatatggggactgtctcggtgacatcgctgcgcgtgacctgatatgcgctcaaaaattcaatggtctgacggtgttaccgccgctgctaaccgacgagatgattgctcagtacacctcggcactgctggccggtacgattacgtcgggatggacgttcggtgcgggtgcggcactacaaataccgttcgcgatgcagatggcgtaccgctttaatgggattggcgtcacgcagaatgtgctgtacgagaaccagaagttaatagcaaaccagttcaatagcgcaattggtaaaatacaggattccctatcaagtactgcaagcgccctggggaaactccaagacgtcgtgaaccaaaatgcccaagcccttaatactcttgtaaaacagctgagttccaactttggggctattagtagtgttctgaacgacatactttcgcgacttgacaaggtggaggcggaagttcaaatcgaccggttaatcacggggaggctgcaatcactgcagacctacgtaacacaacaattgataagggccgcagaaattcgggcatccgctaatctagccgcgaccaagatgtctgaatgcgttctaggccagtcgaagcgagtggacttctgcggtaagggttaccatctaatgagctttccccagtccgctccccatggtgtagtcttcttgcatgtgacttatgtcccggcacaggaaaagaacttcacgacagcacccgctatatgccacgacggaaaggcgcactttccacgagagggggtcttcgtgagtaatggaacccattggttcgtgacacagcgtaatttttatgagcctcagatcataacgactgacaatacttttgtcagtgggaactgcgacgtagttataggaattgtgaataatacagtgtatgatcccctacaaccggagttggattcttttaaggaagagctcgataaatattttaaaaaccatactagcccggacgtcgaccttggggatataagtgggataaatgcttcagtggtgaatatccaaaaagagattgatcgcctaaacgaggtggccaagaacctaaatgaaagcttaatagatctacaagaattgggcaagtacgaacaatatataaagtggccatggtacatctggctgggctttatcgccggtctcattgccattgtcatggtcacgattatgctttgttgcatgacttcttgttgctcctgtttaaagggttgctgttcatgcggttcatgttgcaagtttgatgaggacgatagcgagcccgtcttaaaaggagttaaattacattatacctga

SEQ ID NO: 85 - DNA, 3822 bp, synthetic construct
  misc_feature 1..3822: note = Description of Artificial Sequence: Synthetic polynucleotide
  source 1..3822: mol_type = other DNA
atgtttgtcttcctggtcttgctgccgctcgtgtctagccagtgcgtgaatctcaccacccgcacccagcttccacctgcctacactaacagcttcacccgaggggtgtattaccctgacaaggtattccggtcctccgtcctccatagcacgcaggacctttttctgcccttcttctcaaatgtgacatggttccatgccattcacgtgagcggcacgaatggaacgaagcgctttgataaccccgtgctgcctttcaatgacggcgtctacttcgcctccactgaaaagtcaaacatcatccggggctggatctttggcaccactcttgattcaaagacccagtcactgctgattgtgaacaatgctacaaacgtggttatcaaagtctgcgagtttcagttctgtaacgatccatttttgggagtgtactaccacaagaacaacaagtcctggatggagtctgagttcagagtgtatagctctgctaacaactgcaccttcgagtacgtgtcccagcctttccttatggacctggaaggcaaacagggcaatttcaaaaacctgagagagttcgtgtttaagaacattgacggatacttcaaaatttattctaagcacacaccaattaacttagtgcgggacctaccccaaggctttagcgccctagagcccctggttgacctgcccattgggatcaatataacaaggttccaaactctactggctctgcatagaagttatctgaccccaggagacagctctagtggttggaccgccggcgcagcagcctactatgtcgggtacttacagccacgcacgttccttctgaagtacaatgagaacgggacaatcactgacgcagtagactgtgcactggacccgctaagcgagactaagtgcacacttaaatccttcacggtggagaaaggcatttatcagacctctaacttcagggtgcagccaacagaaagcattgtgcgattcccaaatattactaatctttgccctttcggggaggtctttaatgcaactagattcgcatcagtctatgcgtggaaccgcaaacgcatttccaattgtgtcgcagactactcagtgctgtacaactctgcctctttcagtacgttcaagtgttacggagtgtcacccactaaactgaacgacctgtgctttacaaatgtctacgctgactccttcgtgattaggggagacgaggtgagacaaattgcccccggacagactgggaagattgccgactacaattataagcttcctgatgatttcactggctgtgttattgcctggaatagtaacaatctggatagcaaggtgggaggcaactataactacttatatcgactgtttaggaagagtaatctgaaaccatttgagcgggatatttccacagaaatttaccaggccgggagcacaccatgtaatggggtggagggatttaattgttacttcccactccagagctatggtttccaacccaccaatggagtgggttaccagccctatagagtcgtggtgcttagttttgagctgcttcacgccccagcaaccgtctgcggtcccaaaaagtcgaccaatctcgtgaaaaacaaatgcgtaaacttcaactttaacggcttaacaggaaccggcgtgctcaccgaaagcaacaagaaattccttccatttcagcaattcggaagggacatcgccgacacaacagacgccgtcagggacccacagactctggagatactggacatcactccttgttcgtttgggggcgtctcggtcatcacacccgggactaatactagtaatcaggtagcagttttatatcaaggcgtcaactgtaccgaagtacctgtggccatacacgctgatcagctaacgccaacatggcgagtctattccaccggctctaacgtttttcagaccagggctgggtgcctgataggggcagagcacgtcaataattcctatgagtgtgatatccccataggtgcggggatctgtgccagctatcaaacccaaaccaattcaccaaggcgagcacggtctgtggcttctcagagcataattgcatatacaatgtcactgggcgctgagaatagcgttgcatactctaataacagcatagccattcccacgaactttactatcagtgtgacaaccgaaatattgccagtttcgatgaccaaaactagcgtggattgcacgatgtacatctgtggagactctaccgaatgcagcaatctgctattacaatatggcagcttctgtacacagttaaatcgagccttgacaggcatcgcagtggaacaggacaaaaatactcaagaggtgtttgcacaggtgaagcaaatctacaaaacgccccccattaaagattttggcgggttcaatttttcacaaattctccccgacccgtctaagccgagtaagcggtccttcatcgaagatctgctctttaacaaagtaaccctcgccgatgccggctttattaagcagtatggcgactgcctgggggatatagccgctcgtgacctgatttgcgcccagaagttcaatggtctgaccgtgttgcctcctttattgaccgatgaaatgattgcccagtacactagtgccctgctggccggcactatcacgtctgggtggaccttcggagctggtgccgccttgcagataccttttgcaatgcagatggcctataggtttaatggtatcggagtgactcagaacgtactgtacgagaaccagaagctcatcgctaatcaatttaactccgctatcggaaaaatccaggacagcctctcttctacagctagcgctctgggcaaactgcaggatgtcgttaatcagaatgcccaggccctgaacaccttggttaaacaactatcttccaacttcggggccatatccagtgtgttgaatgatattctctcccgcttggataaggtggaagctgaggtgcagatcgatcgcttgatcaccggcagactgcagtccctccagacatatgtaactcagcagctgattagagccgccgagataagggcaagtgcgaatctggctgccaccaagatgagcgaatgtgtattgggccagagcaaacgagttgatttttgcggtaaggggtatcatttaatgtctttccctcaatccgcacctcatggcgtagttttcctgcatgtgacttatgtcccggctcaggagaagaattttaccacagcccccgcgatctgccatgacggaaaggcccacttcccccgggaaggcgtgtttgtatccaatgggactcactggtttgtcactcagcgaaatttttatgaaccacagatcatcaccactgacaacacatttgttagtggaaactgcgatgtggtcatcggcatcgtgaataacactgtctatgatccactgcaacctgaactggattcttttaaagaggaactcgacaagtattttaaaaaccacactagccctgacgtggatctcggtgacatttctggcatcaacgctagcgtagtgaacattcagaaagagatagatagacttaatgaggtggccaagaacctcaacgaaagtctgatcgacctccaggaactggggaaatacgagcagtacattaaatggccttggtacatatggctggggttcattgctgggctgatcgcaatagtgatggtgaccataatgctctgttgcatgactagctgctgcagctgcctgaagggctgctgtagttgtgggtcatgttgtaagtttgacgaagatgatagcgagcctgtccttaaaggagtgaagctccactacacctag

SEQ ID NO: 86 - DNA, 3822 bp, synthetic construct
  misc_feature 1..3822: note = Description of Artificial Sequence: Synthetic polynucleotide
  source 1..3822: mol_type = other DNA
atgtttgtctttctggtcctgcttcccctcgttagttctcagtgtgtgaacctcaccacacggacgcaactccctccagcttacacaaattcttttacgcgaggcgtgtattatccggataaagttttcaggtcctccgtcctgcactccacgcaggacctttttttgccgttcttttctaacgtaacatggtttcatgccattcatgtttccgggacaaacggtacgaaacgctttgataaccctgtgctgccgttcaatgatggcgtttactttgcctctacggaaaagagtaacataatccgaggctggatcttcgggaccaccctggatagcaagactcagagtcttctcatcgttaataacgctacaaacgttgttatcaaagtctgcgaattccagttttgcaacgatccctttttgggggtatactatcacaaaaacaacaaaagttggatggaatcagagtttcgcgtgtattcttctgcgaacaactgcacgtttgaatacgttagtcagccttttctcatggacttggagggcaaacaggggaactttaaaaacttgcgggagttcgtttttaagaacatagatggttacttcaaaatttatagcaaacatacaccgatcaacctcgtgagagatctcccacagggtttttccgcactcgaaccgctcgtggatctgccgattggaattaacattacccgcttccagaccctgttggctctgcacagaagctatctgacgccaggggattccagcagtggatggacggcgggtgcggccgcgtattatgtaggctatctccaaccccgaacgttcttgctgaagtacaatgagaatgggaccattacggatgctgtggattgtgcattggatcctctctctgagacaaaatgcacccttaaaagcttcactgtagaaaagggtatttatcagactagcaacttccgcgtacaaccaacggagtctatcgttaggttccccaacattactaacttgtgcccatttggcgaagtgtttaacgcaactaggtttgctagtgtctatgcttggaatcgaaagagaataagcaattgtgtcgcagattactccgtattgtataattctgcaagcttttcaacattcaagtgctacggagtgtctcccaccaaattgaacgacctgtgttttactaacgtgtatgccgactctttcgttatccgaggcgatgaggtcaggcaaattgcccccggacaaactgggaaaattgcggattataattacaagcttccagacgactttacgggctgtgttatcgcatggaactccaacaatctcgacagcaaagtgggtggaaattataattatttgtatagattgtttcgcaagtccaacctgaagccattcgagagagacatctccaccgagatttatcaagccggctcaactccttgcaacggagtcgaaggcttcaactgttattttccgcttcagtcctatggttttcaacctacgaacggcgtgggataccagccgtatcgagtcgtggtactgtcctttgaacttttgcacgccccagcaactgtttgcggaccaaaaaagtccacaaatctcgtcaaaaacaagtgcgttaattttaattttaacgggcttacgggtactggtgtactgacggagtccaataagaaattcctgccattccaacagtttggacgggatattgctgatacgaccgacgctgtgcgagatccccagacacttgagatcctcgacataaccccctgtagttttggtggagtgtctgtaattacccccggaacgaacaccagcaaccaagttgcggtgctttatcagggtgttaattgcactgaggttcctgtcgcgatacatgccgaccaactgacgcctacatggcgagtatattcaacgggctccaacgtcttccagacgcgagccggttgtctcattggagctgaacatgtgaacaactcttatgaatgcgatataccaattggggctggaatctgcgcctcttatcagacgcagactaactcacccagacgagcacggagcgtggcaagccaatccattattgcctacaccatgtccttgggagctgagaattcagtcgcctattctaataatagcattgctataccgacgaactttacaatttccgtaactaccgaaatattgcccgtcagtatgactaagactagcgttgactgcacaatgtacatttgcggcgatagtaccgaatgctctaatcttcttctgcagtatggtagtttttgtacacaactgaatcgagctctgactgggatcgcagtcgaacaggacaaaaatacacaggaagttttcgcgcaagtgaagcaaatctacaaaacgcctcccataaaagatttcggaggattcaatttcagtcagatactccctgatccctctaaaccatctaaacgatcctttatcgaagatttgctgttcaacaaagtcacccttgctgacgctggattcataaagcagtacggggattgtcttggcgatatcgcagcccgagaccttatttgtgcccaaaaatttaacggacttacggtactccctccccttctgactgacgaaatgatagcccagtacaccagtgctctgctggctggcaccataacgagcggatggacttttggtgcgggtgcagcactgcagatccccttcgcgatgcaaatggcatacaggtttaatgggattggggtcacccagaatgtattgtacgagaaccagaagcttatagcgaatcaatttaacagtgcaattggtaagattcaggacagcctttcaagtaccgcgagtgctctcgggaagttgcaggatgtagtaaatcaaaatgcgcaggcgctgaatacgttggttaaacagctcagcagtaattttggagcaatttctagcgtgctgaatgacatcctcagcagactcgataaggtggaggctgaggtacagatagatagactcatcacgggcagattgcagagtttgcagacatacgtcacgcaacaactcattcgagcagcagaaattagagcatccgcaaatctggcggccacgaaaatgtctgagtgcgttctggggcagtccaagagagttgacttttgtgggaaaggatatcatctgatgagttttccgcagtcagcgccacatggtgtggtctttctgcacgttacttatgtccccgcacaggagaagaattttacgaccgcgccagctatttgccatgacggtaaggctcacttcccgagggaaggggtattcgtttctaacggtacgcattggtttgttacgcaacggaacttttatgaaccacagattattaccaccgacaacacattcgtaagtggaaactgtgatgtcgttatcggaatagtaaataataccgtttatgacccccttcagcctgaacttgattccttcaaggaagagctcgataaatactttaagaaccacaccagccccgatgttgacctgggtgatatatctgggatcaacgcttctgtcgtcaacattcaaaaagagatcgatcgcctgaatgaggtggccaaaaacctcaatgaaagtctcattgaccttcaagaactcggtaagtacgagcaatacatcaagtggccatggtacatatggctgggcttcattgctgggttgatagctatagtgatggttacgataatgttgtgttgtatgacatcctgctgtagctgccttaaaggttgttgttcttgcggttcttgttgtaagtttgacgaagatgattcagagcctgttctgaaaggggtgaagctccattatacttga

SEQ ID NO: 87 - DNA, 3822 bp, synthetic construct
  misc_feature 1..3822: note = Description of Artificial Sequence: Synthetic polynucleotide
  source 1..3822: mol_type = other DNA
atgttcgtgttcctggtgcttctccctctggtgtctagccagtgcgttaatctgaccaccagaacacaacttcctcctgcctacaccaacagcttcaccagaggcgtgtactaccctgataaggtgttcagatcttctgtgctgcacagcacccaggacctgtttctgcccttcttcagcaacgtgacctggtttcatgccattcatgtgtctggcaccaatggcaccaagaggttcgacaatcccgttctgcccttcaatgatggcgtgtattttgccagcaccgagaagagcaacatcatcaggggatggatcttcggcaccacactggacagcaaaacacagtctctgctgatcgtgaacaatgccaccaacgtggtgatcaaggtgtgcgagttccagttctgcaacgacccttttctgggcgtgtattaccacaagaacaacaagtcctggatggagagcgagttccgggtgtactctagcgccaacaactgcaccttcgagtatgtttctcagcctttcctgatggacctggagggcaaacagggcaacttcaagaacctgcgggagtttgtgttcaagaacatcgacggctacttcaagatctacagcaagcacacccccatcaacctggtgagggacctgcctcaaggattttctgcccttgaacctttagtggatctgcctatcggcatcaacatcacccggttccagaccctgttagctctgcacagaagctatctgacacctggcgattcttcttctggatggacagctggagctgccgcctattatgtgggctatttacagcctaggaccttcctgctgaagtacaacgagaatggcaccatcaccgacgctgtggattgtgctcttgatcctctgtctgagaccaagtgtaccctgaagagcttcacagtggagaagggcatctaccagaccagcaacttcagagtgcagcctacagagagcatcgtgagattccccaacatcaccaacctgtgcccatttggcgaggtgtttaatgccaccagattcgccagcgtgtatgcctggaacagaaagaggatcagcaattgcgtggccgattatagcgtgctgtacaacagcgccagcttcagcaccttcaagtgttatggcgtttctcccaccaagctgaatgacctgtgcttcaccaacgtgtacgccgacagcttcgtgattagaggcgatgaggtgagacagattgctcctggacaaacaggcaagattgccgactacaactacaagctgcccgacgactttaccggctgtgtgattgcctggaatagcaacaatctggacagcaaagtgggaggcaactacaactacctgtaccggctgttccggaagagcaacctgaagccattcgagagagatatcagcaccgagatctatcaggctggcagcacaccctgtaatggagtggagggcttcaactgctactttcctctgcagtcttatggctttcagcccaccaacggagtgggatatcagccctacagagtggttgttctgagcttcgagctgcttcatgctcctgctacagtgtgtggccctaagaagagcaccaatctggtgaagaacaagtgcgtgaacttcaacttcaacggcctgacaggcaccggagtgctgaccgagagcaacaagaagtttctgccttttcagcagtttggaagggatatcgccgacaccaccgatgccgtgagagaccctcaaacactggagattctggatattaccccttgctcttttggaggcgtgagcgtgatcacacctggcaccaataccagcaatcaggttgctgtgctgtatcagggagtgaattgcaccgaggttcctgtggccatccatgctgatcaactgacacctacctggagagtgtactctacaggcagcaacgtgtttcagaccagagccggatgtctgattggagccgaacacgtgaacaacagctatgagtgcgatatccctattggagccggcatctgtgcctcttaccagacccagaccaatagccccagaagagctagatcagttgcttctcagagcatcatcgcctacaccatgtctctgggagccgagaactctgtggcctacagcaataactctatcgccatccctaccaacttcaccatcagcgtgaccaccgagattctgcccgtgagcatgacaaagactagcgtggattgcaccatgtacatttgcggcgatagcaccgagtgcagcaacctgctgctgcaatatggcagcttttgtacccagctgaatagagcccttacaggcattgccgtggagcaggacaagaacacacaggaggtgtttgctcaggtgaagcagatctacaagaccccacccatcaaggactttggcggcttcaacttcagccagattctgcctgatcccagcaaacctagcaagcggagctttatcgaagacctgctgttcaacaaggtgacactggctgatgccggcttcatcaagcagtacggcgattgtttgggcgatattgccgctagagatctgatttgtgcccagaagttcaacggcctgacagtgctgcctcctctgctgacagatgagatgattgcccagtatacatctgctcttcttgccggcaccatcacctctggctggacctttggagctggagctgctctgcaaattccttttgctatgcaaatggcctaccggttcaacggcatcggagtgacccagaacgtgctgtacgagaaccaaaagctgattgctaaccagttcaacagcgccatcggcaagatccaggacagcctgagctctacagcttctgctttgggaaaactgcaggatgtggtgaaccagaatgctcaggccctgaacaccctggtgaaacagctgagcagcaattttggcgccatctcttctgtgctgaatgacatcctgagcaggctggacaaagtggaagccgaggtgcaaatcgacaggctgattacaggcagactgcagtctctgcagacatacgttacacaacagctgatcagagccgccgagatcagagctagcgctaatctggctgccaccaagatgtctgaatgtgtgttaggacagagcaagcgggtggacttttgcggcaagggatatcacctgatgagcttccctcaatctgctcctcatggagtggtgttcctgcatgtgacctacgtgcctgctcaggagaagaatttcacaacagctcctgccatctgccacgatggaaaagcccacttcccaagagaaggcgtgttcgtgtctaatggaacacactggttcgtgacccagcggaatttctacgagccccagatcatcaccaccgacaacacatttgtgagcggcaattgcgatgtggtgatcggcatcgtgaacaacaccgtgtacgaccctctgcaacctgaactggacagctttaaggaggagctggacaagtacttcaagaaccacaccagccctgacgtggatctgggcgatatctctggcattaatgccagcgtggtgaatatccagaaggagatcgaccggctgaatgaagtggccaagaacctgaacgaaagcctgatcgacctgcaagaactgggcaagtatgagcagtacatcaagtggccctggtacatctggctgggctttattgccggactgatcgccatcgttatggtgaccattatgctgtgctgcatgaccagctgctgctcttgtctgaagggctgttgctcttgtggctcttgctgtaagttcgatgaggacgattccgagcctgtgctgaaaggcgtgaaactgcactatacatga

SEQ ID NO: 88 - DNA, 119 bp, synthetic construct
  misc_feature 1..119: note = Description of Artificial Sequence: Synthetic polynucleotide
  source 1..119: mol_type = other DNA
gtaagtttagtctttttgtcttttatttcaggtccatcggtgctgctttaacactgttgaggctcctggtggtgcaaatcaaagaactgctcctcagtggacgttgcctttacttctag

SEQ ID NO: 89 - DNA, 3822 bp, synthetic construct
  misc_feature 1..3822: note = Description of Artificial Sequence: Synthetic polynucleotide
  source 1..3822: mol_type = other DNA
atgtttgtcttcctggtcttgctgccgctggtgagcagccagtgcgtgaatctcaccacccgcacccagcttccacctgcctacactaacagcttcacccgaggggtgtattaccctgacaaggtattccggtcctccgtcctccatagcacgcaggacctttttctgcccttcttctcaaatgtgacatggttccatgccattcacgtgagcggcacgaatggaacgaagcgctttgataaccccgtgctgcctttcaatgacggcgtctacttcgcctccactgaaaagtcaaacatcatccggggctggatctttggcaccactcttgattcaaagacccagtcactgctgattgtgaacaatgctacaaacgtggttatcaaggtgtgtgagtttcagttctgtaacgatccatttttgggagtgtactaccacaagaacaacaagtcctggatggagtctgagttcagagtgtatagctctgctaacaactgcaccttcgagtacgtgtcccagcctttccttatggacctggaaggcaaacagggcaatttcaaaaacctgagagagttcgtgtttaagaacattgacggatacttcaaaatttattctaagcacacaccaattaacttagtgcgggacctaccccaaggctttagcgccctagagcccctggttgacctgcccattgggatcaatataacaaggttccaaactctactggctctgcatagaagttatctgaccccaggagacagctctagtggttggaccgccggcgcagcagcctactatgtcgggtacttacagccacgcacgttccttctgaagtacaatgagaacgggacaatcactgacgcagtagactgtgcactggacccgctaagcgagactaagtgcacacttaaatccttcacggtggagaaaggcatttatcagacctctaacttcagggtgcagccaacagaaagcattgtgcgattcccaaatattactaatctttgccctttcggggaggtctttaatgcaactagattcgcatcagtctatgcgtggaaccgcaaacgcatttccaattgtgtcgcagactactcagtgctgtacaactctgcctctttcagtacgttcaagtgttacggagtgtcacccactaaactgaacgacctgtgctttacaaatgtctacgctgactccttcgtgattaggggagacgaggtgagacaaattgcccccggacagactgggaagattgccgactacaattataagcttcctgatgatttcactggctgtgttattgcctggaatagtaacaatctggatagcaaggtgggaggcaactataactacttatatcgactgtttaggaagagtaatctgaaaccatttgagcgggatatttccacagaaatttaccaggccgggagcacaccatgtaatggggtggagggatttaattgttacttcccactccagagctatggtttccaacccaccaatggagtgggttaccagccctatagagtcgtggtgcttagttttgagctgcttcacgccccagcaaccgtctgcggtcccaaaaagtcgaccaatctcgtgaaaaacaaatgcgtaaacttcaactttaacggcttaacaggaaccggcgtgctcaccgaaagcaacaagaaattccttccatttcagcaattcggaagggacatcgccgacacaacagacgcggtgagggacccacagactctggagatactggacatcactccttgttcgtttgggggcgtctcggtcatcacacccgggactaatactagtaatcaggtagcagttttatatcaaggcgtcaactgtaccgaagtacctgtggccatacacgctgatcagctaacgccaacatggcgagtctattccaccggctctaacgtttttcagaccagggctgggtgcctgataggggcagagcacgtcaataattcctatgagtgtgatatccccataggtgcggggatctgtgccagctatcaaacccaaaccaattcaccagggagcgcaagctctgtggcttctcagagcataattgcatatacaatgtcactgggcgctgagaatagcgttgcatactctaataacagcatagccattcccacgaactttactatcagtgtgacaaccgaaatattgccagtttcgatgaccaaaactagcgtggattgcacgatgtacatctgtggagactctaccgaatgcagcaatctgctattacaatatggcagcttctgtacacagttaaatcgagccttgacaggcatcgcagtggaacaggacaaaaatactcaagaggtgtttgcacaggtgaagcaaatctacaaaacgccccccattaaagattttggcgggttcaatttttcacaaattctccccgacccgtctaagccgagtaagcggtccttcatcgaagatctgctctttaacaaagtaaccctcgccgatgccggctttattaagcagtatggcgactgcctgggggatatagccgctcgtgacctgatttgcgcccagaagttcaatggtctgaccgtgttgcctcctttattgaccgatgaaatgattgcccagtacactagtgccctgctggccggcactatcacgtctgggtggaccttcggagctggtgccgccttgcagataccttttgcaatgcagatggcctataggtttaatggtatcggagtgactcagaacgtactgtacgagaaccagaagctcatcgctaatcaatttaactccgctatcggaaaaatccaggacagcctctcttctacagctagcgctctgggcaaactgcaggatgtcgttaatcagaatgcccaggccctgaacaccttggttaaacaactatcttccaacttcggggccatatccagtgtgttgaatgatattctctcccgcttggatccacctgaagctgaggtgcagatcgatcgcttgatcaccggcagactgcagtccctccagacatatgtaactcagcagctgattagagccgccgagataagggcaagtgcgaatctggctgccaccaagatgagcgaatgtgtattgggccagagcaaacgagttgatttttgcggtaaggggtatcatttaatgtctttccctcaatccgcacctcatggcgtagttttcctgcatgtgacttatgtcccggctcaggagaagaattttaccacagcccccgcgatctgccatgacggaaaggcccacttcccccgggaaggcgtgtttgtatccaatgggactcactggtttgtcactcagcgaaatttttatgaaccacagatcatcaccactgacaacacatttgttagtggaaactgcgatgtggtcatcggcatcgtgaataacactgtctatgatccactgcaacctgaactggattcttttaaagaggaactcgacaagtattttaaaaaccacactagccctgacgtggatctcggtgacatttctggcatcaacgctagcgtagtgaacattcagaaagagatagatagacttaatgaggtggccaagaacctcaacgaaagtctgatcgacctccaggaactggggaaatacgagcagtacattaaatggccttggtacatatggctggggttcattgctgggctgatcgcaatagtgatggtgaccataatgctctgttgcatgactagctgctgcagctgcctgaagggctgctgtagttgtgggtcatgttgtaagtttgacgaagatgatagcgagcctgtccttaaaggagtgaagctccactacacctag

SEQ ID NO: 90 - protein, 1273 aa, synthetic construct
  REGION 1..1273: note = Description of Artificial Sequence: Synthetic polypeptide
MFVFLVLLPLVSSQCVNLTTRTQLPPAYTNSFTRGVYYPDKVFRSSVLHSTQDLFLPFFSNVTWFHAIHVSGTNGTKRFDNPVLPFNDGVYFASTEKSNIIRGWIFGTTLDSKTQSLLIVNNATNVVIKVCEFQFCNDPFLGVYYHKNNKSWMESEFRVYSSANNCTFEYVSQPFLMDLEGKQGNFKNLREFVFKNIDGYFKIYSKHTPINLVRDLPQGFSALEPLVDLPIGINITRFQTLLALHRSYLTPGDSSSGWTAGAAAYYVGYLQPRTFLLKYNENGTITDAVDCALDPLSETKCTLKSFTVEKGIYQTSNFRVQPTESIVRFPNITNLCPFGEVFNATRFASVYAWNRKRISNCVADYSVLYNSASFSTFKCYGVSPTKLNDLCFTNVYADSFVIRGDEVRQIAPGQTGKIADYNYKLPDDFTGCVIAWNSNNLDSKVGGNYNYLYRLFRKSNLKPFERDISTEIYQAGSTPCNGVEGFNCYFPLQSYGFQPTNGVGYQPYRVVVLSFELLHAPATVCGPKKSTNLVKNKCVNFNFNGLTGTGVLTESNKKFLPFQQFGRDIADTTDAVRDPQTLEILDITPCSFGGVSVITPGTNTSNQVAVLYQGVNCTEVPVAIHADQLTPTWRVYSTGSNVFQTRAGCLIGAEHVNNSYECDIPIGAGICASYQTQTNSPGSASSVASQSIIAYTMSLGAENSVAYSNNSIAIPTNFTISVTTEILPVSMTKTSVDCTMYICGDSTECSNLLLQYGSFCTQLNRALTGIAVEQDKNTQEVFAQVKQIYKTPPIKDFGGFNFSQILPDPSKPSKRSFIEDLLFNKVTLADAGFIKQYGDCLGDIAARDLICAQKFNGLTVLPPLLTDEMIAQYTSALLAGTITSGWTFGAGAALQIPFAMQMAYRFNGIGVTQNVLYENQKLIANQFNSAIGKIQDSLSSTASALGKLQDVVNQNAQALNTLVKQLSSNFGAISSVLNDILSRLDPPEAEVQIDRLITGRLQSLQTYVTQQLIRAAEIRASANLAATKMSECVLGQSKRVDFCGKGYHLMSFPQSAPHGVVFLHVTYVPAQEKNFTTAPAICHDGKAHFPREGVFVSNGTHWFVTQRNFYEPQIITTDNTFVSGNCDVVIGIVNNTVYDPLQPELDSFKEELDKYFKNHTSPDVDLGDISGINASVVNIQKEIDRLNEVAKNLNESLIDLQELGKYEQYIKWPWYIWLGFIAGLIAIVMVTIMLCCMTSCCSCLKGCCSCGSCCKFDEDDSEPVLKGVKLHYT

SEQ ID NO: 91 - DNA, 1887 bp, synthetic construct
  misc_feature 1..1887: note = Description of Artificial Sequence: Synthetic polynucleotide
  source 1..1887: mol_type = other DNA
atggctggcgaggcccccttcctttacctgtacgcccttgtgtatttcctgcagagcatcaattttgtgagaatcatcatgaggctgtggctttgctggaaatgtaggagcaagaaccccctgttgtatgacgccaactactttctgtgttggcacaccaatctcgccgtgttccagagtgcctctaagatcattacactgaaaaagcggtggcagcttgcactttctaagggagtgcatttcgtttgcaacctgctcctggtgacactcaagcagggggaaatcaaagacgccacccctagcgacttcgttagagccactgccacaatcccaatccaggcttccctgcctttcggctggcttatcgtgggtgtggcactgttggctgtgcggagaccacagggactgcctaataatacagctagctggtttaccgctctgacacagcatggcaaagaagacctcaagttccctcgcggtcagggggtgcctattaacactaatagctctccagacgaccaaattgggtattacaggcgcgccacaagacggatcatggcctgcttagtggggctgatgtggctatcctattttattgctagctttcgcctgaagaaggacaagaagaagaaagctgatgagacccaggcactgccccagcgccaaaagaagcagcagacagtcacactgctccctgctgcagacctggatgacttcagcaagcagctgcaggggaactttggcgaccaggagctgattagacaggggactgactataagcattggcctcagattgctcagttcgccccaagtgcatccgccttcttcgggatgtcacgaataggaatggaagtgaccccttctgggacatggttgacatacaccggagcaatcaagattacctccggggacggtaccacgtctcctattagcgaacacgattatcagatagggggatatactgagaagtgggagtccggcgtcaaaaagatgagtgggaaaggccagcagcaacaaggccaaacagttactaaaaagtctgccgcagaagctagtaaaaagcctcgccagaagcggacagccaccaaagcttacaatgtgactcaggccttcggccgccgggggcctgaacagaccctcttgtggcccgttaccctcgcatgtttcgtgcttgcagctgtgtacaggatcaattggtttaaggatcaggttatcctgttgaacaaacatatagatgcctataagacattcccacccaccgagccaaagaaagataagaaaaagaaaactagtcctgcaaggatggccggcaatggaggagacgcagccttagccctgctcttactcgacaggctgaaccaacttgagtctaaaatgagcggtaaagggcagaagatgaaggatctgtccccaaggtggtatttctactatctgggcaccggccctgaggattgtgtcgtcctccactcatacttcactagcgattattaccagctgtatagtacacaattatctaccgacacaggcgtcgagcacgtgaccttctttatatacaataagatcgtggatgaaccagaggagcatgtgcagatccacactattgatggctctagcgggggcatcatctgggtggcaacagaaggagccctcaacaccccaaaggaccatatcggcaccaggaatccagccaacaatgccgccattgttctgcagctccctcagggcactactctccctaaaggcttctatgctgagggacccggaccaggcgccaaatttgttgctgcttggacactgaaagctgctgctgggcccggaccaggccagtacatcaaggccaactctaagtttatcggcatcaccgaattgggacctggacccggctag

SEQ ID NO: 92 - protein, 628 aa, synthetic construct
  REGION 1..628: note = Description of Artificial Sequence: Synthetic polypeptide
MAGEAPFLYLYALVYFLQSINFVRIIMRLWLCWKCRSKNPLLYDANYFLCWHTNLAVFQSASKIITLKKRWQLALSKGVHFVCNLLLVTLKQGEIKDATPSDFVRATATIPIQASLPFGWLIVGVALLAVRRPQGLPNNTASWFTALTQHGKEDLKFPRGQGVPINTNSSPDDQIGYYRRATRRIMACLVGLMWLSYFIASFRLKKDKKKKADETQALPQRQKKQQTVTLLPAADLDDFSKQLQGNFGDQELIRQGTDYKHWPQIAQFAPSASAFFGMSRIGMEVTPSGTWLTYTGAIKITSGDGTTSPISEHDYQIGGYTEKWESGVKKMSGKGQQQQGQTVTKKSAAEASKKPRQKRTATKAYNVTQAFGRRGPEQTLLWPVTLACFVLAAVYRINWFKDQVILLNKHIDAYKTFPPTEPKKDKKKKTSPARMAGNGGDAALALLLLDRLNQLESKMSGKGQKMKDLSPRWYFYYLGTGPEDCVVLHSYFTSDYYQLYSTQLSTDTGVEHVTFFIYNKIVDEPEEHVQIHTIDGSSGGIIWVATEGALNTPKDHIGTRNPANNAAIVLQLPQGTTLPKGFYAEGPGPGAKFVAAWTLKAAAGPGPGQYIKANSKFIGITELGPGPG

SEQ ID NO: 93 - DNA, 13746 bp, synthetic construct
  misc_feature 1..13746: note = Description of Artificial Sequence: Synthetic polynucleotide
  source 1..13746: mol_type = other DNA
taatacgactcactataatgggcggcgcatgagagaagcccagaccaattacctacccaaaatggagaaagttcacgttgacatcgaggaagacagcccattcctcagagctttgcagcggagcttcccgcagtttgaggtagaagccaagcaggtcactgataatgaccatgctaatgccagagcgttttcgcatctggcttcaaaactgatcgaaacggaggtggacccatccgacacgatccttgacattggaagtgcgcccgcccgcagaatgtattctaagcacaagtatcattgtatctgtccgatgagatgtgcggaagatccggacagattgtataagtatgcaactaagctgaagaaaaactgtaaggaaataactgataaggaattggacaagaaaatgaaggagctcgccgccgtcatgagcgaccctgacctggaaactgagactatgtgcctccacgacgacgagtcgtgtcgctacgaagggcaagtcgctgtttaccaggatgtatacgcggttgacggaccgacaagtctctatcaccaagccaataagggagttagagtcgcctactggataggctttgacaccaccccttttatgtttaagaacttggctggagcatatccatcatactctaccaactgggccgacgaaaccgtgttaacggctcgtaacataggcctatgcagctctgacgttatggagcggtcacgtagagggatgtccattcttagaaagaagtatttgaaaccatccaacaatgttctattctctgttggctcgaccatctaccacgagaagagggacttactgaggagctggcacctgccgtctgtatttcacttacgtggcaagcaaaattacacatgtcggtgtgagactatagttagttgcgacgggtacgtcgttaaaagaatagctatcagtccaggcctgtatgggaagccttcaggctatgctgctacgatgcaccgcgagggattcttgtgctgcaaagtgacagacacattgaacggggagagggtctcttttcccgtgtgcacgtatgtgccagctacattgtgtgaccaaatgactggcatactggcaacagatgtcagtgcggacgacgcgcaaaaactgctggttgggctcaaccagcgtatagtcgtcaacggtcgcacccagagaaacaccaataccatgaaaaattaccttttgcccgtagtggcccaggcatttgctaggtgggcaaaggaatataaggaagatcaagaagatgaaaggccactaggactacgagatagacagttagtcatggggtgttgttgggcttttagaaggcacaagataacatctatttataagcgcccggatacccaaaccatcatcaaagtgaacagcgatttccactcattcgtgctgcccaggataggcagtaacacattggagatcgggctgagaacaagaatcaggaaaatgttagaggagcacaaggagccgtcacctctcattaccgccgaggacgtacaagaagctaagtgcgcagccgatgaggctaaggaggtgcgtgaagccgaggagttgcgcgcagctctaccacctttggcagctgatgttgaggagcccactctggaagccgatgtcgacttgatgttacaagaggctggggccggctcagtggagacacctcgtggcttgataaaggttaccagctacgctggcgaggacaagatcggctcttacgctgtgctttctccgcaggctgtactcaagagtgaaaaattatcttgcatccaccctctcgctgaacaagtcatagtgataacacactctggccgaaaagggcgttatgccgtggaaccataccatggtaaagtagtggtgccagagggacatgcaatacccgtccaggactttcaagctctgagtgaaagtgccaccattgtgtacaacgaacgtgagttcgtaaacaggtacctgcaccatattgccacacatggaggagcgctgaacactgatgaagaatattacaaaactgtcaagcccagcgagcacgacggcgaatacctgtacgacatcgacaggaaacagtgcgtcaagaaagaactagtcactgggctagggctcacaggcgagctggtggatcctcccttccatgaattcgcctacgagagtctgagaacacgaccagccgctccttaccaagtaccaaccataggggtgtatggcgtgccaggatcaggcaagtctggcatcattaaaagcgcagtcaccaaaaaagatctagtggtgagcgccaagaaagaaaactgtgcagaaattataagggacgtcaagaaaatgaaagggctggacgtcaatgccagaactgtggactcagtgctcttgaatggatgcaaacaccccgtagagaccctgtatattgacgaagcttttgcttgtcatgcaggtactctcagagcgctcatagccattataagacctaaaaaggcagtgctctgcggggatcccaaacagtgcggtttttttaacatgatgtgcctgaaagtgcattttaaccacgagatttgcacacaagtcttccacaaaagcatctctcgccgttgcactaaatctgtgacttcggtcgtctcaaccttgttttacgacaaaaaaatgagaacgacgaatccgaaagagactaagattgtgattgacactaccggcagtaccaaacctaagcaggacgatctcattctcacttgtttcagagggtgggtgaagcagttgcaaatagattacaaaggcaacgaaataatgacggcagctgcctctcaagggctgacccgtaaaggtgtgtatgccgttcggtacaaggtgaatgaaaatcctctgtacgcacccacctcagaacatgtgaacgtcctactgacccgcacggaggaccgcatcgtgtggaaaacactagccggcgacccatggataaaaacactgactgccaagtaccctgggaatttcactgccacgatagaggagtggcaagcagagcatgatgccatcatgaggcacatcttggagagaccggaccctaccgacgtcttccagaataaggcaaacgtgtgttgggccaaggctttagtgccggtgctgaagaccgctggcatagacatgaccactgaacaatggaacactgtggattattttgaaacggacaaagctcactcagcagagatagtattgaaccaactatgcgtgaggttctttggactcgatctggactccggtctattttctgcacccactgttccgttatccattaggaataatcactgggataactccccgtcgcctaacatgtacgggctgaataaagaagtggtccgtcagctctctcgcaggtacccacaactgcctcgggcagttgccactggaagagtctatgacatgaacactggtacactgcgcaattatgatccgcgcataaacctagtacctgtaaacagaagactgcctcatgctttagtcctccaccataatgaacacccacagagtgacttttcttcattcgtcagcaaattgaagggcagaactgtcctggtggtcggggaaaagttgtccgtcccaggcaaaatggttgactggttgtcagaccggcctgaggctaccttcagagctcggctggatttaggcatcccaggtgatgtgcccaaatatgacataatatttgttaatgtgaggaccccatataaataccatcactatcagcagtgtgaagaccatgccattaagcttagcatgttgaccaagaaagcttgtctgcatctgaatcccggcggaacctgtgtcagcataggttatggttacgctgacagggccagcgaaagcatcattggtgctatagcgcggcagttcaagttttcccgggtatgcaaaccgaaatcctcacttgaagagacggaagttctgtttgtattcattgggtacgatcgcaaggcccgtacgcacaatccttacaagctttcatcaaccttgaccaacatttatacaggttccagactccacgaagccggatgtgcaccctcatatcatgtggtgcgaggggatattgccacggccaccgaaggagtgattataaatgctgctaacagcaaaggacaacctggcggaggggtgtgcggagcgctgtataagaaattcccggaaagcttcgatttacagccgatcgaagtaggaaaagcgcgactggtcaaaggtgcagctaaacatatcattcatgccgtaggaccaaacttcaacaaagtttcggaggttgaaggtgacaaacagttggcagaggcttatgagtccatcgctaagattgtcaacgataacaattacaagtcagtagcgattccactgttgtccaccggcatcttttccgggaacaaagatcgactaacccaatcattgaaccatttgctgacagctttagacaccactgatgcagatgtagccatatactgcagggacaagaaatgggaaatgactctcaaggaagcagtggctaggagagaagcagtggaggagatatgcatatccgacgactcttcagtgacagaacctgatgcagagctggtgagggtgcatccgaagagttctttggctggaaggaagggctacagcacaagcgatggcaaaactttctcatatttggaagggaccaagtttcaccaggcggccaaggatatagcagaaattaatgccatgtggcccgttgcaacggaggccaatgagcaggtatgcatgtatatcctcggagaaagcatgagcagtattaggtcgaaatgccccgtcgaagagtcggaagcctccacaccacctagcacgctgccttgcttgtgcatccatgccatgactccagaaagagtacagcgcctaaaagcctcacgtccagaacaaattactgtgtgctcatcctttccattgccgaagtatagaatcactggtgtgcagaagatccaatgctcccagcctatattgttctcaccgaaagtgcctgcgtatattcatccaaggaagtatctcgtggaaacaccaccggtagacgagactccggagccatcggcagagaaccaatccacagaggggacacctgaacaaccaccacttataaccgaggatgagaccaggactagaacgcctgagccgatcatcatcgaagaggaagaagaggatagcataagtttgctgtcagatggcccgacccaccaggtgctgcaagtcgaggcagacattcacgggccgccctctgtatctagctcatcctggtccattcctcatgcatccgactttgatgtggacagtttatccatacttgacaccctggagggagctagcgtgaccagcggggcaacgtcagccgagactaactcttacttcgcaaagagtatggagtttctggcgcgaccggtgcctgcgcctcgaacagtattcaggaaccctccacatcccgctccgcgcacaagaacaccgtcacttgcacccagcagggcctgctcgagaaccagcctagtttccaccccgccaggcgtgaatagggtgatcactagagaggagctcgaggcgcttaccccgtcacgcactcctagcaggtcggtctcgagaaccagcctggtctccaacccgccaggcgtaaatagggtgattacaagagaggagtttgaggcgttcgtagcacaacaacaatgacggtttgatgcgggtgcatacatcttttcctccgacaccggtcaagggcatttacaacaaaaatcagtaaggcaaacggtgctatccgaagtggtgttggagaggaccgaattggagatttcgtatgccccgcgcctcgaccaagaaaaagaagaattactacgcaagaaattacagttaaatcccacacctgctaacagaagcagataccagtccaggaaggtggagaacatgaaagccataacagctagacgtattctgcaaggcctagggcattatttgaaggcagaaggaaaagtggagtgctaccgaaccctgcatcctgttcctttgtattcatctagtgtgaaccgtgccttttcaagccccaaggtcgcagtggaagcctgtaacgccatgttgaaagagaactttccgactgtggcttcttactgtattattccagagtacgatgcctatttggacatggttgacggagcttcatgctgcttagacactgccagtttttgccctgcaaagctgcgcagctttccaaagaaacactcctatttggaacccacaatacgatcggcagtgccttcagcgatccagaacacgctccagaacgtcctggcagctgccacaaaaagaaattgcaatgtcacgcaaatgagagaattgcccgtattggattcggcggcctttaatgtggaatgcttcaagaaatatgcgtgtaataatgaatattgggaaacgtttaaagaaaaccccatcaggcttactgaagaaaacgtggtaaattacattaccaaattaaaaggaccaaaagctgctgctctttttgcgaagacacataatttgaatatgttgcaggacataccaatggacaggtttgtaatggacttaaagagagacgtgaaagtgactccaggaacaaaacatactgaagaacggcccaaggtacaggtgatccaggctgccgatccgctagcaacagcgtatctgtgcggaatccaccgagagctggttaggagattaaatgcggtcctgcttccgaacattcatacactgtttgatatgtcggctgaagactttgacgctattatagccgagcacttccagcctggggattgtgttctggaaactgacatcgcgtcgtttgataaaagtgaggacgacgccatggctctgaccgcgttaatgattctggaagacttaggtgtggacgcagagctgttgacgctgattgaggcggctttcggcgaaatttcatcaatacatttgcccactaaaactaaatttaaattcggagccatgatgaaatctggaatgttcctcacactgtttgtgaacacagtcattaacattgtaatcgcaagcagagtgttgagagaacggctaaccggatcaccatgtgcagcattcattggagatgacaatatcgtgaaaggagtcaaatcggacaaattaatggcagacaggtgcgccacctggttgaatatggaagtcaagattatagatgctgtggtgggcgagaaagcgccttatttctgtggagggtttattttgtgtgactccgtgaccggcacagcgtgccgtgtggcagaccccctaaaaaggctgtttaagcttggcaaacctctggcagcagacgatgaacatgatgatgacaggagaagggcattgcatgaagagtcaacacgctggaaccgagtgggtattctttcagagctgtgcaaggcagtagaatcaaggtatgaaaccgtaggaacttccatcatagttatggccatgactactctagctagcagtgttaaatcattcagctacctgagaggggcccctataactctctacggctaacctgaatggactacgactctagaatagtctttaattaagccaccatggctggcgaggcccccttcctttacctgtacgcccttgtgtatttcctgcagagcatcaattttgtgagaatcatcatgaggctgtggctttgctggaaatgtaggagcaagaaccccctgttgtatgacgccaactactttctgtgttggcacaccaatctcgccgtgttccagagtgcctctaagatcattacactgaaaaagcggtggcagcttgcactttctaagggagtgcatttcgtttgcaacctgctcctggtgacactcaagcagggggaaatcaaagacgccacccctagcgacttcgttagagccactgccacaatcccaatccaggcttccctgcctttcggctggcttatcgtgggtgtggcactgttggctgtgcggagaccacagggactgcctaataatacagctagctggtttaccgctctgacacagcatggcaaagaagacctcaagttccctcgcggtcagggggtgcctattaacactaatagctctccagacgaccaaattgggtattacaggcgcgccacaagacggatcatggcctgcttagtggggctgatgtggctatcctattttattgctagctttcgcctgaagaaggacaagaagaagaaagctgatgagacccaggcactgccccagcgccaaaagaagcagcagacagtcacactgctccctgctgcagacctggatgacttcagcaagcagctgcaggggaactttggcgaccaggagctgattagacaggggactgactataagcattggcctcagattgctcagttcgccccaagtgcatccgccttcttcgggatgtcacgaataggaatggaagtgaccccttctgggacatggttgacatacaccggagcaatcaagattacctccggggacggtaccacgtctcctattagcgaacacgattatcagatagggggatatactgagaagtgggagtccggcgtcaaaaagatgagtgggaaaggccagcagcaacaaggccaaacagttactaaaaagtctgccgcagaagctagtaaaaagcctcgccagaagcggacagccaccaaagcttacaatgtgactcaggccttcggccgccgggggcctgaacagaccctcttgtggcccgttaccctcgcatgtttcgtgcttgcagctgtgtacaggatcaattggtttaaggatcaggttatcctgttgaacaaacatatagatgcctataagacattcccacccaccgagccaaagaaagataagaaaaagaaaactagtcctgcaaggatggccggcaatggaggagacgcagccttagccctgctcttactcgacaggctgaaccaacttgagtctaaaatgagcggtaaagggcagaagatgaaggatctgtccccaaggtggtatttctactatctgggcaccggccctgaggattgtgtcgtcctccactcatacttcactagcgattattaccagctgtatagtacacaattatctaccgacacaggcgtcgagcacgtgaccttctttatatacaataagatcgtggatgaaccagaggagcatgtgcagatccacactattgatggctctagcgggggcatcatctgggtggcaacagaaggagccctcaacaccccaaaggaccatatcggcaccaggaatccagccaacaatgccgccattgttctgcagctccctcagggcactactctccctaaaggcttctatgctgagggacccggaccaggcgccaaatttgttgctgcttggacactgaaagctgctgctgggcccggaccaggccagtacatcaaggccaactctaagtttatcggcatcaccgaattgggacctggacccggctagtgattgggcccctataactctctacggctaacctgaatggactacgacatagtctagtccgccaaggccaccatgtttgtcttcctggtcttgctgccgctggtgagcagccagtgcgtgaatctcaccacccgcacccagcttccacctgcctacactaacagcttcacccgaggggtgtattaccctgacaaggtattccggtcctccgtcctccatagcacgcaggacctttttctgcccttcttctcaaatgtgacatggttccatgccattcacgtgagcggcacgaatggaacgaagcgctttgataaccccgtgctgcctttcaatgacggcgtctacttcgcctccactgaaaagtcaaacatcatccggggctggatctttggcaccactcttgattcaaagacccagtcactgctgattgtgaacaatgctacaaacgtggttatcaaggtgtgtgagtttcagttctgtaacgatccatttttgggagtgtactaccacaagaacaacaagtcctggatggagtctgagttcagagtgtatagctctgctaacaactgcaccttcgagtacgtgtcccagcctttccttatggacctggaaggcaaacagggcaatttcaaaaacctgagagagttcgtgtttaagaacattgacggatacttcaaaatttattctaagcacacaccaattaacttagtgcgggacctaccccaaggctttagcgccctagagcccctggttgacctgcccattgggatcaatataacaaggttccaaactctactggctctgcatagaagttatctgaccccaggagacagctctagtggttggaccgccggcgcagcagcctactatgtcgggtacttacagccacgcacgttccttctgaagtacaatgagaacgggacaatcactgacgcagtagactgtgcactggacccgctaagcgagactaagtgcacacttaaatccttcacggtggagaaaggcatttatcagacctctaacttcagggtgcagccaacagaaagcattgtgcgattcccaaatattactaatctttgccctttcggggaggtctttaatgcaactagattcgcatcagtctatgcgtggaaccgcaaacgcatttccaattgtgtcgcagactactcagtgctgtacaactctgcctctttcagtacgttcaagtgttacggagtgtcacccactaaactgaacgacctgtgctttacaaatgtctacgctgactccttcgtgattaggggagacgaggtgagacaaattgcccccggacagactgggaagattgccgactacaattataagcttcctgatgatttcactggctgtgttattgcctggaatagtaacaatctggatagcaaggtgggaggcaactataactacttatatcgactgtttaggaagagtaatctgaaaccatttgagcgggatatttccacagaaatttaccaggccgggagcacaccatgtaatggggtggagggatttaattgttacttcccactccagagctatggtttccaacccaccaatggagtgggttaccagccctatagagtcgtggtgcttagttttgagctgcttcacgccccagcaaccgtctgcggtcccaaaaagtcgaccaatctcgtgaaaaacaaatgcgtaaacttcaactttaacggcttaacaggaaccggcgtgctcaccgaaagcaacaagaaattccttccatttcagcaattcggaagggacatcgccgacacaacagacgcggtgagggacccacagactctggagatactggacatcactccttgttcgtttgggggcgtctcggtcatcacacccgggactaatactagtaatcaggtagcagttttatatcaaggcgtcaactgtaccgaagtacctgtggccatacacgctgatcagctaacgccaacatggcgagtctattccaccggctctaacgtttttcagaccagggctgggtgcctgataggggcagagcacgtcaataattcctatgagtgtgatatccccataggtgcggggatctgtgccagctatcaaacccaaaccaattcaccagggagcgcaagctctgtggcttctcagagcataattgcatatacaatgtcactgggcgctgagaatagcgttgcatactctaataacagcatagccattcccacgaactttactatcagtgtgacaaccgaaatattgccagtttcgatgaccaaaactagcgtggattgcacgatgtacatctgtggagactctaccgaatgcagcaatctgctattacaatatggcagcttctgtacacagttaaatcgagccttgacaggcatcgcagtggaacaggacaaaaatactcaagaggtgtttgcacaggtgaagcaaatctacaaaacgccccccattaaagattttggcgggttcaatttttcacaaattctccccgacccgtctaagccgagtaagcggtccttcatcgaagatctgctctttaacaaagtaaccctcgccgatgccggctttattaagcagtatggcgactgcctgggggatatagccgctcgtgacctgatttgcgcccagaagttcaatggtctgaccgtgttgcctcctttattgaccgatgaaatgattgcccagtacactagtgccctgctggccggcactatcacgtctgggtggaccttcggagctggtgccgccttgcagataccttttgcaatgcagatggcctataggtttaatggtatcggagtgactcagaacgtactgtacgagaaccagaagctcatcgctaatcaatttaactccgctatcggaaaaatccaggacagcctctcttctacagctagcgctctgggcaaactgcaggatgtcgttaatcagaatgcccaggccctgaacaccttggttaaacaactatcttccaacttcggggccatatccagtgtgttgaatgatattctctcccgcttggatccacctgaagctgaggtgcagatcgatcgcttgatcaccggcagactgcagtccctccagacatatgtaactcagcagctgattagagccgccgagataagggcaagtgcgaatctggctgccaccaagatgagcgaatgtgtattgggccagagcaaacgagttgatttttgcggtaaggggtatcatttaatgtctttccctcaatccgcacctcatggcgtagttttcctgcatgtgacttatgtcccggctcaggagaagaattttaccacagcccccgcgatctgccatgacggaaaggcccacttcccccgggaaggcgtgtttgtatccaatgggactcactggtttgtcactcagcgaaatttttatgaaccacagatcatcaccactgacaacacatttgttagtggaaactgcgatgtggtcatcggcatcgtgaataacactgtctatgatccactgcaacctgaactggattcttttaaagaggaactcgacaagtattttaaaaaccacactagccctgacgtggatctcggtgacatttctggcatcaacgctagcgtagtgaacattcagaaagagatagatagacttaatgaggtggccaagaacctcaacgaaagtctgatcgacctccaggaactggggaaatacgagcagtacattaaatggccttggtacatatggctggggttcattgctgggctgatcgcaatagtgatggtgaccataatgctctgttgcatgactagctgctgcagctgcctgaagggctgctgtagttgtgggtcatgttgtaagtttgacgaagatgatagcgagcctgtccttaaaggagtgaagctccactacacctagtaacgaacggccgtatcacgcccaaacatttacagccgcggtgtcaaaaaccgcgtggacgtggttaacatccctgctgggaggatcagccgtaattattataattggcttggtgctggctactattgtggccatgtacgtgctgaccaaccagaaacataattgaatacagcagcaattggcaagctgcttacatagaactcgcggcgattggcatgccgccttaaaatttttattttattttttcttttcttttccgaatcggattttgtttttaatatttcaaaaaaaaaaaaaaaaaaaaaaaaaaaaaaaaaaaaaaaaaaaaaaaaaaaaaaaaaaaaaaaaaaaaaaaaaaaaaaaatacgtagtttaaac

SEQ ID NO: 94 - protein, 51 aa, Severe acute respiratory syndrome-related coronavirus
  source 1..51: note = Severe acute respiratory syndrome coronavirus 2
EAPFLYLYALVYFLQSINFVRIIMRLWLCWKCRSKNPLLYDANYFLCWHTN

SEQ ID NO: 95 - protein, 33 aa, Severe acute respiratory syndrome-related coronavirus
  source 1..33: note = Severe acute respiratory syndrome coronavirus 2
LAVFQSASKIITLKKRWQLALSKGVHFVCNLLL

SEQ ID NO: 96 - protein, 43 aa, Severe acute respiratory syndrome-related coronavirus
  source 1..43: note = Severe acute respiratory syndrome coronavirus 2
VTLKQGEIKDATPSDFVRATATIPIQASLPFGWLIVGVALLAV

SEQ ID NO: 97 - protein, 55 aa, Severe acute respiratory syndrome-related coronavirus
  source 1..55: note = Severe acute respiratory syndrome coronavirus 2
RRPQGLPNNTASWFTALTQHGKEDLKFPRGQGVPINTNSSPDDQIGYYRRATRRI

SEQ ID NO: 98 - protein, 19 aa, Severe acute respiratory syndrome-related coronavirus
  source 1..19: note = Severe acute respiratory syndrome coronavirus 2
MACLVGLMWLSYFIASFRL

SEQ ID NO: 99 - protein, 40 aa, Severe acute respiratory syndrome-related coronavirus
  source 1..40: note = Severe acute respiratory syndrome coronavirus 2
KKDKKKKADETQALPQRQKKQQTVTLLPAADLDDFSKQLQ

SEQ ID NO: 100 - protein, 55 aa, Severe acute respiratory syndrome-related coronavirus
  source 1..55: note = Severe acute respiratory syndrome coronavirus 2
GNFGDQELIRQGTDYKHWPQIAQFAPSASAFFGMSRIGMEVTPSGTWLTYTGAIK

SEQ ID NO: 101 - protein, 30 aa, Severe acute respiratory syndrome-related coronavirus
  source 1..30: note = Severe acute respiratory syndrome coronavirus 2
ITSGDGTTSPISEHDYQIGGYTEKWESGVK

SEQ ID NO: 102 - protein, 50 aa, Severe acute respiratory syndrome-related coronavirus
  source 1..50: note = Severe acute respiratory syndrome coronavirus 2
KMSGKGQQQQGQTVTKKSAAEASKKPRQKRTATKAYNVTQAFGRRGPEQT

SEQ ID NO: 103 - protein, 20 aa, Severe acute respiratory syndrome-related coronavirus
  source 1..20: note = Severe acute respiratory syndrome coronavirus 2
LLWPVTLACFVLAAVYRINW

SEQ ID NO: 104 - protein, 30 aa, Severe acute respiratory syndrome-related coronavirus
  source 1..30: note = Severe acute respiratory syndrome coronavirus 2
FKDQVILLNKHIDAYKTFPPTEPKKDKKKK

SEQ ID NO: 105 - protein, 35 aa, Severe acute respiratory syndrome-related coronavirus
  source 1..35: note = Severe acute respiratory syndrome coronavirus 2
TSPARMAGNGGDAALALLLLDRLNQLESKMSGKGQ

SEQ ID NO: 106 - protein, 19 aa, Severe acute respiratory syndrome-related coronavirus
  source 1..19: note = Severe acute respiratory syndrome coronavirus 2
KMKDLSPRWYFYYLGTGPE

SEQ ID NO: 107 - protein, 56 aa, Severe acute respiratory syndrome-related coronavirus
  source 1..56: note = Severe acute respiratory syndrome coronavirus 2
DCVVLHSYFTSDYYQLYSTQLSTDTGVEHVTFFIYNKIVDEPEEHVQIHTIDGSSG

SEQ ID NO: 108 - protein, 46 aa, Severe acute respiratory syndrome-related coronavirus
  source 1..46: note = Severe acute respiratory syndrome coronavirus 2
GIIWVATEGALNTPKDHIGTRNPANNAAIVLQLPQGTTLPKGFYAE

SEQ ID NO: 109 - DNA, 8651 bp, synthetic construct
  misc_feature 1..8651: note = Description of Artificial Sequence: Synthetic polynucleotide
  source 1..8651: mol_type = other DNA
gacattgattattgactagttgttaatagtaatcaattacggggtcattagttcatagcccatatatggagttccgcgttacataacttacggtaaatggcccgcctggctgaccgcccaacgacccccgcccattgacgtcaataatgacgtatgttcccatagtaacgccaatagggactttccattgacgtcaatgggtggagtatttacggtaaactgcccacttggcagtacatcaagtgtatcatatgccaagtccgccccctattgacgtcaatgacggtaaatggcccgcctggcattatgcccagtacatgaccttacgggactttcctacttggcagtacatctacgtattagtcatcgctattaccatggtgatgcggttttggcagtacaccaatgggcgtggatagcggtttgactcacggggatttccaagtctccaccccattgacgtcaatgggagtttgttttggcaccaaaatcaacgggactttccaaaatgtcgtaataaccccgccccgttgacgcaaatgggcggtaggcgtgtacggtgggaggtctatataagcagagctcgtttagtgaaccgtcagatcgcctggaacgccatccacgctgttttgacctccatagaagacagcgatcgcgccaccatgtttgtcttcctggtcttgctgccgctggtgagcagccagtgcgtgaatctcaccacccgcacccagcttccacctgcctacactaacagcttcacccgaggggtgtattaccctgacaaggtattccggtcctccgtcctccatagcacgcaggacctttttctgcccttcttctcaaatgtgacatggttccatgccattcacgtgagcggcacgaatggaacgaagcgctttgataaccccgtgctgcctttcaatgacggcgtctacttcgcctccactgaaaagtcaaacatcatccggggctggatctttggcaccactcttgattcaaagacccagtcactgctgattgtgaacaatgctacaaacgtggttatcaaggtgtgtgagtttcagttctgtaacgatccatttttgggagtgtactaccacaagaacaacaagtcctggatggagtctgagttcagagtgtatagctctgctaacaactgcaccttcgagtacgtgtcccagcctttccttatggacctggaaggcaaacagggcaatttcaaaaacctgagagagttcgtgtttaagaacattgacggatacttcaaaatttattctaagcacacaccaattaacttagtgcgggacctaccccaaggctttagcgccctagagcccctggttgacctgcccattgggatcaatataacaaggttccaaactctactggctctgcatagaagttatctgaccccaggagacagctctagtggttggaccgccggcgcagcagcctactatgtcgggtacttacagccacgcacgttccttctgaagtacaatgagaacgggacaatcactgacgcagtagactgtgcactggacccgctaagcgagactaagtgcacacttaaatccttcacggtggagaaaggcatttatcagacctctaacttcagggtgcagccaacagaaagcattgtgcgattcccaaatattactaatctttgccctttcggggaggtctttaatgcaactagattcgcatcagtctatgcgtggaaccgcaaacgcatttccaattgtgtcgcagactactcagtgctgtacaactctgcctctttcagtacgttcaagtgttacggagtgtcacccactaaactgaacgacctgtgctttacaaatgtctacgctgactccttcgtgattaggggagacgaggtgagacaaattgcccccggacagactgggaagattgccgactacaattataagcttcctgatgatttcactggctgtgttattgcctggaatagtaacaatctggatagcaaggtgggaggcaactataactacttatatcgactgtttaggaagagtaatctgaaaccatttgagcgggatatttccacagaaatttaccaggccgggagcacaccatgtaatggggtggagggatttaattgttacttcccactccagagctatggtttccaacccaccaatggagtgggttaccagccctatagagtcgtggtgcttagttttgagctgcttcacgccccagcaaccgtctgcggtcccaaaaagtcgaccaatctcgtgaaaaacaaatgcgtaaacttcaactttaacggcttaacaggaaccggcgtgctcaccgaaagcaacaagaaattccttccatttcagcaattcggaagggacatcgccgacacaacagacgcggtgagggacccacagactctggagatactggacatcactccttgttcgtttgggggcgtctcggtcatcacacccgggactaatactagtaatcaggtagcagttttatatcaaggcgtcaactgtaccgaagtacctgtggccatacacgctgatcagctaacgccaacatggcgagtctattccaccggctctaacgtttttcagaccagggctgggtgcctgataggggcagagcacgtcaataattcctatgagtgtgatatccccataggtgcggggatctgtgccagctatcaaacccaaaccaattcaccagggagcgcaagctctgtggcttctcagagcataattgcatatacaatgtcactgggcgctgagaatagcgttgcatactctaataacagcatagccattcccacgaactttactatcagtgtgacaaccgaaatattgccagtttcgatgaccaaaactagcgtggattgcacgatgtacatctgtggagactctaccgaatgcagcaatctgctattacaatatggcagcttctgtacacagttaaatcgagccttgacaggcatcgcagtggaacaggacaaaaatactcaagaggtgtttgcacaggtgaagcaaatctacaaaacgccccccattaaagattttggcgggttcaatttttcacaaattctccccgacccgtctaagccgagtaagcggtccttcatcgaagatctgctctttaacaaagtaaccctcgccgatgccggctttattaagcagtatggcgactgcctgggggatatagccgctcgtgacctgatttgcgcccagaagttcaatggtctgaccgtgttgcctcctttattgaccgatgaaatgattgcccagtacactagtgccctgctggccggcactatcacgtctgggtggaccttcggagctggtgccgccttgcagataccttttgcaatgcagatggcctataggtttaatggtatcggagtgactcagaacgtactgtacgagaaccagaagctcatcgctaatcaatttaactccgctatcggaaaaatccaggacagcctctcttctacagctagcgctctgggcaaactgcaggatgtcgttaatcagaatgcccaggccctgaacaccttggttaaacaactatcttccaacttcggggccatatccagtgtgttgaatgatattctctcccgcttggatccacctgaagctgaggtgcagatcgatcgcttgatcaccggcagactgcagtccctccagacatatgtaactcagcagctgattagagccgccgagataagggcaagtgcgaatctggctgccaccaagatgagcgaatgtgtattgggccagagcaaacgagttgatttttgcggtaaggggtatcatttaatgtctttccctcaatccgcacctcatggcgtagttttcctgcatgtgacttatgtcccggctcaggagaagaattttaccacagcccccgcgatctgccatgacggaaaggcccacttcccccgggaaggcgtgtttgtatccaatgggactcactggtttgtcactcagcgaaatttttatgaaccacagatcatcaccactgacaacacatttgttagtggaaactgcgatgtggtcatcggcatcgtgaataacactgtctatgatccactgcaacctgaactggattcttttaaagaggaactcgacaagtattttaaaaaccacactagccctgacgtggatctcggtgacatttctggcatcaacgctagcgtagtgaacattcagaaagagatagatagacttaatgaggtggccaagaacctcaacgaaagtctgatcgacctccaggaactggggaaatacgagcagtacattaaatggccttggtacatatggctggggttcattgctgggctgatcgcaatagtgatggtgaccataatgctctgttgcatgactagctgctgcagctgcctgaagggctgctgtagttgtgggtcatgttgtaagtttgacgaagatgatagcgagcctgtccttaaaggagtgaagctccactacaccggtggaagcggtggggttcgggcagagggcagaggctcactgctcacgtgtggtgatgtagaagagaatccaggtcctatgtactcattcgtatccgaggagaccggcacgttgatcgttaattctgtattgttgtttctcgcttttgtggtatttctccttgttacgcttgcgattcttaccgcccttcgcctctgtgcttactgctgcaacattgtgaatgtctccctcgtgaagccctccttttatgtttactccagagtgaaaaacctcaatagctccagggttccagacctgctggtgggcggttctggaggtgtccgtgctgaaggacgcgggtcccttctcacctgcggcgacgttgaggaaaaccctggccctatggctgacagcaatggtactattacggtggaagaactgaaaaagctcttggaacagtggaaccttgtgatcggttttctgtttttgacctggatttgcttgctccagttcgcctatgctaatagaaacaggtttctctatataatcaagttgatttttctgtggctgctctggcccgttacgcttgcgtgttttgtcctggctgctgtgtaccggatcaattggatcactggtggcattgctatcgccatggcttgtcttgtcgggctgatgtggctttcctattttatcgcttcatttaggctgtttgctcgaaccagatcaatgtggtcatttaatccagagactaatattctcttgaatgttccgctgcacggaactatcctcacacgacccctgttggagtccgaattggttatcggtgccgtaattctcaggggccaccttagaatcgcgggccaccatttgggacggtgcgatattaaagacctgcccaaagagatcacagtggccacaagtagaacgctctcatactataaactgggagcttcccagagagtggccggggatagtggcttcgcggcatatagtcgctaccgcatcggtaactataaacttaatacggaccatagtagctctagcgataacattgccttgctggttcagtgataaatttaaatgtgagggttaatgcttcgagcagacatgataagatacattgatgagtttggacaaaccacaactagaatgcagtgaaaaaaatgctttatttgtgaaatttgtgatgctattgctttatttgtaaccattataagctgcaataaacaagttaacaacaacaattgcattcattttatgtttcaggttcagggggagatgtgggaggttttttaaagcaagtaaaacctctacaaatgtggtaaaagcgagacattgattattgactagttgttaatagtaatcaattacggggtcattagttcatagcccatatatggagttccgcgttacataacttacggtaaatggcccgcctggctgaccgcccaacgacccccgcccattgacgtcaataatgacgtatgttcccatagtaacgccaatagggactttccattgacgtcaatgggtggagtatttacggtaaactgcccacttggcagtacatcaagtgtatcatatgccaagtccgccccctattgacgtcaatgacggtaaatggcccgcctggcattatgcccagtacatgaccttacgggactttcctacttggcagtacatctacgtattagtcatcgctattaccatggtgatgcggttttggcagtacaccaatgggcgtggatagcggtttgactcacggggatttccaagtctccaccccattgacgtcaatgggagtttgttttggcaccaaaatcaacgggactttccaaaatgtcgtaataaccccgccccgttgacgcaaatgggcggtaggcgtgtacggtgggaggtctatataagcagagctcgtttagtgaaccgtcagatcgcctggaacgccatccacgctgttttgacctccatagaagacagcgatcgcgccaccatggctggcgaggcccccttcctttacctgtacgcccttgtgtatttcctgcagagcatcaattttgtgagaatcatcatgaggctgtggctttgctggaaatgtaggagcaagaaccccctgttgtatgacgccaactactttctgtgttggcacaccaatctcgccgtgttccagagtgcctctaagatcattacactgaaaaagcggtggcagcttgcactttctaagggagtgcatttcgtttgcaacctgctcctggtgacactcaagcagggggaaatcaaagacgccacccctagcgacttcgttagagccactgccacaatcccaatccaggcttccctgcctttcggctggcttatcgtgggtgtggcactgttggctgtgcggagaccacagggactgcctaataatacagctagctggtttaccgctctgacacagcatggcaaagaagacctcaagttccctcgcggtcagggggtgcctattaacactaatagctctccagacgaccaaattgggtattacaggcgcgccacaagacggatcatggcctgcttagtggggctgatgtggctatcctattttattgctagctttcgcctgaagaaggacaagaagaagaaagctgatgagacccaggcactgccccagcgccaaaagaagcagcagacagtcacactgctccctgctgcagacctggatgacttcagcaagcagctgcaggggaactttggcgaccaggagctgattagacaggggactgactataagcattggcctcagattgctcagttcgccccaagtgcatccgccttcttcgggatgtcacgaataggaatggaagtgaccccttctgggacatggttgacatacaccggagcaatcaagattacctccggggacggtaccacgtctcctattagcgaacacgattatcagatagggggatatactgagaagtgggagtccggcgtcaaaaagatgagtgggaaaggccagcagcaacaaggccaaacagttactaaaaagtctgccgcagaagctagtaaaaagcctcgccagaagcggacagccaccaaagcttacaatgtgactcaggccttcggccgccgggggcctgaacagaccctcttgtggcccgttaccctcgcatgtttcgtgcttgcagctgtgtacaggatcaattggtttaaggatcaggttatcctgttgaacaaacatatagatgcctataagacattcccacccaccgagccaaagaaagataagaaaaagaaaactagtcctgcaaggatggccggcaatggaggagacgcagccttagccctgctcttactcgacaggctgaaccaacttgagtctaaaatgagcggtaaagggcagaagatgaaggatctgtccccaaggtggtatttctactatctgggcaccggccctgaggattgtgtcgtcctccactcatacttcactagcgattattaccagctgtatagtacacaattatctaccgacacaggcgtcgagcacgtgaccttctttatatacaataagatcgtggatgaaccagaggagcatgtgcagatccacactattgatggctctagcgggggcatcatctgggtggcaacagaaggagccctcaacaccccaaaggaccatatcggcaccaggaatccagccaacaatgccgccattgttctgcagctccctcagggcactactctccctaaaggcttctatgctgagggacccggaccaggcgccaaatttgttgctgcttggacactgaaagctgctgctgggcccggaccaggccagtacatcaaggccaactctaagtttatcggcatcaccgaattgggacctggacccggctagtgagtttaaactcccatttaaatgtgagggttaatgcttcgagcagagctcgctgatcagcctcgactgtgccttctagttgccagccatctgttgtttgcccctcccccgtgccttccttgaccctggaaggtgccactcccactgtcctttcctaataaaatgaggaaattgcatcgcattgtctgagtaggtgtcattctattctggggggtggggtggggcaggacagcaagggggaggattgggaagacaatagcaggcatgctggggatgcggtgggctctatggcttctgaggcggaaagaacc

SEQ ID NO: 110 - protein, 1270 aa, synthetic construct
  REGION 1..1270: note = Description of Artificial Sequence: Synthetic polypeptide
MFVFLVLLPLVSSQCVNLTTRTQLPPAYTNSFTRGVYYPDKVFRSSVLHSTQDLFLPFFSNVTWFHAISGTNGTKRFDNPVLPFNDGVYFASTEKSNIIRGWIFGTTLDSKTQSLLIVNNATNVVIKVCEFQFCNDPFLGVYHKNNKSWMESEFRVYSSANNCTFEYVSQPFLMDLEGKQGNFKNLREFVFKNIDGYFKIYSKHTPINLVRDLPQGFSALEPLVDLPIGINITRFQTLLALHRSYLTPGDSSSGWTAGAAAYYVGYLQPRTFLLKYNENGTITDAVDCALDPLSETKCTLKSFTVEKGIYQTSNFRVQPTESIVRFPNITNLCPFGEVFNATRFASVYAWNRKRISNCVADYSVLYNSASFSTFKCYGVSPTKLNDLCFTNVYADSFVIRGDEVRQIAPGQTGKIADYNYKLPDDFTGCVIAWNSNNLDSKVGGNYNYLYRLFRKSNLKPFERDISTEIYQAGSTPCNGVEGFNCYFPLQSYGFQPTYGVGYQPYRVVVLSFELLHAPATVCGPKKSTNLVKNKCVNFNFNGLTGTGVLTESNKKFLPFQQFGRDIDDTTDAVRDPQTLEILDITPCSFGGVSVITPGTNTSNQVAVLYQGVNCTEVPVAIHADQLTPTWRVYSTGSNVFQTRAGCLIGAEHVNNSYECDIPIGAGICASYQTQTNSHGSASSVASQSIIAYTMSLGAENSVAYSNNSIAIPINFTISVTTEILPVSMTKTSVDCTMYICGDSTECSNLLLQYGSFCTQLNRALTGIAVEQDKNTQEVFAQVKQIYKTPPIKDFGGFNFSQILPDPSKPSKRSFIEDLLFNKVTLADAGFIKQYGDCLGDIAARDLICAQKFNGLTVLPPLLTDEMIAQYTSALLAGTITSGWTFGAGAALQIPFAMQMAYRFNGIGVTQNVLYENQKLIANQFNSAIGKIQDSLSSTASALGKLQDVVNQNAQALNTLVKQLSSNFGAISSVLNDILARLDPPEAEVQIDRLITGRLQSLQTYVTQQLIRAAEIRASANLAATKMSECVLGQSKRVDFCGKGYHLMSFPQSAPHGVVFLHVTYVPAQEKNFTTAPAICHDGKAHFPREGVFVSNGTHWFVTQRNFYEPQIITTHNTFVSGNCDVVIGIVNNTVYDPLQPELDSFKEELDKYFKNHTSPDVDLGDISGINASVVNIQKEIDRLNEVAKNLNESLIDLQELGKYEQYIKWPWYIWLGFIAGLIAIVMVTIMLCCMTSCCSCLKGCCSCGSCCKFDEDDSEPVLKGVKLHYT

SEQ ID NO: 111 - DNA, 7629 bp, synthetic construct
  misc_feature 1..7629: note = Description of Artificial Sequence: Synthetic polynucleotide
  source 1..7629: mol_type = other DNA
gacattgattattgactagttgttaatagtaatcaattacggggtcattagttcatagcccatatatggagttccgcgttacataacttacggtaaatggcccgcctggctgaccgcccaacgacccccgcccattgacgtcaataatgacgtatgttcccatagtaacgccaatagggactttccattgacgtcaatgggtggagtatttacggtaaactgcccacttggcagtacatcaagtgtatcatatgccaagtccgccccctattgacgtcaatgacggtaaatggcccgcctggcattatgcccagtacatgaccttacgggactttcctacttggcagtacatctacgtattagtcatcgctattaccatggtgatgcggttttggcagtacaccaatgggcgtggatagcggtttgactcacggggatttccaagtctccaccccattgacgtcaatgggagtttgttttggcaccaaaatcaacgggactttccaaaatgtcgtaataaccccgccccgttgacgcaaatgggcggtaggcgtgtacggtgggaggtctatataagcagagctcgtttagtgaaccgtcagatcgcctggaacgccatccacgctgttttgacctccatagaagacagcgatcgcgccaccatgtttgtcttcctggtcttgctgccgctggtgagcagccagtgcgtgaatctcaccacccgcacccagcttccacctgcctacactaacagcttcacccgaggggtgtattaccctgacaaggtattccggtcctccgtcctccatagcacgcaggacctttttctgcccttcttctcaaatgtgacatggttccatgccattagcggcacgaatggaacgaagcgctttgataaccccgtgctgcctttcaatgacggcgtctacttcgcctccactgaaaagtcaaacatcatccggggctggatctttggcaccactcttgattcaaagacccagtcactgctgattgtgaacaatgctacaaacgtggttatcaaggtgtgtgagtttcagttctgtaacgatccatttttgggagtgtaccacaagaacaacaagtcctggatggagtctgagttcagagtgtatagctctgctaacaactgcaccttcgagtacgtgtcccagcctttccttatggacctggaaggcaaacagggcaatttcaaaaacctgagagagttcgtgtttaagaacattgacggatacttcaaaatttattctaagcacacaccaattaacttagtgcgggacctaccccaaggctttagcgccctagagcccctggttgacctgcccattgggatcaatataacaaggttccaaactctactggctctgcatagaagttatctgaccccaggagacagctctagtggttggaccgccggcgcagcagcctactatgtcgggtacttacagccacgcacgttccttctgaagtacaatgagaacgggacaatcactgacgcagtagactgtgcactggacccgctaagcgagactaagtgcacacttaaatccttcacggtggagaaaggcatttatcagacctctaacttcagggtgcagccaacagaaagcattgtgcgattcccaaatattactaatctttgccctttcggggaggtctttaatgcaactagattcgcatcagtctatgcgtggaaccgcaaacgcatttccaattgtgtcgcagactactcagtgctgtacaactctgcctctttcagtacgttcaagtgttacggagtgtcacccactaaactgaacgacctgtgctttacaaatgtctacgctgactccttcgtgattaggggagacgaggtgagacaaattgcccccggacagactgggaagattgccgactacaattataagcttcctgatgatttcactggctgtgttattgcctggaatagtaacaatctggatagcaaggtgggaggcaactataactacttatatcgactgtttaggaagagtaatctgaaaccatttgagcgggatatttccacagaaatttaccaggccgggagcacaccatgtaatggggtggagggatttaattgttacttcccactccagagctatggtttccaacccacctatggagtgggttaccagccctatagagtcgtggtgcttagttttgagctgcttcacgccccagcaaccgtctgcggtcccaaaaagtcgaccaatctcgtgaaaaacaaatgcgtaaacttcaactttaacggcttaacaggaaccggcgtgctcaccgaaagcaacaagaaattccttccatttcagcaattcggaagggacatcgatgacacaacagacgcggtgagggacccacagactctggagatactggacatcactccttgttcgtttgggggcgtctcggtcatcacacccgggactaatactagtaatcaggtagcagttttatatcaaggcgtcaactgtaccgaagtacctgtggccatacacgctgatcagctaacgccaacatggcgagtctattccaccggctctaacgtttttcagaccagggctgggtgcctgataggggcagagcacgtcaataattcctatgagtgtgatatccccataggtgcggggatctgtgccagctatcaaacccaaaccaattcacatgggagcgcaagctctgtggcttctcagagcataattgcatatacaatgtcactgggcgctgagaatagcgttgcatactctaataacagcatagccattcccataaactttactatcagtgtgacaaccgaaatattgccagtttcgatgaccaaaactagcgtggattgcacgatgtacatctgtggagactctaccgaatgcagcaatctgctattacaatatggcagcttctgtacacagttaaatcgagccttgacaggcatcgcagtggaacaggacaaaaatactcaagaggtgtttgcacaggtgaagcaaatctacaaaacgccccccattaaagattttggcgggttcaatttttcacaaattctccccgacccgtctaagccgagtaagcggtccttcatcgaagatctgctctttaacaaagtaaccctcgccgatgccggctttattaagcagtatggcgactgcctgggggatatagccgctcgtgacctgatttgcgcccagaagttcaatggtctgaccgtgttgcctcctttattgaccgatgaaatgattgcccagtacactagtgccctgctggccggcactatcacgtctgggtggaccttcggagctggtgccgccttgcagataccttttgcaatgcagatggcctataggtttaatggtatcggagtgactcagaacgtactgtacgagaaccagaagctcatcgctaatcaatttaactccgctatcggaaaaatccaggacagcctctcttctacagctagcgctctgggcaaactgcaggatgtcgttaatcagaatgcccaggccctgaacaccttggttaaacaactatcttccaacttcggggccatatccagtgtgttgaatgatattctcgcacgcttggatccacctgaagctgaggtgcagatcgatcgcttgatcaccggcagactgcagtccctccagacatatgtaactcagcagctgattagagccgccgagataagggcaagtgcgaatctggctgccaccaagatgagcgaatgtgtattgggccagagcaaacgagttgatttttgcggtaaggggtatcatttaatgtctttccctcaatccgcacctcatggcgtagttttcctgcatgtgacttatgtcccggctcaggagaagaattttaccacagcccccgcgatctgccatgacggaaaggcccacttcccccgggaaggcgtgtttgtatccaatgggactcactggtttgtcactcagcgaaatttttatgaaccacagatcatcaccactcacaacacatttgttagtggaaactgcgatgtggtcatcggcatcgtgaataacactgtctatgatccactgcaacctgaactggattcttttaaagaggaactcgacaagtattttaaaaaccacactagccctgacgtggatctcggtgacatttctggcatcaacgctagcgtagtgaacattcagaaagagatagatagacttaatgaggtggccaagaacctcaacgaaagtctgatcgacctccaggaactggggaaatacgagcagtacattaaatggccttggtacatatggctggggttcattgctgggctgatcgcaatagtgatggtgaccataatgctctgttgcatgactagctgctgcagctgcctgaagggctgctgtagttgtgggtcatgttgtaagtttgacgaagatgatagcgagcctgtccttaaaggagtgaagctccactacacctagtgggtttaaactcccatttaaatgtgagggttaatgcttcgagcagacatgataagatacattgatgagtttggacaaaccacaactagaatgcagtgaaaaaaatgctttatttgtgaaatttgtgatgctattgctttatttgtaaccattataagctgcaataaacaagttaacaacaacaattgcattcattttatgtttcaggttcagggggagatgtgggaggttttttaaagcaagtaaaacctctacaaatgtggtaaaataactataacggtcctaaggtagcgagacattgattattgactagttgttaatagtaatcaattacggggtcattagttcatagcccatatatggagttccgcgttacataacttacggtaaatggcccgcctggctgaccgcccaacgacccccgcccattgacgtcaataatgacgtatgttcccatagtaacgccaatagggactttccattgacgtcaatgggtggagtatttacggtaaactgcccacttggcagtacatcaagtgtatcatatgccaagtccgccccctattgacgtcaatgacggtaaatggcccgcctggcattatgcccagtacatgaccttacgggactttcctacttggcagtacatctacgtattagtcatcgctattaccatggtgatgcggttttggcagtacaccaatgggcgtggatagcggtttgactcacggggatttccaagtctccaccccattgacgtcaatgggagtttgttttggcaccaaaatcaacgggactttccaaaatgtcgtaataaccccgccccgttgacgcaaatgggcggtaggcgtgtacggtgggaggtctatataagcagagctcgtttagtgaaccgtcagatcgcctggaacgccatccacgctgttttgacctccatagaagacagcgatcgcgccaccatggctggcgaggcccccttcctttacctgtacgcccttgtgtatttcctgcagagcatcaattttgtgagaatcatcatgaggctgtggctttgctggaaatgtaggagcaagaaccccctgttgtatgacgccaactactttctgtgttggcacaccaatctcgccgtgttccagagtgcctctaagatcattacactgaaaaagcggtggcagcttgcactttctaagggagtgcatttcgtttgcaacctgctcctggtgacactcaagcagggggaaatcaaagacgccacccctagcgacttcgttagagccactgccacaatcccaatccaggcttccctgcctttcggctggcttatcgtgggtgtggcactgttggctgtgcggagaccacagggactgcctaataatacagctagctggtttaccgctctgacacagcatggcaaagaagacctcaagttccctcgcggtcagggggtgcctattaacactaatagctctccagacgaccaaattgggtattacaggcgcgccacaagacggatcatggcctgcttagtggggctgatgtggctatcctattttattgctagctttcgcctgaagaaggacaagaagaagaaagctgatgagacccaggcactgccccagcgccaaaagaagcagcagacagtcacactgctccctgctgcagacctggatgacttcagcaagcagctgcaggggaactttggcgaccaggagctgattagacaggggactgactataagcattggcctcagattgctcagttcgccccaagtgcatccgccttcttcgggatgtcacgaataggaatggaagtgaccccttctgggacatggttgacatacaccggagcaatcaagattacctccggggacggtaccacgtctcctattagcgaacacgattatcagatagggggatatactgagaagtgggagtccggcgtcaaaaagatgagtgggaaaggccagcagcaacaaggccaaacagttactaaaaagtctgccgcagaagctagtaaaaagcctcgccagaagcggacagccaccaaagcttacaatgtgactcaggccttcggccgccgggggcctgaacagaccctcttgtggcccgttaccctcgcatgtttcgtgcttgcagctgtgtacaggatcaattggtttaaggatcaggttatcctgttgaacaaacatatagatgcctataagacattcccacccaccgagccaaagaaagataagaaaaagaaaactagtcctgcaaggatggccggcaatggaggagacgcagccttagccctgctcttactcgacaggctgaaccaacttgagtctaaaatgagcggtaaagggcagaagatgaaggatctgtccccaaggtggtatttctactatctgggcaccggccctgaggattgtgtcgtcctccactcatacttcactagcgattattaccagctgtatagtacacaattatctaccgacacaggcgtcgagcacgtgaccttctttatatacaataagatcgtggatgaaccagaggagcatgtgcagatccacactattgatggctctagcgggggcatcatctgggtggcaacagaaggagccctcaacaccccaaaggaccatatcggcaccaggaatccagccaacaatgccgccattgttctgcagctccctcagggcactactctccctaaaggcttctatgctgagggacccggaccaggcgccaaatttgttgctgcttggacactgaaagctgctgctgggcccggaccaggccagtacatcaaggccaactctaagtttatcggcatcaccgaattgggacctggacccggctagtgagtttaaactcccatttaaatgtgagggttaatgcttcgagcagagctcgctgatcagcctcgactgtgccttctagttgccagccatctgttgtttgcccctcccccgtgccttccttgaccctggaaggtgccactcccactgtcctttcctaataaaatgaggaaattgcatcgcattgtctgagtaggtgtcattctattctggggggtggggtggggcaggacagcaagggggaggattgggaagacaatagcaggcatgctggggatgcggtgggctctatggcttctgaggcggaaagaacc

SEQ ID NO: 112 - protein, 1270 aa, synthetic construct
  REGION 1..1270: note = Description of Artificial Sequence: Synthetic polypeptide
MFVFLVLLPLVSSQCVNFTTRTQLPPAYTNSFTRGVYYPDKVFRSSVLHSTQDLFLPFFSNVTWFHAIHVSGTNGTKRFANPVLPFNDGVYFASTEKSNIIRGWIFGTTLDSKTQSLLIVNNATNVVIKVCEFQFCNDPFLGVYYHKNNKSWMESEFRVYSSANNCTFEYVSQPFLMDLEGKQGNFKNLREFVFKNIDGYFKIYSKHTPINLVRGLPQGFSALEPLVDLPIGINITRFQTLHISYLTPGDSSSGWTAGAAAYYVGYLQPRTFLLKYNENGTITDAVDCALDPLSETKCTLKSFTVEKGIYQTSNFRVQPTESIVRFPNITNLCPFGEVFNATRFASVYAWNRKRISNCVADYSVLYNSASFSTFKCYGVSPTKLNDLCFTNVYADSFVIRGDEVRQIAPGQTGNIADYNYKLPDDFTGCVIAWNSNNLDSKVGGNYNYLYRLFRKSNLKPFERDISTEIYQAGSTPCNGVKGFNCYFPLQSYGFQPTYGVGYQPYRVVVLSFELLHAPATVCGPKKSTNLVKNKCVNFNFNGLTGTGVLTESNKKFLPFQQFGRDIADTTDAVRDPQTLEILDITPCSFGGVSVITPGTNTSNQVAVLYQGVNCTEVPVAIHADQLTPTWRVYSTGSNVFQTRAGCLIGAEHVNNSYECDIPIGAGICASYQTQTNSPGSASSVASQSIIAYTMSLGVENSVAYSNNSIAIPTNFTISVTTEILPVSMTKTSVDCTMYICGDSTECSNLLLQYGSFCTQLNRALTGIAVEQDKNTQEVFAQVKQIYKTPPIKDFGGFNFSQILPDPSKPSKRSFIEDLLFNKVTLADAGFIKQYGDCLGDIAARDLICAQKFNGLTVLPPLLTDEMIAQYTSALLAGTITSGWTFGAGAALQIPFAMQMAYRFNGIGVTQNVLYENQKLIANQFNSAIGKIQDSLSSTASALGKLQDVVNQNAQALNTLVKQLSSNFGAISSVLNDILSRLDPPEAEVQIDRLITGRLQSLQTYVTQQLIRAAEIRASANLAATKMSECVLGQSKRVDFCGKGYHLMSFPQSAPHGVVFLHVTYVPAQEKNFTTAPAICHDGKAHFPREGVFVSNGTHWFVTQRNFYEPQIITTDNTFVSGNCDVVIGIVNNTVYDPLQPELDSFKEELDKYFKNHTSPDVDLGDISGINASVVNIQKEIDRLNEVAKNLNESLIDLQELGKYEQYIKWPWYIWLGFIAGLIAIVMVTIMLCCMTSCCSCLKGCCSCGSCCKFDEDDSEPVLKGVKLHYT

SEQ ID NO: 113 - DNA, 7629 bp, synthetic construct
  misc_feature 1..7629: note = Description of Artificial Sequence: Synthetic polynucleotide
  source 1..7629: mol_type = other DNA
gacattgattattgactagttgttaatagtaatcaattacggggtcattagttcatagcccatatatggagttccgcgttacataacttacggtaaatggcccgcctggctgaccgcccaacgacccccgcccattgacgtcaataatgacgtatgttcccatagtaacgccaatagggactttccattgacgtcaatgggtggagtatttacggtaaactgcccacttggcagtacatcaagtgtatcatatgccaagtccgccccctattgacgtcaatgacggtaaatggcccgcctggcattatgcccagtacatgaccttacgggactttcctacttggcagtacatctacgtattagtcatcgctattaccatggtgatgcggttttggcagtacaccaatgggcgtggatagcggtttgactcacggggatttccaagtctccaccccattgacgtcaatgggagtttgttttggcaccaaaatcaacgggactttccaaaatgtcgtaataaccccgccccgttgacgcaaatgggcggtaggcgtgtacggtgggaggtctatataagcagagctcgtttagtgaaccgtcagatcgcctggaacgccatccacgctgttttgacctccatagaagacagcgatcgcgccaccatgtttgtcttcctggtcttgctgccgctggtgagcagccagtgcgtgaatttcaccacccgcacccagcttccacctgcctacactaacagcttcacccgaggggtgtattaccctgacaaggtattccggtcctccgtcctccatagcacgcaggacctttttctgcccttcttctcaaatgtgacatggttccatgccattcacgtgagcggcacgaatggaacgaagcgctttgctaaccccgtgctgcctttcaatgacggcgtctacttcgcctccactgaaaagtcaaacatcatccggggctggatctttggcaccactcttgattcaaagacccagtcactgctgattgtgaacaatgctacaaacgtggttatcaaggtgtgtgagtttcagttctgtaacgatccatttttgggagtgtactaccacaagaacaacaagtcctggatggagtctgagttcagagtgtatagctctgctaacaactgcaccttcgagtacgtgtcccagcctttccttatggacctggaaggcaaacagggcaatttcaaaaacctgagagagttcgtgtttaagaacattgacggatacttcaaaatttattctaagcacacaccaattaacttagtgcggggcctaccccaaggctttagcgccctagagcccctggttgacctgcccattgggatcaatataacaaggttccaaactctacatataagttatctgaccccaggagacagctctagtggttggaccgccggcgcagcagcctactatgtcgggtacttacagccacgcacgttccttctgaagtacaatgagaacgggacaatcactgacgcagtagactgtgcactggacccgctaagcgagactaagtgcacacttaaatccttcacggtggagaaaggcatttatcagacctctaacttcagggtgcagccaacagaaagcattgtgcgattcccaaatattactaatctttgccctttcggggaggtctttaatgcaactagattcgcatcagtctatgcgtggaaccgcaaacgcatttccaattgtgtcgcagactactcagtgctgtacaactctgcctctttcagtacgttcaagtgttacggagtgtcacccactaaactgaacgacctgtgctttacaaatgtctacgctgactccttcgtgattaggggagacgaggtgagacaaattgcccccggacagactgggaatattgccgactacaattataagcttcctgatgatttcactggctgtgttattgcctggaatagtaacaatctggatagcaaggtgggaggcaactataactacttatatcgactgtttaggaagagtaatctgaaaccatttgagcgggatatttccacagaaatttaccaggccgggagcacaccatgtaatggggtgaagggatttaattgttacttcccactccagagctatggtttccaacccacctatggagtgggttaccagccctatagagtcgtggtgcttagttttgagctgcttcacgccccagcaaccgtctgcggtcccaaaaagtcgaccaatctcgtgaaaaacaaatgcgtaaacttcaactttaacggcttaacaggaaccggcgtgctcaccgaaagcaacaagaaattccttccatttcagcaattcggaagggacatcgccgacacaacagacgcggtgagggacccacagactctggagatactggacatcactccttgttcgtttgggggcgtctcggtcatcacacccgggactaatactagtaatcaggtagcagttttatatcaaggcgtcaactgtaccgaagtacctgtggccatacacgctgatcagctaacgccaacatggcgagtctattccaccggctctaacgtttttcagaccagggctgggtgcctgataggggcagagcacgtcaataattcctatgagtgtgatatccccataggtgcggggatctgtgccagctatcaaacccaaaccaattcaccagggagcgcaagctctgtggcttctcagagcataattgcatatacaatgtcactgggcgttgagaatagcgttgcatactctaataacagcatagccattcccacgaactttactatcagtgtgacaaccgaaatattgccagtttcgatgaccaaaactagcgtggattgcacgatgtacatctgtggagactctaccgaatgcagcaatctgctattacaatatggcagcttctgtacacagttaaatcgagccttgacaggcatcgcagtggaacaggacaaaaatactcaagaggtgtttgcacaggtgaagcaaatctacaaaacgccccccattaaagattttggcgggttcaatttttcacaaattctccccgacccgtctaagccgagtaagcggtccttcatcgaagatctgctctttaacaaagtaaccctcgccgatgccggctttattaagcagtatggcgactgcctgggggatatagccgctcgtgacctgatttgcgcccagaagttcaatggtctgaccgtgttgcctcctttattgaccgatgaaatgattgcccagtacactagtgccctgctggccggcactatcacgtctgggtggaccttcggagctggtgccgccttgcagataccttttgcaatgcagatggcctataggtttaatggtatcggagtgactcagaacgtactgtacgagaaccagaagctcatcgctaatcaatttaactccgctatcggaaaaatccaggacagcctctcttctacagctagcgctctgggcaaactgcaggatgtcgttaatcagaatgcccaggccctgaacaccttggttaaacaactatcttccaacttcggggccatatccagtgtgttgaatgatattctctcccgcttggatccacctgaagctgaggtgcagatcgatcgcttgatcaccggcagactgcagtccctccagacatatgtaactcagcagctgattagagccgccgagataagggcaagtgcgaatctggctgccaccaagatgagcgaatgtgtattgggccagagcaaacgagttgatttttgcggtaaggggtatcatttaatgtctttccctcaatccgcacctcatggcgtagttttcctgcatgtgacttatgtcccggctcaggagaagaattttaccacagcccccgcgatctgccatgacggaaaggcccacttcccccgggaaggcgtgtttgtatccaatgggactcactggtttgtcactcagcgaaatttttatgaaccacagatcatcaccactgacaacacatttgttagtggaaactgcgatgtggtcatcggcatcgtgaataacactgtctatgatccactgcaacctgaactggattcttttaaagaggaactcgacaagtattttaaaaaccacactagccctgacgtggatctcggtgacatttctggcatcaacgctagcgtagtgaacattcagaaagagatagatagacttaatgaggtggccaagaacctcaacgaaagtctgatcgacctccaggaactggggaaatacgagcagtacattaaatggccttggtacatatggctggggttcattgctgggctgatcgcaatagtgatggtgaccataatgctctgttgcatgactagctgctgcagctgcctgaagggctgctgtagttgtgggtcatgttgtaagtttgacgaagatgatagcgagcctgtccttaaaggagtgaagctccactacacctagtgggtttaaactcccatttaaatgtgagggttaatgcttcgagcagacatgataagatacattgatgagtttggacaaaccacaactagaatgcagtgaaaaaaatgctttatttgtgaaatttgtgatgctattgctttatttgtaaccattataagctgcaataaacaagttaacaacaacaattgcattcattttatgtttcaggttcagggggagatgtgggaggttttttaaagcaagtaaaacctctacaaatgtggtaaaataactataacggtcctaaggtagcgagacattgattattgactagttgttaatagtaatcaattacggggtcattagttcatagcccatatatggagttccgcgttacataacttacggtaaatggcccgcctggctgaccgcccaacgacccccgcccattgacgtcaataatgacgtatgttcccatagtaacgccaatagggactttccattgacgtcaatgggtggagtatttacggtaaactgcccacttggcagtacatcaagtgtatcatatgccaagtccgccccctattgacgtcaatgacggtaaatggcccgcctggcattatgcccagtacatgaccttacgggactttcctacttggcagtacatctacgtattagtcatcgctattaccatggtgatgcggttttggcagtacaccaatgggcgtggatagcggtttgactcacggggatttccaagtctccaccccattgacgtcaatgggagtttgttttggcaccaaaatcaacgggactttccaaaatgtcgtaataaccccgccccgttgacgcaaatgggcggtaggcgtgtacggtgggaggtctatataagcagagctcgtttagtgaaccgtcagatcgcctggaacgccatccacgctgttttgacctccatagaagacagcgatcgcgccaccatggctggcgaggcccccttcctttacctgtacgcccttgtgtatttcctgcagagcatcaattttgtgagaatcatcatgaggctgtggctttgctggaaatgtaggagcaagaaccccctgttgtatgacgccaactactttctgtgttggcacaccaatctcgccgtgttccagagtgcctctaagatcattacactgaaaaagcggtggcagcttgcactttctaagggagtgcatttcgtttgcaacctgctcctggtgacactcaagcagggggaaatcaaagacgccacccctagcgacttcgttagagccactgccacaatcccaatccaggcttccctgcctttcggctggcttatcgtgggtgtggcactgttggctgtgcggagaccacagggactgcctaataatacagctagctggtttaccgctctgacacagcatggcaaagaagacctcaagttccctcgcggtcagggggtgcctattaacactaatagctctccagacgaccaaattgggtattacaggcgcgccacaagacggatcatggcctgcttagtggggctgatgtggctatcctattttattgctagctttcgcctgaagaaggacaagaagaagaaagctgatgagacccaggcactgccccagcgccaaaagaagcagcagacagtcacactgctccctgctgcagacctggatgacttcagcaagcagctgcaggggaactttggcgaccaggagctgattagacaggggactgactataagcattggcctcagattgctcagttcgccccaagtgcatccgccttcttcgggatgtcacgaataggaatggaagtgaccccttctgggacatggttgacatacaccggagcaatcaagattacctccggggacggtaccacgtctcctattagcgaacacgattatcagatagggggatatactgagaagtgggagtccggcgtcaaaaagatgagtgggaaaggccagcagcaacaaggccaaacagttactaaaaagtctgccgcagaagctagtaaaaagcctcgccagaagcggacagccaccaaagcttacaatgtgactcaggccttcggccgccgggggcctgaacagaccctcttgtggcccgttaccctcgcatgtttcgtgcttgcagctgtgtacaggatcaattggtttaaggatcaggttatcctgttgaacaaacatatagatgcctataagacattcccacccaccgagccaaagaaagataagaaaaagaaaactagtcctgcaaggatggccggcaatggaggagacgcagccttagccctgctcttactcgacaggctgaaccaacttgagtctaaaatgagcggtaaagggcagaagatgaaggatctgtccccaaggtggtatttctactatctgggcaccggccctgaggattgtgtcgtcctccactcatacttcactagcgattattaccagctgtatagtacacaattatctaccgacacaggcgtcgagcacgtgaccttctttatatacaataagatcgtggatgaaccagaggagcatgtgcagatccacactattgatggctctagcgggggcatcatctgggtggcaacagaaggagccctcaacaccccaaaggaccatatcggcaccaggaatccagccaacaatgccgccattgttctgcagctccctcagggcactactctccctaaaggcttctatgctgagggacccggaccaggcgccaaatttgttgctgcttggacactgaaagctgctgctgggcccggaccaggccagtacatcaaggccaactctaagtttatcggcatcaccgaattgggacctggacccggctagtgagtttaaactcccatttaaatgtgagggttaatgcttcgagcagagctcgctgatcagcctcgactgtgccttctagttgccagccatctgttgtttgcccctcccccgtgccttccttgaccctggaaggtgccactcccactgtcctttcctaataaaatgaggaaattgcatcgcattgtctgagtaggtgtcattctattctggggggtggggtggggcaggacagcaagggggaggattgggaagacaatagcaggcatgctggggatgcggtgggctctatggcttctgaggcggaaagaacc

SEQ ID NO: 114 - DNA, 7638 bp, synthetic construct
  misc_feature 1..7638: note = Description of Artificial Sequence: Synthetic polynucleotide
  source 1..7638: mol_type = other DNA
gacattgattattgactagttgttaatagtaatcaattacggggtcattagttcatagcccatatatggagttccgcgttacataacttacggtaaatggcccgcctggctgaccgcccaacgacccccgcccattgacgtcaataatgacgtatgttcccatagtaacgccaatagggactttccattgacgtcaatgggtggagtatttacggtaaactgcccacttggcagtacatcaagtgtatcatatgccaagtccgccccctattgacgtcaatgacggtaaatggcccgcctggcattatgcccagtacatgaccttacgggactttcctacttggcagtacatctacgtattagtcatcgctattaccatggtgatgcggttttggcagtacaccaatgggcgtggatagcggtttgactcacggggatttccaagtctccaccccattgacgtcaatgggagtttgttttggcaccaaaatcaacgggactttccaaaatgtcgtaataaccccgccccgttgacgcaaatgggcggtaggcgtgtacggtgggaggtctatataagcagagctcgtttagtgaaccgtcagatcgcctggaacgccatccacgctgttttgacctccatagaagacagcgatcgcgccaccatgtttgtcttcctggtcttgctgccgctggtgagcagccagtgcgtgaatctcaccacccgcacccagcttccacctgcctacactaacagcttcacccgaggggtgtattaccctgacaaggtattccggtcctccgtcctccatagcacgcaggacctttttctgcccttcttctcaaatgtgacatggttccatgccattcacgtgagcggcacgaatggaacgaagcgctttgataaccccgtgctgcctttcaatgacggcgtctacttcgcctccactgaaaagtcaaacatcatccggggctggatctttggcaccactcttgattcaaagacccagtcactgctgattgtgaacaatgctacaaacgtggttatcaaggtgtgtgagtttcagttctgtaacgatccatttttgggagtgtactaccacaagaacaacaagtcctggatggagtctgagttcagagtgtatagctctgctaacaactgcaccttcgagtacgtgtcccagcctttccttatggacctggaaggcaaacagggcaatttcaaaaacctgagagagttcgtgtttaagaacattgacggatacttcaaaatttattctaagcacacaccaattaacttagtgcgggacctaccccaaggctttagcgccctagagcccctggttgacctgcccattgggatcaatataacaaggttccaaactctactggctctgcatagaagttatctgaccccaggagacagctctagtggttggaccgccggcgcagcagcctactatgtcgggtacttacagccacgcacgttccttctgaagtacaatgagaacgggacaatcactgacgcagtagactgtgcactggacccgctaagcgagactaagtgcacacttaaatccttcacggtggagaaaggcatttatcagacctctaacttcagggtgcagccaacagaaagcattgtgcgattcccaaatattactaatctttgccctttcggggaggtctttaatgcaactagattcgcatcagtctatgcgtggaaccgcaaacgcatttccaattgtgtcgcagactactcagtgctgtacaactctgcctctttcagtacgttcaagtgttacggagtgtcacccactaaactgaacgacctgtgctttacaaatgtctacgctgactccttcgtgattaggggagacgaggtgagacaaattgcccccggacagactgggaagattgccgactacaattataagcttcctgatgatttcactggctgtgttattgcctggaatagtaacaatctggatagcaaggtgggaggcaactataactacttatatcgactgtttaggaagagtaatctgaaaccatttgagcgggatatttccacagaaatttaccaggccgggagcacaccatgtaatggggtggagggatttaattgttacttcccactccagagctatggtttccaacccaccaatggagtgggttaccagccctatagagtcgtggtgcttagttttgagctgcttcacgccccagcaaccgtctgcggtcccaaaaagtcgaccaatctcgtgaaaaacaaatgcgtaaacttcaactttaacggcttaacaggaaccggcgtgctcaccgaaagcaacaagaaattccttccatttcagcaattcggaagggacatcgccgacacaacagacgcggtgagggacccacagactctggagatactggacatcactccttgttcgtttgggggcgtctcggtcatcacacccgggactaatactagtaatcaggtagcagttttatatcaaggcgtcaactgtaccgaagtacctgtggccatacacgctgatcagctaacgccaacatggcgagtctattccaccggctctaacgtttttcagaccagggctgggtgcctgataggggcagagcacgtcaataattcctatgagtgtgatatccccataggtgcggggatctgtgccagctatcaaacccaaaccaattcaccagggagcgcaagctctgtggcttctcagagcataattgcatatacaatgtcactgggcgctgagaatagcgttgcatactctaataacagcatagccattcccacgaactttactatcagtgtgacaaccgaaatattgccagtttcgatgaccaaaactagcgtggattgcacgatgtacatctgtggagactctaccgaatgcagcaatctgctattacaatatggcagcttctgtacacagttaaatcgagccttgacaggcatcgcagtggaacaggacaaaaatactcaagaggtgtttgcacaggtgaagcaaatctacaaaacgccccccattaaagattttggcgggttcaatttttcacaaattctccccgacccgtctaagccgagtaagcggtccttcatcgaagatctgctctttaacaaagtaaccctcgccgatgccggctttattaagcagtatggcgactgcctgggggatatagccgctcgtgacctgatttgcgcccagaagttcaatggtctgaccgtgttgcctcctttattgaccgatgaaatgattgcccagtacactagtgccctgctggccggcactatcacgtctgggtggaccttcggagctggtgccgccttgcagataccttttgcaatgcagatggcctataggtttaatggtatcggagtgactcagaacgtactgtacgagaaccagaagctcatcgctaatcaatttaactccgctatcggaaaaatccaggacagcctctcttctacagctagcgctctgggcaaactgcaggatgtcgttaatcagaatgcccaggccctgaacaccttggttaaacaactatcttccaacttcggggccatatccagtgtgttgaatgatattctctcccgcttggatccacctgaagctgaggtgcagatcgatcgcttgatcaccggcagactgcagtccctccagacatatgtaactcagcagctgattagagccgccgagataagggcaagtgcgaatctggctgccaccaagatgagcgaatgtgtattgggccagagcaaacgagttgatttttgcggtaaggggtatcatttaatgtctttccctcaatccgcacctcatggcgtagttttcctgcatgtgacttatgtcccggctcaggagaagaattttaccacagcccccgcgatctgccatgacggaaaggcccacttcccccgggaaggcgtgtttgtatccaatgggactcactggtttgtcactcagcgaaatttttatgaaccacagatcatcaccactgacaacacatttgttagtggaaactgcgatgtggtcatcggcatcgtgaataacactgtctatgatccactgcaacctgaactggattcttttaaagaggaactcgacaagtattttaaaaaccacactagccctgacgtggatctcggtgacatttctggcatcaacgctagcgtagtgaacattcagaaagagatagatagacttaatgaggtggccaagaacctcaacgaaagtctgatcgacctccaggaactggggaaatacgagcagtacattaaatggccttggtacatatggctggggttcattgctgggctgatcgcaatagtgatggtgaccataatgctctgttgcatgactagctgctgcagctgcctgaagggctgctgtagttgtgggtcatgttgtaagtttgacgaagatgatagcgagcctgtccttaaaggagtgaagctccactacacctagtgggtttaaactcccatttaaatgtgagggttaatgcttcgagcagacatgataagatacattgatgagtttggacaaaccacaactagaatgcagtgaaaaaaatgctttatttgtgaaatttgtgatgctattgctttatttgtaaccattataagctgcaataaacaagttaacaacaacaattgcattcattttatgtttcaggttcagggggagatgtgggaggttttttaaagcaagtaaaacctctacaaatgtggtaaaataactataacggtcctaaggtagcgagacattgattattgactagttgttaatagtaatcaattacggggtcattagttcatagcccatatatggagttccgcgttacataacttacggtaaatggcccgcctggctgaccgcccaacgacccccgcccattgacgtcaataatgacgtatgttcccatagtaacgccaatagggactttccattgacgtcaatgggtggagtatttacggtaaactgcccacttggcagtacatcaagtgtatcatatgccaagtccgccccctattgacgtcaatgacggtaaatggcccgcctggcattatgcccagtacatgaccttacgggactttcctacttggcagtacatctacgtattagtcatcgctattaccatggtgatgcggttttggcagtacaccaatgggcgtggatagcggtttgactcacggggatttccaagtctccaccccattgacgtcaatgggagtttgttttggcaccaaaatcaacgggactttccaaaatgtcgtaataaccccgccccgttgacgcaaatgggcggtaggcgtgtacggtgggaggtctatataagcagagctcgtttagtgaaccgtcagatcgcctggaacgccatccacgctgttttgacctccatagaagacagcgatcgcgccaccatggctggcgaggcccccttcctttacctgtacgcccttgtgtatttcctgcagagcatcaattttgtgagaatcatcatgaggctgtggctttgctggaaatgtaggagcaagaaccccctgttgtatgacgccaactactttctgtgttggcacaccaatctcgccgtgttccagagtgcctctaagatcattacactgaaaaagcggtggcagcttgcactttctaagggagtgcatttcgtttgcaacctgctcctggtgacactcaagcagggggaaatcaaagacgccacccctagcgacttcgttagagccactgccacaatcccaatccaggcttccctgcctttcggctggcttatcgtgggtgtggcactgttggctgtgcggagaccacagggactgcctaataatacagctagctggtttaccgctctgacacagcatggcaaagaagacctcaagttccctcgcggtcagggggtgcctattaacactaatagctctccagacgaccaaattgggtattacaggcgcgccacaagacggatcatggcctgcttagtggggctgatgtggctatcctattttattgctagctttcgcctgaagaaggacaagaagaagaaagctgatgagacccaggcactgccccagcgccaaaagaagcagcagacagtcacactgctccctgctgcagacctggatgacttcagcaagcagctgcaggggaactttggcgaccaggagctgattagacaggggactgactataagcattggcctcagattgctcagttcgccccaagtgcatccgccttcttcgggatgtcacgaataggaatggaagtgaccccttctgggacatggttgacatacaccggagcaatcaagattacctccggggacggtaccacgtctcctattagcgaacacgattatcagatagggggatatactgagaagtgggagtccggcgtcaaaaagatgagtgggaaaggccagcagcaacaaggccaaacagttactaaaaagtctgccgcagaagctagtaaaaagcctcgccagaagcggacagccaccaaagcttacaatgtgactcaggccttcggccgccgggggcctgaacagaccctcttgtggcccgttaccctcgcatgtttcgtgcttgcagctgtgtacaggatcaattggtttaaggatcaggttatcctgttgaacaaacatatagatgcctataagacattcccacccaccgagccaaagaaagataagaaaaagaaaactagtcctgcaaggatggccggcaatggaggagacgcagccttagccctgctcttactcgacaggctgaaccaacttgagtctaaaatgagcggtaaagggcagaagatgaaggatctgtccccaaggtggtatttctactatctgggcaccggccctgaggattgtgtcgtcctccactcatacttcactagcgattattaccagctgtatagtacacaattatctaccgacacaggcgtcgagcacgtgaccttctttatatacaataagatcgtggatgaaccagaggagcatgtgcagatccacactattgatggctctagcgggggcatcatctgggtggcaacagaaggagccctcaacaccccaaaggaccatatcggcaccaggaatccagccaacaatgccgccattgttctgcagctccctcagggcactactctccctaaaggcttctatgctgagggacccggaccaggcgccaaatttgttgctgcttggacactgaaagctgctgctgggcccggaccaggccagtacatcaaggccaactctaagtttatcggcatcaccgaattgggacctggacccggctagtgagtttaaactcccatttaaatgtgagggttaatgcttcgagcagagctcgctgatcagcctcgactgtgccttctagttgccagccatctgttgtttgcccctcccccgtgccttccttgaccctggaaggtgccactcccactgtcctttcctaataaaatgaggaaattgcatcgcattgtctgagtaggtgtcattctattctggggggtggggtggggcaggacagcaagggggaggattgggaagacaatagcaggcatgctggggatgcggtgggctctatggcttctgaggcggaaagaacc

SEQ ID NO: 115 - protein, 100 aa, synthetic construct
  REGION 1..100: note = Description of Artificial Sequence: Synthetic polypeptide
VTNTEMFVTAPDNLGYMYEVQWPGQTQPQIANCSVYDFFVWLHYYSVRDTVTNTEMFVTAPDNLGYMYEVQWPGQTQPQIANCSVYDFFVWLHYYSVRDT

SEQ ID NO: 116 - protein, 25 aa, synthetic construct
  REGION 1..25: note = Description of Artificial Sequence: Synthetic peptide
VTNTEMFVTAPDNLGYMYEVQWPGQ

SEQ ID NO: 117 - protein, 25 aa, synthetic construct
  REGION 1..25: note = Description of Artificial Sequence: Synthetic peptide
TQPQIANCSVYDFFVWLHYYSVRDT

SEQ ID NO: 118 - DNA, 19 bp, synthetic construct
  misc_feature 1..19: note = Description of Artificial Sequence: Synthetic oligonucleotide
  source 1..19: mol_type = other DNA
taatacgactcactatagg

SEQ ID NO: 119 - DNA, 20 bp, synthetic construct
  misc_feature 1..20: note = Description of Artificial Sequence: Synthetic oligonucleotide
  source 1..20: mol_type = other DNA
taatacgactcactataggn

SEQ ID NO: 120 - DNA, 17 bp, synthetic construct
  misc_feature 1..17: note = Description of Artificial Sequence: Synthetic oligonucleotide
  source 1..17: mol_type = other DNA
taatacgactcactata

SEQ ID NO: 121 - DNA, 18 bp, synthetic construct
  misc_feature 1..18: note = Description of Artificial Sequence: Synthetic oligonucleotide
  source 1..18: mol_type = other DNA
taatacgactcactatan

SEQ ID NO: 122 - DNA, 17 bp, synthetic construct
  misc_feature 1..17: note = Description of Artificial Sequence: Synthetic oligonucleotide
  source 1..17: mol_type = other DNA
atttaggtgacactata

SEQ ID NO: 123 - DNA, 25 bp, synthetic construct
  misc_feature 1..25: note = Description of Artificial Sequence: Synthetic oligonucleotide
  source 1..25: mol_type = other DNA
cccccttcagcctgaacttgattcc

SEQ ID NO: 124 - DNA, 25 bp, synthetic construct
  misc_feature 1..25: note = Description of Artificial Sequence: Synthetic oligonucleotide
  source 1..25: mol_type = other DNA
tccactgcaacctgaacttgatagt

SEQ ID NO: 125 - protein, 4 aa, synthetic construct
  REGION 1..4: note = Description of Artificial Sequence: Synthetic peptide
RRAR

SEQ ID NO: 126 - protein, 4 aa, synthetic construct
  REGION 1..4: note = Description of Artificial Sequence: Synthetic peptide
GSAS

SEQ ID NO: 127 - protein, 8 aa, Severe acute respiratory syndrome-related coronavirus
  source 1..8: note = Severe acute respiratory syndrome coronavirus 2
MESLVPGF

SEQ ID NO: 128 - protein, 10 aa, Severe acute respiratory syndrome-related coronavirus
  source 1..10: note = Severe acute respiratory syndrome coronavirus 2
VELVAELEGI

SEQ ID NO: 129 - protein, 8 aa, synthetic construct
  REGION 1..8: note = Description of Artificial Sequence: Synthetic peptide
SIINFEKL

SEQ ID NO: 130 - protein, 8 aa, Severe acute respiratory syndrome-related coronavirus
  REGION 1..8: note = Table A: HLA-B*18:01M HLA-B*37:01M HLA-B*07:05H
  source 1..8: note = Severe acute respiratory syndrome coronavirus 2
MESLVPGF

SEQ ID NO: 131 - protein, 8 aa, Severe acute respiratory syndrome-related coronavirus
  REGION 1..8: note = Table A: HLA-B*44:05H HLA-B*08:01M HLA-B*18:01H HLA-B*14:02H HLA-B*14:01H HLA-B*37:01H HLA-B*40:02M HLA-B*07:05H HLA-B*41:02H
  source 1..8: note = Severe acute respiratory syndrome coronavirus 2
NEKTHVQL

SEQ ID NO: 132 - protein, 8 aa, Severe acute respiratory syndrome-related coronavirus
  REGION 1..8: note = Table A: HLA-B*57:03H
  source 1..8: note = Severe acute respiratory syndrome coronavirus 2
KTHVQLSL

SEQ ID NO: 133 - protein, 8 aa, Severe acute respiratory syndrome-related coronavirus
  REGION 1..8: note = Table A: HLA-B*39:06H
  source 1..8: note = Severe acute respiratory syndrome coronavirus 2
THVQLSLP

SEQ ID NO: 134 - protein, 8 aa, Severe acute respiratory syndrome-related coronavirus
  REGION 1..8: note = Table A: HLA-B*52:01M
  source 1..8: note = Severe acute respiratory syndrome coronavirus 2
VQLSLPVL

SEQ ID NO: 135 - protein, 8 aa, Severe acute respiratory syndrome-related coronavirus
  REGION 1..8: note = Table A: HLA-C*15:05H HLA-B*51:01H HLA-B*52:01H HLA-B*13:02H
  source 1..8: note = Severe acute respiratory syndrome coronavirus 2
LSLPVLQV

SEQ ID NO: 136 - protein, 8 aa, Severe acute respiratory syndrome-related coronavirus
  REGION 1..8: note = Table A: HLA-B*08:01H
  source 1..8: note = Severe acute respiratory syndrome coronavirus 2
VLQVRDVL

SEQ ID NO: 137 - protein, 8 aa, Severe acute respiratory syndrome-related coronavirus
  REGION 1..8: note = Table A: HLA-B*37:01H HLA-B*40:02H HLA-B*41:02H HLA-C*07:04H
  source 1..8: note = Severe acute respiratory syndrome coronavirus 2
RDVLVRGF

SEQ ID NO: 138 - protein, 8 aa, Severe acute respiratory syndrome-related coronavirus
  REGION 1..8: note = Table A: HLA-C*05:01H
  source 1..8: note = Severe acute respiratory syndrome coronavirus 2
FGDSVEEV

SEQ ID NO: 139 - protein, 8 aa, Severe acute respiratory syndrome-related coronavirus
  REGION 1..8: note = Table A: HLA-B*14:02H HLA-B*41:02M
  source 1..8: note = Severe acute respiratory syndrome coronavirus 2
VEVEKGVL

SEQ ID NO: 140 - protein, 8 aa, Severe acute respiratory syndrome-related coronavirus
  REGION 1..8: note = Table A: HLA-B*13:02H
  source 1..8: note = Severe acute respiratory syndrome coronavirus 2
PQLEQPYV

SEQ ID NO: 141 - protein, 8 aa, Severe acute respiratory syndrome-related coronavirus
  REGION 1..8: note = Table A: HLA-B*49:01H
  source 1..8: note = Severe acute respiratory syndrome coronavirus 2
LEQPYVFI

SEQ ID NO: 142 - protein, 8 aa, Severe acute respiratory syndrome-related coronavirus
  REGION 1..8: note = Table A: HLA-A*33:01H HLA-A*33:03H HLA-A*34:01M HLA-A*34:02H HLA-A*66:01H
  source 1..8: note = Severe acute respiratory syndrome coronavirus 2
QPYVFIKR

SEQ ID NO: 143 - protein, 8 aa, Severe acute respiratory syndrome-related coronavirus
  REGION 1..8: note = Table A: HLA-B*46:01H HLA-B*08:01H HLA-B*35:03H HLA-C*15:05H HLA-C*01:02M HLA-B*35:02H HLA-B*51:01H HLA-B*35:12H
  source 1..8: note = Severe acute respiratory syndrome coronavirus 2
TAPHGHVM

SEQ ID NO: 144 - protein, 8 aa, Severe acute respiratory syndrome-related coronavirus
  REGION 1..8: note = Table A: HLA-B*56:01H HLA-B*08:01H HLA-B*55:02H HLA-C*15:05H HLA-B*55:01H HLA-B*07:04H
  source 1..8: note = Severe acute respiratory syndrome coronavirus 2
APHGHVMV

SEQ ID NO: 145 - protein, 8 aa, Severe acute respiratory syndrome-related coronavirus
  REGION 1..8: note = Table A: HLA-B*08:01H
  source 1..8: note = Severe acute respiratory syndrome coronavirus 2
HGHVMVEL

SEQ ID NO: 146 - protein, 8 aa, Severe acute respiratory syndrome-related coronavirus
  REGION 1..8: note = Table A: HLA-B*39:06H
  source 1..8: note = Severe acute respiratory syndrome coronavirus 2
GHVMVELV

SEQ ID NO: 147 - protein, 8 aa, Severe acute respiratory syndrome-related coronavirus
  REGION 1..8: note = Table A: HLA-B*35:12H
  source 1..8: note = Severe acute respiratory syndrome coronavirus 2
MVELVAEL

SEQ ID NO: 148 - protein, 8 aa, Severe acute respiratory syndrome-related coronavirus
  REGION 1..8: note = Table A: HLA-B*44:02H HLA-B*44:05H HLA-C*16:04H HLA-B*46:01H HLA-B*44:03M HLA-B*18:01M HLA-B*07:05M
  source 1..8: note = Severe acute respiratory syndrome coronavirus 2
AELEGIQY

SEQ ID NO: 149 - protein, 8 aa, Severe acute respiratory syndrome-related coronavirus
  REGION 1..8: note = Table A: HLA-C*03:04H
  source 1..8: note = Severe acute respiratory syndrome coronavirus 2
YGRSGETL

SEQ ID NO: 150 - protein, 8 aa, Severe acute respiratory syndrome-related coronavirus
  REGION 1..8: note = Table A: HLA-C*15:05H HLA-C*15:02H
  source 1..8: note = Severe acute respiratory syndrome coronavirus 2
RSGETLGV

SEQ ID NO: 151 - protein, 8 aa, Severe acute respiratory syndrome-related coronavirus
  REGION 1..8: note = Table A: HLA-B*40:02H HLA-B*49:01M
  source 1..8: note = Severe acute respiratory syndrome coronavirus 2
GETLGVLV

SEQ ID NO: 152 - protein, 8 aa, Severe acute respiratory syndrome-related coronavirus
  REGION 1..8: note = Table A: HLA-B*51:01H HLA-B*52:01H
  source 1..8: note = Severe acute respiratory syndrome coronavirus 2
LGVLVPHV

SEQ ID NO: 153 - protein, 8 aa, Severe acute respiratory syndrome-related coronavirus
  REGION 1..8: note = Table A: HLA-B*55:01H HLA-B*39:06H HLA-B*54:01H
  source 1..8: note = Severe acute respiratory syndrome coronavirus 2
HVGEIPVA

SEQ ID NO: 154 - protein, 8 aa, Severe acute respiratory syndrome-related coronavirus
  REGION 1..8: note = Table A: HLA-B*18:01H HLA-B*39:01H
  source 1..8: note = Severe acute respiratory syndrome coronavirus 2
VGEIPVAY

SEQ ID NO: 155 - protein, 8 aa, Severe acute respiratory syndrome-related coronavirus
  REGION 1..8: note = Table A: HLA-B*49:01H
  source 1..8: note = Severe acute respiratory syndrome coronavirus 2
GEIPVAYR

SEQ ID NO: 156 - protein, 8 aa, Severe acute respiratory syndrome-related coronavirus
  REGION 1..8: note = Table A: HLA-B*51:01H
  source 1..8: note = Severe acute respiratory syndrome coronavirus 2
IPVAYRKV

SEQ ID NO: 157 - protein, 8 aa, Severe acute respiratory syndrome-related coronavirus
  REGION 1..8: note = Table A: HLA-B*07:04H
  source 1..8: note = Severe acute respiratory syndrome coronavirus 2
PVAYRKVL

SEQ ID NO: 158 - protein, 8 aa, Severe acute respiratory syndrome-related coronavirus
  REGION 1..8: note = Table A: HLA-B*58:02H HLA-B*08:01M HLA-C*17:01H
  source 1..8: note = Severe acute respiratory syndrome coronavirus 2
VAYRKVLL

SEQ ID NO: 159 - protein, 8 aa, Severe acute respiratory syndrome-related coronavirus
  REGION 1..8: note = Table A: HLA-A*30:02H
  source 1..8: note = Severe acute respiratory syndrome coronavirus 2
KGAGGHSY

SEQ ID NO: 160 - protein, 8 aa, Severe acute respiratory syndrome-related coronavirus
  REGION 1..8: note = Table A: HLA-B*39:01H HLA-B*15:10H
  source 1..8: note = Severe acute respiratory syndrome coronavirus 2
GHSYGADL

SEQ ID NO: 161 - protein, 8 aa, Severe acute respiratory syndrome-related coronavirus
  REGION 1..8: note = Table A: HLA-B*46:01H
  source 1..8: note = Severe acute respiratory syndrome coronavirus 2
YGADLKSF

SEQ ID NO: 162 - protein, 8 aa, Severe acute respiratory syndrome-related coronavirus
  REGION 1..8: note = Table A: HLA-B*37:01M HLA-B*40:02H HLA-B*41:02H HLA-C*07:04H
  source 1..8: note = Severe acute respiratory syndrome coronavirus 2
ADLKSFDL

SEQ ID NO: 163 - protein, 8 aa, Severe acute respiratory syndrome-related coronavirus
  REGION 1..8: note = Table A: HLA-C*04:01M HLA-C*04:03M HLA-C*08:02M HLA-B*39:01H
  source 1..8: note = Severe acute respiratory syndrome coronavirus 2
SFDLGDEL

SEQ ID NO: 164 - protein, 8 aa, Severe acute respiratory syndrome-related coronavirus
  REGION 1..8: note = Table A: HLA-B*18:01H HLA-B*07:05H
  source 1..8: note = Severe acute respiratory syndrome coronavirus 2
DELGTDPY

SEQ ID NO: 165 - protein, 8 aa, Severe acute respiratory syndrome-related coronavirus
  REGION 1..8: note = Table A: HLA-B*58:02M HLA-C*16:01M HLA-C*06:02H HLA-C*03:03H HLA-C*03:04M HLA-C*15:05M HLA-C*01:02H HLA-C*15:02H
  source 1..8: note = Severe acute respiratory syndrome coronavirus 2
SSGVTREL

SEQ ID NO: 166 - protein, 8 aa, Severe acute respiratory syndrome-related coronavirus
  REGION 1..8: note = Table A: HLA-B*38:02H
  source 1..8: note = Severe acute respiratory syndrome coronavirus 2
TRYVDNNF

SEQ ID NO: 167 - protein, 8 aa, Severe acute respiratory syndrome-related coronavirus
  REGION 1..8: note = Table A: HLA-C*15:05H HLA-B*51:01H
  source 1..8: note = Severe acute respiratory syndrome coronavirus 2
DGYPLECI

SEQ ID NO: 168 - protein, 8 aa, Severe acute respiratory syndrome-related coronavirus
  REGION 1..8: note = Table A: HLA-A*36:01H
  source 1..8: note = Severe acute respiratory syndrome coronavirus 2
QLDFIDTK

SEQ ID NO: 169 - protein, 8 aa, Severe acute respiratory syndrome-related coronavirus
  REGION 1..8: note = Table A: HLA-A*36:01H
  source 1..8: note = Severe acute respiratory syndrome coronavirus 2
IDTKRGVY

SEQ ID NO: 170 - protein, 8 aa, Severe acute respiratory syndrome-related coronavirus
  REGION 1..8: note = Table A: HLA-B*38:02H
  source 1..8: note = Severe acute respiratory syndrome coronavirus 2
EHEHEIAW

SEQ ID NO: 171 - protein, 8 aa, Severe acute respiratory syndrome-related coronavirus
  REGION 1..8: note = Table A: HLA-B*18:01M HLA-B*07:05H
  source 1..8: note = Severe acute respiratory syndrome coronavirus 2
HEHEIAWY

SEQ ID NO: 172 - protein, 8 aa, Severe acute respiratory syndrome-related coronavirus
  REGION 1..8: note = Table A: HLA-B*39:01H
  source 1..8: note = Severe acute respiratory syndrome coronavirus 2
EHEIAWYT

SEQ ID NO: 173 - protein, 8 aa, Severe acute respiratory syndrome-related coronavirus
  REGION 1..8: note = Table A: HLA-A*34:01H HLA-A*66:01H
  source 1..8: note = Severe acute respiratory syndrome coronavirus 2
EIAWYTER

SEQ ID NO: 174 - protein, 8 aa, Severe acute respiratory syndrome-related coronavirus
  REGION 1..8: note = Table A: HLA-B*56:01H HLA-B*55:02H HLA-B*55:01M HLA-B*39:06H HLA-B*54:01M
  source 1..8: note = Severe acute respiratory syndrome coronavirus 2
TPFEIKLA

SEQ ID NO: 175 - protein, 8 aa, Severe acute respiratory syndrome-related coronavirus
  REGION 1..8: note = Table A: HLA-B*57:03H
  source 1..8: note = Severe acute respiratory syndrome coronavirus 2
LAKKFDTF

SEQ ID NO: 176 - protein, 8 aa, Severe acute respiratory syndrome-related coronavirus
  REGION 1..8: note = Table A: HLA-A*74:01H HLA-A*33:03H
  source 1..8: note = Severe acute respiratory syndrome coronavirus 2
IIKTIQPR

SEQ ID NO: 177 - protein, 8 aa, Severe acute respiratory syndrome-related coronavirus
  REGION 1..8: note = Table A: HLA-B*58:02H
  source 1..8: note = Severe acute respiratory syndrome coronavirus 2
KTIQPRVE

SEQ ID NO: 178 - protein, 8 aa, Severe acute respiratory syndrome-related coronavirus
  REGION 1..8: note = Table A: HLA-A*34:01H
  source 1..8: note = Severe acute respiratory syndrome coronavirus 2
DGFMGRIR

SEQ ID NO: 179 - protein, 8 aa, Severe acute respiratory syndrome-related coronavirus
  REGION 1..8: note = Table A: HLA-A*02:11H HLA-A*02:02H HLA-A*02:03H
  source 1..8: note = Severe acute respiratory syndrome coronavirus 2
FMGRIRSV

SEQ ID NO: 180 - protein, 8 aa, Severe acute respiratory syndrome-related coronavirus
  REGION 1..8: note = Table A: HLA-B*15:02H
  source 1..8: note = Severe acute respiratory syndrome coronavirus 2
MGRIRSVY

SEQ ID NO: 181 - protein, 8 aa, Severe acute respiratory syndrome-related coronavirus
  REGION 1..8: note = Table A: HLA-C*15:05H
  source 1..8: note = Severe acute respiratory syndrome coronavirus 2
SPNECNQM

SEQ ID NO: 182 - protein, 8 aa, Severe acute respiratory syndrome-related coronavirus
  REGION 1..8: note = Table A: HLA-B*38:02H
  source 1..8: note = Severe acute respiratory syndrome coronavirus 2
DHCGETSW

SEQ ID NO: 183 - protein, 8 aa, Severe acute respiratory syndrome-related coronavirus
  REGION 1..8: note = Table A: HLA-B*46:01H HLA-B*08:01H HLA-B*15:02H
  source 1..8: note = Severe acute respiratory syndrome coronavirus 2
FVKATCEF

SEQ ID NO: 184 - protein, 8 aa, Severe acute respiratory syndrome-related coronavirus
  REGION 1..8: note = Table A: HLA-C*15:05H HLA-B*52:01H HLA-B*13:02H
  source 1..8: note = Severe acute respiratory syndrome coronavirus 2
PQNAVVKI

SEQ ID NO: 185 - protein, 8 aa, Severe acute respiratory syndrome-related coronavirus
  REGION 1..8: note = Table A: HLA-C*07:01H HLA-A*68:02H HLA-B*35:03H HLA-A*02:05H HLA-A*02:02H HLA-A*34:01H HLA-B*35:02H HLA-C*08:01H HLA-C*08:03H HLA-B*35:12M HLA-B*38:01H HLA-B*38:02H HLA-B*39:01M
  source 1..8: note = Severe acute respiratory syndrome coronavirus 2
EVGPEHSL

SEQ ID NO: 186 - protein, 8 aa, Severe acute respiratory syndrome-related coronavirus
  REGION 1..8: note = Table A: HLA-B*07:05H
  source 1..8: note = Severe acute respiratory syndrome coronavirus 2
PEHSLAEY

SEQ ID NO: 187 - protein, 8 aa, Severe acute respiratory syndrome-related coronavirus
  REGION 1..8: note = Table A: HLA-A*36:01H
  source 1..8: note = Severe acute respiratory syndrome coronavirus 2
YHNESGLK

SEQ ID NO: 188 - protein, 8 aa, Severe acute respiratory syndrome-related coronavirus
  REGION 1..8: note = Table A: HLA-B*49:01H
  source 1..8: note = Severe acute respiratory syndrome coronavirus 2
NESGLKTI

SEQ ID NO: 189 - protein, 8 aa, Severe acute respiratory syndrome-related coronavirus
  REGION 1..8: note = Table A: HLA-A*11:02H
  source 1..8: note = Severe acute respiratory syndrome coronavirus 2
SGLKTILR

SEQ ID NO: 190 - protein, 8 aa, Severe acute respiratory syndrome-related coronavirus
  REGION 1..8: note = Table A: HLA-B*57:03H HLA-C*07:04H
  source 1..8: note = Severe acute respiratory syndrome coronavirus 2
KGGRTIAF

SEQ ID NO: 191 - protein, 8 aa, Severe acute respiratory syndrome-related coronavirus
  REGION 1..8: note = Table A: HLA-B*54:01H
  source 1..8: note = Severe acute respiratory syndrome coronavirus 2
CAYWVPRA

SEQ ID NO: 192 - protein, 8 aa, Severe acute respiratory syndrome-related coronavirus
  REGION 1..8: note = Table A: HLA-B*51:01H
  source 1..8: note = Severe acute respiratory syndrome coronavirus 2
VPRASANI

SEQ ID NO: 193 - protein, 8 aa, Severe acute respiratory syndrome-related coronavirus
  REGION 1..8: note = Table A: HLA-B*39:01H
  source 1..8: note = Severe acute respiratory syndrome coronavirus 2
NHTGVVGE

SEQ ID NO: 194 - protein, 8 aa, Severe acute respiratory syndrome-related coronavirus
  REGION 1..8: note = Table A: HLA-A*34:02H
  source 1..8: note = Severe acute respiratory syndrome coronavirus 2
NLLEILQK

SEQ ID NO: 195 - protein, 8 aa, Severe acute respiratory syndrome-related coronavirus
  REGION 1..8: note = Table A: HLA-B*52:01H
  source 1..8: note = Severe acute respiratory syndrome coronavirus 2
LQKEKVNI

SEQ ID NO: 196 - protein, 8 aa, Severe acute respiratory syndrome-related coronavirus
  REGION 1..8: note = Table A: HLA-B*41:02H HLA-B*49:01H
  source 1..8: note = Severe acute respiratory syndrome coronavirus 2
KEKVNINI

SEQ ID NO: 197 - protein, 8 aa, Severe acute respiratory syndrome-related coronavirus
  REGION 1..8: note = Table A: HLA-A*36:01H
  source 1..8: note = Severe acute respiratory syndrome coronavirus 2
INIVGDFK

SEQ ID NO: 198 - protein, 8 aa, Severe acute respiratory syndrome-related coronavirus
  REGION 1..8: note = Table A: HLA-B*35:02M HLA-B*35:12H
  source 1..8: note = Severe acute respiratory syndrome coronavirus 2
NIVGDFKL

SEQ ID NO: 199 - protein, 8 aa, Severe acute respiratory syndrome-related coronavirus
  REGION 1..8: note = Table A: HLA-B*18:01H HLA-B*40:01H
  source 1..8: note = Severe acute respiratory syndrome coronavirus 2
NEEIAIIL

SEQ ID NO: 200 - protein, 8 aa, Severe acute respiratory syndrome-related coronavirus
  REGION 1..8: note = Table A: HLA-B*45:01H HLA-B*40:06H
  source 1..8: note = Severe acute respiratory syndrome coronavirus 2
EEIAIILA

SEQ ID NO: 201 - protein, 8 aa, Severe acute respiratory syndrome-related coronavirus
  REGION 1..8: note = Table A: HLA-B*46:01M HLA-C*03:02M HLA-C*15:05H
  source 1..8: note = Severe acute respiratory syndrome coronavirus 2
IAIILASF

SEQ ID NO: 202 - protein, 8 aa, Severe acute respiratory syndrome-related coronavirus
  REGION 1..8: note = Table A: HLA-B*46:01H HLA-C*15:05H HLA-B*15:01H
  source 1..8: note = Severe acute respiratory syndrome coronavirus 2
FSASTSAF

SEQ ID NO: 203 - protein, 8 aa, Severe acute respiratory syndrome-related coronavirus
  REGION 1..8: note = Table A: HLA-A*68:02H HLA-C*15:05H HLA-B*49:01H
  source 1..8: note = Severe acute respiratory syndrome coronavirus 2
TSAFVETV

SEQ ID NO: 204 - protein, 8 aa, Severe acute respiratory syndrome-related coronavirus
  REGION 1..8: note = Table A: HLA-A*36:01H HLA-A*26:01H HLA-B*38:02H HLA-B*39:01H
  source 1..8: note = Severe acute respiratory syndrome coronavirus 2
ETVKGLDY

SEQ ID NO: 205 - protein, 8 aa, Severe acute respiratory syndrome-related coronavirus
  REGION 1..8: note = Table A: HLA-B*39:06H
  source 1..8: note = Severe acute respiratory syndrome coronavirus 2
FKQIVESC

SEQ ID NO: 206 - protein, 8 aa, Severe acute respiratory syndrome-related coronavirus
  REGION 1..8: note = Table A: HLA-B*58:01M HLA-B*58:02M HLA-A*36:01H HLA-A*30:02H HLA-B*15:01H
  source 1..8: note = Severe acute respiratory syndrome coronavirus 2
KSILSPLY

SEQ ID NO: 207 - protein, 8 aa, Severe acute respiratory syndrome-related coronavirus
  REGION 1..8: note = Table A: HLA-A*02:04H HLA-B*37:01H
  source 1..8: note = Severe acute respiratory syndrome coronavirus 2
ILSPLYAF

SEQ ID NO: 208 - protein, 8 aa, Severe acute respiratory syndrome-related coronavirus
  REGION 1..8: note = Table A: HLA-B*39:06H HLA-B*54:01M
  source 1..8: note = Severe acute respiratory syndrome coronavirus 2
YAFASEAA

SEQ ID NO: 209 - protein, 8 aa, Severe acute respiratory syndrome-related coronavirus
  REGION 1..8: note = Table A: HLA-B*51:01H
  source 1..8: note = Severe acute respiratory syndrome coronavirus 2
FASEAARV

SEQ ID NO: 210 - protein, 8 aa, Severe acute respiratory syndrome-related coronavirus
  REGION 1..8: note = Table A: HLA-B*52:01H
  source 1..8: note = Severe acute respiratory syndrome coronavirus 2
ASEAARVV

SEQ ID NO: 211 - protein, 8 aa, Severe acute respiratory syndrome-related coronavirus
  REGION 1..8: note = Table A: HLA-B*58:02H HLA-B*52:01H
  source 1..8: note = Severe acute respiratory syndrome coronavirus 2
AARVVRSI

SEQ ID NO: 212 - protein, 8 aa, Severe acute respiratory syndrome-related coronavirus
  REGION 1..8: note = Table A: HLA-B*14:02H
  source 1..8: note = Severe acute respiratory syndrome coronavirus 2
ARVVRSIF

SEQ ID NO: 213 - protein, 8 aa, Severe acute respiratory syndrome-related coronavirus
  REGION 1..8: note = Table A: HLA-A*74:01M HLA-A*33:03H HLA-A*31:01H
  source 1..8: note = Severe acute respiratory syndrome coronavirus 2
VVRSIFSR

SEQ ID NO: 214 - protein, 8 aa, Severe acute respiratory syndrome-related coronavirus
  REGION 1..8: note = Table A: HLA-B*58:02H HLA-C*15:02H
  source 1..8: note = Severe acute respiratory syndrome coronavirus 2
RSIFSRTL

SEQ ID NO: 215 - protein, 8 aa, Severe acute respiratory syndrome-related coronavirus
  REGION 1..8: note = Table A: HLA-B*49:01H
  source 1..8: note = Severe acute respiratory syndrome coronavirus 2
LETAQNSV

SEQ ID NO: 216 - protein, 8 aa, Severe acute respiratory syndrome-related coronavirus
  REGION 1..8: note = Table A: HLA-A*33:03H HLA-A*26:03H HLA-A*34:01H HLA-A*66:01H
  source 1..8: note = Severe acute respiratory syndrome coronavirus 2
ETAQNSVR

SEQ ID NO: 217 - protein, 8 aa, Severe acute respiratory syndrome-related coronavirus
  REGION 1..8: note = Table A: HLA-B*48:01M HLA-B*58:02H HLA-B*52:01M HLA-B*15:01M HLA-B*15:03H HLA-B*41:02H
  source 1..8: note = Severe acute respiratory syndrome coronavirus 2
AQNSVRVL

SEQ ID NO: 218 - protein, 8 aa, Severe acute respiratory syndrome-related coronavirus
  REGION 1..8: note = Table A: HLA-A*34:02H
  source 1..8: note = Severe acute respiratory syndrome coronavirus 2
NSVRVLQK

SEQ ID NO: 219 - protein, 8 aa, Severe acute respiratory syndrome-related coronavirus
  REGION 1..8: note = Table A: HLA-B*55:01H
  source 1..8: note = Severe acute respiratory syndrome coronavirus 2
SVRVLQKA

SEQ ID NO: 220 - protein, 8 aa, Severe acute respiratory syndrome-related coronavirus
  REGION 1..8: note = Table A: HLA-B*52:01H HLA-B*13:02H
  source 1..8: note = Severe acute respiratory syndrome coronavirus 2
LQKAAITI

SEQ ID NO: 221 - protein, 8 aa, Severe acute respiratory syndrome-related coronavirus
  REGION 1..8: note = Table A: HLA-A*36:01H HLA-A*01:01H HLA-B*38:02H HLA-B*15:01H
  source 1..8: note = Severe acute respiratory syndrome coronavirus 2
ILDGISQY

SEQ ID NO: 222 - protein, 8 aa, Severe acute respiratory syndrome-related coronavirus
  REGION 1..8: note = Table A: HLA-B*35:02H
  source 1..8: note = Severe acute respiratory syndrome coronavirus 2
DGISQYSL

SEQ ID NO: 223 - protein, 8 aa, Severe acute respiratory syndrome-related coronavirus
  REGION 1..8: note = Table A: HLA-B*52:01H
  source 1..8: note = Severe acute respiratory syndrome coronavirus 2
SQYSLRLI

SEQ ID NO: 224 - protein, 8 aa, Severe acute respiratory syndrome-related coronavirus
  REGION 1..8: note = Table A: HLA-B*38:02H HLA-B*15:02M
  source 1..8: note = Severe acute respiratory syndrome coronavirus 2
SLRLIDAM

SEQ ID NO: 225 - protein, 8 aa, Severe acute respiratory syndrome-related coronavirus
  REGION 1..8: note = Table A: HLA-B*37:01M HLA-B*40:02H HLA-B*41:02H
  source 1..8: note = Severe acute respiratory syndrome coronavirus 2
SDLATNNL

SEQ ID NO: 226 - protein, 8 aa, Severe acute respiratory syndrome-related coronavirus
  REGION 1..8: note = Table A: HLA-C*15:05H
  source 1..8: note = Severe acute respiratory syndrome coronavirus 2
ATNNLVVM

SEQ ID NO: 227 - protein, 8 aa, Severe acute respiratory syndrome-related coronavirus
  REGION 1..8: note = Table A: HLA-B*18:01H HLA-B*15:02H HLA-B*07:05H
  source 1..8: note = Severe acute respiratory syndrome coronavirus 2
NNLVVMAY

SEQ ID NO: 228 - protein, 8 aa, Severe acute respiratory syndrome-related coronavirus
  REGION 1..8: note = Table A: HLA-B*51:01M HLA-B*52:01H
  source 1..8: note = Severe acute respiratory syndrome coronavirus 2
MAYITGGV

SEQ ID NO: 229 - protein, 8 aa, Severe acute respiratory syndrome-related coronavirus
  REGION 1..8: note = Table A: HLA-C*14:02H HLA-C*14:03H HLA-B*39:01H
  source 1..8: note = Severe acute respiratory syndrome coronavirus 2
AYITGGVV

SEQ ID NO: 230 - protein, 8 aa, Severe acute respiratory syndrome-related coronavirus
  REGION 1..8: note = Table A: HLA-B*58:01H HLA-C*04:03H HLA-C*07:01H HLA-A*68:02H HLA-C*15:05M HLA-C*15:02M HLA-A*02:04H HLA-C*17:01H HLA-C*08:01H HLA-B*57:03H HLA-C*07:04M
  source 1..8: note = Severe acute respiratory syndrome coronavirus 2
ITGGVVQL

SEQ ID NO: 231 - protein, 8 aa, Severe acute respiratory syndrome-related coronavirus
  REGION 1..8: note = Table A: HLA-B*52:01H HLA-B*15:03H
  source 1..8: note = Severe acute respiratory syndrome coronavirus 2
SQWLTNIF

SEQ ID NO: 232 - protein, 8 aa, Severe acute respiratory syndrome-related coronavirus
  REGION 1..8: note = Table A: HLA-B*15:02H
  source 1..8: note = Severe acute respiratory syndrome coronavirus 2
TNIFGTVY

SEQ ID NO: 233 - protein, 8 aa, Severe acute respiratory syndrome-related coronavirus
  REGION 1..8: note = Table A: HLA-A*36:01H
  source 1..8: note = Severe acute respiratory syndrome coronavirus 2
IFGTVYEK

SEQ ID NO: 234 - protein, 8 aa, Severe acute respiratory syndrome-related coronavirus
  REGION 1..8: note = Table A: HLA-B*08:01H HLA-B*40:02H HLA-B*41:02M
  source 1..8: note = Severe acute respiratory syndrome coronavirus 2
YEKLKPVL

SEQ ID NO: 235 - protein, 8 aa, Severe acute respiratory syndrome-related coronavirus
  REGION 1..8: note = Table A: HLA-C*14:02M HLA-C*14:03H HLA-B*46:01H HLA-A*24:07H
  source 1..8: note = Severe acute respiratory syndrome coronavirus 2
KFKEGVEF

SEQ ID NO: 236 - protein, 8 aa, Severe acute respiratory syndrome-related coronavirus
  REGION 1..8: note = Table A: HLA-B*18:01H HLA-B*51:01H HLA-B*15:02H HLA-B*07:05H
  source 1..8: note = Severe acute respiratory syndrome coronavirus 2
DGWEIVKF

SEQ ID NO: 237 - protein, 8 aa, Severe acute respiratory syndrome-related coronavirus
  REGION 1..8: note = Table A: HLA-B*44:05H HLA-B*41:02H HLA-B*49:01M
  source 1..8: note = Severe acute respiratory syndrome coronavirus 2
CEIVGGQI

SEQ ID NO: 238 - protein, 8 aa, Severe acute respiratory syndrome-related coronavirus
  REGION 1..8: note = Table A: HLA-C*15:05H
  source 1..8: note = Severe acute respiratory syndrome coronavirus 2
VGGQIVTC

SEQ ID NO: 239 - protein, 8 aa, Severe acute respiratory syndrome-related coronavirus
  REGION 1..8: note = Table A: HLA-B*37:01H
  source 1..8: note = Severe acute respiratory syndrome coronavirus 2
KESVQTFF

SEQ ID NO: 240 - protein, 8 aa, Severe acute respiratory syndrome-related coronavirus
  REGION 1..8: note = Table A: HLA-B*52:01H HLA-B*13:02H
  source 1..8: note = Severe acute respiratory syndrome coronavirus 2
VQTFFKLV

SEQ ID NO: 241 - protein, 8 aa, Severe acute respiratory syndrome-related coronavirus
  REGION 1..8: note = Table A: HLA-A*11:01H HLA-A*11:02H
  source 1..8: note = Severe acute respiratory syndrome coronavirus 2
TFFKLVNK

SEQ ID NO: 242 - protein, 8 aa, Severe acute respiratory syndrome-related coronavirus
  REGION 1..8: note = Table A: HLA-C*03:02H HLA-C*15:05H HLA-C*15:02H
  source 1..8: note = Severe acute respiratory syndrome coronavirus 2
LVNKFLAL

SEQ ID NO: 243 - protein, 8 aa, Severe acute respiratory syndrome-related coronavirus
  REGION 1..8: note = Table A: HLA-B*37:01H
  source 1..8: note = Severe acute respiratory syndrome coronavirus 2
ADSIIIGG

SEQ ID NO: 244 - protein, 8 aa, Severe acute respiratory syndrome-related coronavirus
  REGION 1..8: note = Table A: HLA-B*39:06H HLA-B*54:01H
  source 1..8: note = Severe acute respiratory syndrome coronavirus 2
DSIIIGGA

SEQ ID NO: 245 - protein, 8 aa, Severe acute respiratory syndrome-related coronavirus
  REGION 1..8: note = Table A: HLA-C*03:03H
  source 1..8: note = Severe acute respiratory syndrome coronavirus 2
SIIIGGAK

SEQ ID NO: 246 - protein, 8 aa, Severe acute respiratory syndrome-related coronavirus
  REGION 1..8: note = Table A: HLA-C*03:03H HLA-C*03:04H HLA-C*15:05H
  source 1..8: note = Severe acute respiratory syndrome coronavirus 2
IIIGGAKL

SEQ ID NO: 247 - protein, 8 aa, Severe acute respiratory syndrome-related coronavirus
  REGION 1..8: note = Table A: HLA-A*03:02H
  source 1..8: note = Severe acute respiratory syndrome coronavirus 2
IIGGAKLK

SEQ ID NO: 248 - protein, 8 aa, Severe acute respiratory syndrome-related coronavirus
  REGION 1..8: note = Table A: HLA-B*46:01H HLA-B*15:01H
  source 1..8: note = Severe acute respiratory syndrome coronavirus 2
ALNLGETF

SEQ ID NO: 249 - protein, 8 aa, Severe acute respiratory syndrome-related coronavirus
  REGION 1..8: note = Table A: HLA-A*33:03H HLA-A*68:01H HLA-A*34:01H HLA-A*34:02H HLA-A*66:01H
  source 1..8: note = Severe acute respiratory syndrome coronavirus 2
ETFVTHSK

SEQ ID NO: 250 - protein, 8 aa, Severe acute respiratory syndrome-related coronavirus
  REGION 1..8: note = Table A: HLA-A*30:02M
  source 1..8: note = Severe acute respiratory syndrome coronavirus 2
VTHSKGLY

SEQ ID NO: 251 - protein, 8 aa, Severe acute respiratory syndrome-related coronavirus
  REGION 1..8: note = Table A: HLA-B*45:01H
  source 1..8: note = Severe acute respiratory syndrome coronavirus 2
EETGLLMP

SEQ ID NO: 252 - protein, 8 aa, Severe acute respiratory syndrome-related coronavirus
  REGION 1..8: note = Table A: HLA-B*57:03H
  source 1..8: note = Severe acute respiratory syndrome coronavirus 2
KAPKEIIF

SEQ ID NO: 253 - protein, 8 aa, Severe acute respiratory syndrome-related coronavirus
  REGION 1..8: note = Table A: HLA-B*07:04H
  source 1..8: note = Severe acute respiratory syndrome coronavirus 2
APKEIIFL

SEQ ID NO: 254 - protein, 8 aa, Severe acute respiratory syndrome-related coronavirus
  REGION 1..8: note = Table A: HLA-C*14:02M HLA-C*14:03M
  source 1..8: note = Severe acute respiratory syndrome coronavirus 2
IFLEGETL

SEQ ID NO: 255 - protein, 8 aa, Severe acute respiratory syndrome-related coronavirus
  REGION 1..8: note = Table A: HLA-B*49:01H
  source 1..8: note = Severe acute respiratory syndrome coronavirus 2
GETLPTEV

SEQ ID NO: 256 - protein, 8 aa, Severe acute respiratory syndrome-related coronavirus
  REGION 1..8: note = Table A: HLA-B*18:01H HLA-B*07:05H HLA-B*49:01M
  source 1..8: note = Severe acute respiratory syndrome coronavirus 2
TEVLTEEV

SEQ ID NO: 257 - protein, 8 aa, Severe acute respiratory syndrome-related coronavirus
  REGION 1..8: note = Table A: HLA-A*36:01H
  source 1..8: note = Severe acute respiratory syndrome coronavirus 2
LTEEVVLK

SEQ ID NO: 258 - protein, 8 aa, Severe acute respiratory syndrome-related coronavirus
  REGION 1..8: note = Table A: HLA-B*45:01H HLA-B*50:01H
  source 1..8: note = Severe acute respiratory syndrome coronavirus 2
LEQPTSEA

SEQ ID NO: 259 - protein, 8 aa, Severe acute respiratory syndrome-related coronavirus
  REGION 1..8: note = Table A: HLA-B*51:01M
  source 1..8: note = Severe acute respiratory syndrome coronavirus 2
EAVEAPLV

SEQ ID NO: 260 - protein, 8 aa, Severe acute respiratory syndrome-related coronavirus
  REGION 1..8: note = Table A: HLA-B*55:02H HLA-C*15:05M HLA-B*55:01H HLA-B*07:05H
  source 1..8: note = Severe acute respiratory syndrome coronavirus 2
APLVGTPV

SEQ ID NO: 261 - protein, 8 aa, Severe acute respiratory syndrome-related coronavirus
  REGION 1..8: note = Table A: HLA-C*15:05H
  source 1..8: note = Severe acute respiratory syndrome coronavirus 2
TPVCINGL

SEQ ID NO: 262 - protein, 8 aa, Severe acute respiratory syndrome-related coronavirus
  REGION 1..8: note = Table A: HLA-B*51:01M
  source 1..8: note = Severe acute respiratory syndrome coronavirus 2
NGLMLLEI

SEQ ID NO: 263 - protein, 8 aa, Severe acute respiratory syndrome-related coronavirus
  REGION 1..8: note = Table A: HLA-B*38:02H HLA-B*13:02H
  source 1..8: note = Severe acute respiratory syndrome coronavirus 2
ALAPNMMV

SEQ ID NO: 264 - protein, 8 aa, Severe acute respiratory syndrome-related coronavirus
  REGION 1..8: note = Table A: HLA-B*38:02H HLA-B*15:02H
  source 1..8: note = Severe acute respiratory syndrome coronavirus 2
MMVTNNTF

SEQ ID NO: 265 - protein, 8 aa, Severe acute respiratory syndrome-related coronavirus
  REGION 1..8: note = Table A: HLA-B*58:01H HLA-C*03:03H HLA-C*03:04H HLA-C*15:05M HLA-C*15:02H HLA-C*08:01H HLA-C*07:04H
  source 1..8: note = Severe acute respiratory syndrome coronavirus 2
VTNNTFTL

SEQ ID NO: 266 - protein, 8 aa, Severe acute respiratory syndrome-related coronavirus
  REGION 1..8: note = Table A: HLA-A*03:01H HLA-A*03:02M HLA-A*11:01M HLA-A*11:02M HLA-A*34:02H
  source 1..8: note = Severe acute respiratory syndrome coronavirus 2
TNNTFTLK

SEQ ID NO: 267 - protein, 8 aa, Severe acute respiratory syndrome-related coronavirus
  REGION 1..8: note = Table A: HLA-B*57:03H
  source 1..8: note = Severe acute respiratory syndrome coronavirus 2
GAPTKVTF

SEQ ID NO: 268 - protein, 8 aa, Severe acute respiratory syndrome-related coronavirus
  REGION 1..8: note = Table A: HLA-B*40:02H
  source 1..8: note = Severe acute respiratory syndrome coronavirus 2
GDDTVIEV

SEQ ID NO: 269 - protein, 8 aa, Severe acute respiratory syndrome-related coronavirus
  REGION 1..8: note = Table A: HLA-A*25:01H HLA-B*46:01H HLA-A*26:01M HLA-A*26:02M HLA-A*26:03M HLA-B*18:01H HLA-B*35:01M HLA-B*38:02M HLA-B*15:01M HLA-B*15:02H HLA-B*39:01H HLA-B*07:05H
  source 1..8: note = Severe acute respiratory syndrome coronavirus 2
TVIEVQGY

SEQ ID NO: 270 - protein, 8 aa, Severe acute respiratory syndrome-related coronavirus
  REGION 1..8: note = Table A: HLA-B*51:01H HLA-B*52:01M
  source 1..8: note = Severe acute respiratory syndrome coronavirus 2
QGYKSVNI

SEQ ID NO: 271 - protein, 8 aa, Severe acute respiratory syndrome-related coronavirus
  REGION 1..8: note = Table A: HLA-B*15:03H
  source 1..8: note = Severe acute respiratory syndrome coronavirus 2
YKSVNITF

SEQ ID NO: 272 - protein, 8 aa, Severe acute respiratory syndrome-related coronavirus
  REGION 1..8: note = Table A: HLA-A*02:04H
  source 1..8: note = Severe acute respiratory syndrome coronavirus 2
SVNITFEL

SEQ ID NO: 273 - protein, 8 aa, Severe acute respiratory syndrome-related coronavirus
  REGION 1..8: note = Table A: HLA-B*18:01H HLA-B*07:05H
  source 1..8: note = Severe acute respiratory syndrome coronavirus 2
DERIDKVL

SEQ ID NO: 274 - protein, 8 aa, Severe acute respiratory syndrome-related coronavirus
  REGION 1..8: note = Table A: HLA-A*03:01H HLA-A*11:01H HLA-A*11:02H
  source 1..8: note = Severe acute respiratory syndrome coronavirus 2
IDKVLNEK

SEQ ID NO: 275 - protein, 8 aa, Severe acute respiratory syndrome-related coronavirus
  REGION 1..8: note = Table A: HLA-C*15:05H
  source 1..8: note = Severe acute respiratory syndrome coronavirus 2
CSAYTVEL

SEQ ID NO: 276 - protein, 8 aa, Severe acute respiratory syndrome-related coronavirus
  REGION 1..8: note = Table A: HLA-C*08:02H
  source 1..8: note = Severe acute respiratory syndrome coronavirus 2
TVELGTEV

SEQ ID NO: 277 - protein, 8 aa, Severe acute respiratory syndrome-related coronavirus
  REGION 1..8: note = Table A: HLA-A*03:02H HLA-A*11:02H
  source 1..8: note = Severe acute respiratory syndrome coronavirus 2
VVADAVIK

SEQ ID NO: 278 - protein, 8 aa, Severe acute respiratory syndrome-related coronavirus
  REGION 1..8: note = Table A: HLA-B*44:05H HLA-B*37:01M HLA-B*40:02M HLA-B*07:05H HLA-B*41:02H
  source 1..8: note = Severe acute respiratory syndrome coronavirus 2
ADAVIKTL

SEQ ID NO: 279 - protein, 8 aa, Severe acute respiratory syndrome-related coronavirus
  REGION 1..8: note = Table A: HLA-C*01:02H
  source 1..8: note = Severe acute respiratory syndrome coronavirus 2
LTPLGIDL

SEQ ID NO: 280 - protein, 8 aa, Severe acute respiratory syndrome-related coronavirus
  REGION 1..8: note = Table A: HLA-B*18:01H HLA-B*15:02H HLA-B*07:05H
  source 1..8: note = Severe acute respiratory syndrome coronavirus 2
DEWSMATY

SEQ ID NO: 281 - protein, 8 aa, Severe acute respiratory syndrome-related coronavirus
  REGION 1..8: note = Table A: HLA-C*14:02H HLA-C*14:03H HLA-B*46:01H HLA-C*04:01H HLA-C*04:03H HLA-C*15:05H HLA-C*08:02H HLA-B*39:01M HLA-C*05:01M
  source 1..8: note = Severe acute respiratory syndrome coronavirus 2
LFDESGEF

SEQ ID NO: 282 - protein, 8 aa, Severe acute respiratory syndrome-related coronavirus
  REGION 1..8: note = Table A: HLA-B*18:01H HLA-B*35:02H HLA-B*35:12H HLA-B*07:05H
  source 1..8: note = Severe acute respiratory syndrome coronavirus 2
DESGEFKL

SEQ ID NO: 283 - protein, 8 aa, Severe acute respiratory syndrome-related coronavirus
  REGION 1..8: note = Table A: HLA-B*15:03M
  source 1..8: note = Severe acute respiratory syndrome coronavirus 2
FKLASHMY

SEQ ID NO: 284 - protein, 8 aa, Severe acute respiratory syndrome-related coronavirus
  REGION 1..8: note = Table A: HLA-B*39:01H
  source 1..8: note = Severe acute respiratory syndrome coronavirus 2
EFEPSTQY

SEQ ID NO: 285 - protein, 8 aa, Severe acute respiratory syndrome-related coronavirus
  REGION 1..8: note = Table A: HLA-B*35:01M HLA-B*35:08H HLA-B*38:02H
  source 1..8: note = Severe acute respiratory syndrome coronavirus 2
EPSTQYEY

SEQ ID NO: 286 - protein, 8 aa, Severe acute respiratory syndrome-related coronavirus
  REGION 1..8: note = Table A: HLA-B*58:01H HLA-C*16:01H HLA-B*46:01H HLA-A*29:01H HLA-C*03:03H HLA-C*07:01H HLA-C*03:02H HLA-C*03:04H HLA-C*15:05M HLA-C*12:02H HLA-C*12:03H HLA-C*15:02M HLA-A*24:02H HLA-C*17:01M HLA-A*24:07H HLA-C*08:01H
  REGION 1..8: note = CONT. FROM ABOVE: HLA-A*23:01H HLA-B*38:02H HLA-B*15:01H HLA- B*15:02H HLA-B*15:03H HLA-B*39:01H HLA-B*07:05H HLA-B*57:03H HLA-C*02:02H HLA-B*13:01M HLA-B*13:02H HLA-C*07:04M
  source 1..8: note = Severe acute respiratory syndrome coronavirus 2
YQGKPLEF

SEQ ID NO: 287 - protein, 8 aa, Severe acute respiratory syndrome-related coronavirus
  REGION 1..8: note = Table A: HLA-B*18:01H HLA-B*40:06H HLA-B*07:05H HLA-B*50:01M
  source 1..8: note = Severe acute respiratory syndrome coronavirus 2
LEFGATSA

SEQ ID NO: 288 - protein, 8 aa, Severe acute respiratory syndrome-related coronavirus
  REGION 1..8: note = Table A: HLA-C*03:03H HLA-C*03:04H HLA-B*14:01H HLA-B*39:01H
  source 1..8: note = Severe acute respiratory syndrome coronavirus 2
FGATSAAL

SEQ ID NO: 289 - protein, 8 aa, Severe acute respiratory syndrome-related coronavirus
  REGION 1..8: note = Table A: HLA-B*58:02H HLA-C*15:05H
  source 1..8: note = Severe acute respiratory syndrome coronavirus 2
QTTTIQTI

SEQ ID NO: 290 - protein, 8 aa, Severe acute respiratory syndrome-related coronavirus
  REGION 1..8: note = Table A: HLA-C*15:05H HLA-B*35:02H HLA-B*35:12H
  source 1..8: note = Severe acute respiratory syndrome coronavirus 2
QPQLEMEL

SEQ ID NO: 291 - protein, 8 aa, Severe acute respiratory syndrome-related coronavirus
  REGION 1..8: note = Table A: HLA-B*51:01H HLA-B*52:01H HLA-B*57:03H
  source 1..8: note = Severe acute respiratory syndrome coronavirus 2
LTPVVQTI

SEQ ID NO: 292 - protein, 8 aa, Severe acute respiratory syndrome-related coronavirus
  REGION 1..8: note = Table A: HLA-C*15:05H
  source 1..8: note = Severe acute respiratory syndrome coronavirus 2
PVVQTIEV

SEQ ID NO: 293 - protein, 8 aa, Severe acute respiratory syndrome-related coronavirus
  REGION 1..8: note = Table A: HLA-A*25:01H
  source 1..8: note = Severe acute respiratory syndrome coronavirus 2
QTIEVNSF

SEQ ID NO: 294 - protein, 8 aa, Severe acute respiratory syndrome-related coronavirus
  REGION 1..8: note = Table A: HLA-A*26:03H
  source 1..8: note = Severe acute respiratory syndrome coronavirus 2
EVNSFSGY

SEQ ID NO: 295 - protein, 8 aa, Severe acute respiratory syndrome-related coronavirus
  REGION 1..8: note = Table A: HLA-A*11:01H HLA-A*11:02H HLA-A*36:01H HLA-A*34:02H
  source 1..8: note = Severe acute respiratory syndrome coronavirus 2
NSFSGYLK

SEQ ID NO: 296 - protein, 8 aa, Severe acute respiratory syndrome-related coronavirus
  REGION 1..8: note = Table A: HLA-A*36:01H
  source 1..8: note = Severe acute respiratory syndrome coronavirus 2
LTDNVYIK

SEQ ID NO: 297 - protein, 8 aa, Severe acute respiratory syndrome-related coronavirus
  REGION 1..8: note = Table A: HLA-B*08:01H HLA-B*55:01H HLA-B*07:04H
  source 1..8: note = Severe acute respiratory syndrome coronavirus 2
KVKPTVVV

SEQ ID NO: 298 - protein, 8 aa, Severe acute respiratory syndrome-related coronavirus
  REGION 1..8: note = Table A: HLA-B*56:01M HLA-B*55:02M HLA-C*15:05H HLA-B*55:01M HLA-B*39:06H HLA-B*54:01H HLA-B*07:05H
  source 1..8: note = Severe acute respiratory syndrome coronavirus 2
KPTVVVNA

SEQ ID NO: 299 - protein, 8 aa, Severe acute respiratory syndrome-related coronavirus
  REGION 1..8: note = Table A: HLA-B*15:01H HLA-B*15:02H
  source 1..8: note = Severe acute respiratory syndrome coronavirus 2
VVNAANVY

SEQ ID NO: 300 - protein, 8 aa, Severe acute respiratory syndrome-related coronavirus
  REGION 1..8: note = Table A: HLA-A*03:02H HLA-A*11:02H HLA-A*68:01H HLA-A*34:02H
  source 1..8: note = Severe acute respiratory syndrome coronavirus 2
NAANVYLK

SEQ ID NO: 301 - protein, 8 aa, Severe acute respiratory syndrome-related coronavirus
  REGION 1..8: note = Table A: HLA-C*15:05H HLA-B*14:01H HLA-C*08:03H HLA-B*39:01H
  source 1..8: note = Severe acute respiratory syndrome coronavirus 2
GGGVAGAL

SEQ ID NO: 302 - protein, 8 aa, Severe acute respiratory syndrome-related coronavirus
  REGION 1..8: note = Table A: HLA-A*03:02H
  source 1..8: note = Severe acute respiratory syndrome coronavirus 2
GVAGALNK

SEQ ID NO: 303 - protein, 8 aa, Severe acute respiratory syndrome-related coronavirus
  REGION 1..8: note = Table A: HLA-C*15:05H
  source 1..8: note = Severe acute respiratory syndrome coronavirus 2
ATNNAMQV

SEQ ID NO: 304 - protein, 8 aa, Severe acute respiratory syndrome-related coronavirus
  REGION 1..8: note = Table A: HLA-B*38:02H HLA-B*39:01H
  source 1..8: note = Severe acute respiratory syndrome coronavirus 2
MQVESDDY

SEQ ID NO: 305 - protein, 8 aa, Severe acute respiratory syndrome-related coronavirus
  REGION 1..8: note = Table A: HLA-C*03:04H
  source 1..8: note = Severe acute respiratory syndrome coronavirus 2
YIATNGPL

SEQ ID NO: 306 - protein, 8 aa, Severe acute respiratory syndrome-related coronavirus
  REGION 1..8: note = Table A: HLA-A*11:01H HLA-A*11:02H HLA-A*36:01H HLA-C*03:03H HLA-A*34:02H
  source 1..8: note = Severe acute respiratory syndrome coronavirus 2
IATNGPLK

SEQ ID NO: 307 - protein, 8 aa, Severe acute respiratory syndrome-related coronavirus
  REGION 1..8: note = Table A: HLA-A*29:01H HLA-C*15:05M HLA-C*15:02H HLA-B*13:02H
  source 1..8: note = Severe acute respiratory syndrome coronavirus 2
ATNGPLKV

SEQ ID NO: 308 - protein, 8 aa, Severe acute respiratory syndrome-related coronavirus
  REGION 1..8: note = Table A: HLA-B*08:01H
  source 1..8: note = Severe acute respiratory syndrome coronavirus 2
HNLAKHCL

SEQ ID NO: 309 - protein, 8 aa, Severe acute respiratory syndrome-related coronavirus
  REGION 1..8: note = Table A: HLA-B*14:01H HLA-B*38:01H HLA-B*38:02H HLA-B*39:06M HLA-B*39:01M HLA-B*15:10M
  source 1..8: note = Severe acute respiratory syndrome coronavirus 2
LHVVGPNV

SEQ ID NO: 310 - protein, 8 aa, Severe acute respiratory syndrome-related coronavirus
  REGION 1..8: note = Table A: HLA-A*11:303H HLA-A*03:01M HLA-A*03:02H HLA-A*11:01M HLA-A*11:02H HLA-A*36:01H HLA-A*30:02H HLA-A*68:01H HLA-A*34:02H HLA-C*07:27M
  source 1..8: note = Severe acute respiratory syndrome coronavirus 2
VVGPNVNK

SEQ ID NO: 311 - protein, 8 aa, Severe acute respiratory syndrome-related coronavirus
  REGION 1..8: note = Table A: HLA-B*38:02H HLA-B*15:01M HLA-B*15:02H HLA-B*15:03M
  source 1..8: note = Severe acute respiratory syndrome coronavirus 2
IQLLKSAY

SEQ ID NO: 312 - protein, 8 aa, Severe acute respiratory syndrome-related coronavirus
  REGION 1..8: note = Table A: HLA-A*68:02H
  source 1..8: note = Severe acute respiratory syndrome coronavirus 2
ENFNQHEV

SEQ ID NO: 313 - protein, 8 aa, Severe acute respiratory syndrome-related coronavirus
  REGION 1..8: note = Table A: HLA-C*14:02H HLA-B*08:01H HLA-B*14:02H
  source 1..8: note = Severe acute respiratory syndrome coronavirus 2
NFNQHEVL

SEQ ID NO: 314 - protein, 8 aa, Severe acute respiratory syndrome-related coronavirus
  REGION 1..8: note = Table A: HLA-B*39:06M
  source 1..8: note = Severe acute respiratory syndrome coronavirus 2
NQHEVLLA

SEQ ID NO: 315 - protein, 8 aa, Severe acute respiratory syndrome-related coronavirus
  REGION 1..8: note = Table A: HLA-B*38:02H
  source 1..8: note = Severe acute respiratory syndrome coronavirus 2
EVLLAPLL

SEQ ID NO: 316 - protein, 8 aa, Severe acute respiratory syndrome-related coronavirus
  REGION 1..8: note = Table A: HLA-A*02:03H
  source 1..8: note = Severe acute respiratory syndrome coronavirus 2
LLAPLLSA

SEQ ID NO: 317 - protein, 8 aa, Severe acute respiratory syndrome-related coronavirus
  REGION 1..8: note = Table A: HLA-C*15:05H HLA-B*07:05H
  source 1..8: note = Severe acute respiratory syndrome coronavirus 2
APLLSAGI

SEQ ID NO: 318 - protein, 8 aa, Severe acute respiratory syndrome-related coronavirus
  REGION 1..8: note = Table A: HLA-C*04:03H HLA-C*15:05H HLA-B*35:02H HLA-C*08:01H HLA-C*08:02H HLA-B*35:12H HLA-B*38:02H HLA-B*40:01H HLA-B*40:02H
  source 1..8: note = Severe acute respiratory syndrome coronavirus 2
GADPIHSL

SEQ ID NO: 319 - protein, 8 aa, Severe acute respiratory syndrome-related coronavirus
  REGION 1..8: note = Table A: HLA-C*15:05H HLA-B*51:01H HLA-B*54:01H
  source 1..8: note = Severe acute respiratory syndrome coronavirus 2
DPIHSLRV

SEQ ID NO: 320 - protein, 8 aa, Severe acute respiratory syndrome-related coronavirus
  REGION 1..8: note = Table A: HLA-B*37:01H
  source 1..8: note = Severe acute respiratory syndrome coronavirus 2
VDTVRTNV

SEQ ID NO: 321 - protein, 8 aa, Severe acute respiratory syndrome-related coronavirus
  REGION 1..8: note = Table A: HLA-B*18:01H HLA-B*35:01H HLA-B*38:02H HLA-B*15:02M
  source 1..8: note = Severe acute respiratory syndrome coronavirus 2
DTVRTNVY

SEQ ID NO: 322 - protein, 8 aa, Severe acute respiratory syndrome-related coronavirus
  REGION 1..8: note = Table A: HLA-C*15:02H
  source 1..8: note = Severe acute respiratory syndrome coronavirus 2
RTNVYLAV

SEQ ID NO: 323 - protein, 8 aa, Severe acute respiratory syndrome-related coronavirus
  REGION 1..8: note = Table A: HLA-B*46:01H HLA-B*18:01H HLA-B*37:01H HLA-B*40:02H HLA-B*15:01H HLA-B*07:05H HLA-B*41:02H
  source 1..8: note = Severe acute respiratory syndrome coronavirus 2
YDKLVSSF

SEQ ID NO: 324 - protein, 8 aa, Severe acute respiratory syndrome-related coronavirus
  REGION 1..8: note = Table A: HLA-C*15:05H
  source 1..8: note = Severe acute respiratory syndrome coronavirus 2
LVSSFLEM

SEQ ID NO: 325 - protein, 8 aa, Severe acute respiratory syndrome-related coronavirus
  REGION 1..8: note = Table A: HLA-A*36:01H
  source 1..8: note = Severe acute respiratory syndrome coronavirus 2
VSSFLEMK

SEQ ID NO: 326 - protein, 8 aa, Severe acute respiratory syndrome-related coronavirus
  REGION 1..8: note = Table A: HLA-B*44:05H HLA-B*18:01H HLA-B*52:01M HLA-B*37:01H HLA-B*40:02H HLA-B*07:05H HLA-B*41:02H HLA-B*49:01M
  source 1..8: note = Severe acute respiratory syndrome coronavirus 2
VEQKIAEI

SEQ ID NO: 327 - protein, 8 aa, Severe acute respiratory syndrome-related coronavirus
  REGION 1..8: note = Table A: HLA-B*45:01M HLA-B*40:02M HLA-B*41:02M HLA-B*49:01M HLA-B*50:01H
  source 1..8: note = Severe acute respiratory syndrome coronavirus 2
AEIPKEEV

SEQ ID NO: 328 - protein, 8 aa, Severe acute respiratory syndrome-related coronavirus
  REGION 1..8: note = Table A: HLA-B*18:01H HLA-B*37:01H HLA-B*40:01M HLA-B*40:02H HLA-B*07:05H HLA-B*41:02M HLA-B*49:01H
  source 1..8: note = Severe acute respiratory syndrome coronavirus 2
VEEVTTTL

SEQ ID NO: 329 - protein, 8 aa, Severe acute respiratory syndrome-related coronavirus
  REGION 1..8: note = Table A: HLA-A*36:01H
  source 1..8: note = Severe acute respiratory syndrome coronavirus 2
LTENLLLY

SEQ ID NO: 330 - protein, 8 aa, Severe acute respiratory syndrome-related coronavirus
  REGION 1..8: note = Table A: HLA-B*49:01H
  source 1..8: note = Severe acute respiratory syndrome coronavirus 2
TENLLLYI

SEQ ID NO: 331 - protein, 8 aa, Severe acute respiratory syndrome-related coronavirus
  REGION 1..8: note = Table A: HLA-C*04:03M HLA-C*08:02H HLA-C*05:01H
  source 1..8: note = Severe acute respiratory syndrome coronavirus 2
YIDINGNL

SEQ ID NO: 332 - protein, 8 aa, Severe acute respiratory syndrome-related coronavirus
  REGION 1..8: note = Table A: HLA-B*39:01H HLA-B*15:10H
  source 1..8: note = Severe acute respiratory syndrome coronavirus 2
LHPDSATL

SEQ ID NO: 333 - protein, 8 aa, Severe acute respiratory syndrome-related coronavirus
  REGION 1..8: note = Table A: HLA-C*15:05H HLA-B*51:01H
  source 1..8: note = Severe acute respiratory syndrome coronavirus 2
HPDSATLV

SEQ ID NO: 334 - protein, 8 aa, Severe acute respiratory syndrome-related coronavirus
  REGION 1..8: note = Table A: HLA-C*04:03H HLA-C*08:02H HLA-C*05:01H
  source 1..8: note = Severe acute respiratory syndrome coronavirus 2
VSDIDITF

SEQ ID NO: 335 - protein, 8 aa, Severe acute respiratory syndrome-related coronavirus
  REGION 1..8: note = Table A: HLA-B*44:05H HLA-B*40:01H HLA-B*40:02M HLA-B*41:02H
  source 1..8: note = Severe acute respiratory syndrome coronavirus 2
SDIDITFL

SEQ ID NO: 336 - protein, 8 aa, Severe acute respiratory syndrome-related coronavirus
  REGION 1..8: note = Table A: HLA-A*36:01M HLA-A*34:02H
  source 1..8: note = Severe acute respiratory syndrome coronavirus 2
DIDITFLK

SEQ ID NO: 337 - protein, 8 aa, Severe acute respiratory syndrome-related coronavirus
  REGION 1..8: note = Table A: HLA-A*36:01H
  source 1..8: note = Severe acute respiratory syndrome coronavirus 2
IDITFLKK

SEQ ID NO: 338 - protein, 8 aa, Severe acute respiratory syndrome-related coronavirus
  REGION 1..8: note = Table A: HLA-C*15:05H HLA-B*51:01H
  source 1..8: note = Severe acute respiratory syndrome coronavirus 2
APYIVGDV

SEQ ID NO: 339 - protein, 8 aa, Severe acute respiratory syndrome-related coronavirus
  REGION 1..8: note = Table A: HLA-B*39:01H
  source 1..8: note = Severe acute respiratory syndrome coronavirus 2
PYIVGDVV

SEQ ID NO: 340 - protein, 8 aa, Severe acute respiratory syndrome-related coronavirus
  REGION 1..8: note = Table A: HLA-B*35:02M HLA-B*35:12H
  source 1..8: note = Severe acute respiratory syndrome coronavirus 2
DVVQEGVL

SEQ ID NO: 341 - protein, 8 aa, Severe acute respiratory syndrome-related coronavirus
  REGION 1..8: note = Table A: HLA-B*07:05H HLA-B*49:01M
  source 1..8: note = Severe acute respiratory syndrome coronavirus 2
QEGVLTAV

SEQ ID NO: 342 - protein, 8 aa, Severe acute respiratory syndrome-related coronavirus
  REGION 1..8: note = Table A: HLA-A*11:01H HLA-A*11:02H HLA-A*34:02H HLA-B*51:01H HLA-B*54:01H
  source 1..8: note = Severe acute respiratory syndrome coronavirus 2
TAVVIPTK

SEQ ID NO: 343 - protein, 8 aa, Severe acute respiratory syndrome-related coronavirus
  REGION 1..8: note = Table A: HLA-A*11:303H HLA-A*03:02H HLA-A*11:01H HLA-A*11:02M HLA-C*07:27H
  source 1..8: note = Severe acute respiratory syndrome coronavirus 2
AVVIPTKK

SEQ ID NO: 344 - protein, 8 aa, Severe acute respiratory syndrome-related coronavirus
  REGION 1..8: note = Table A: HLA-C*15:05H
  source 1..8: note = Severe acute respiratory syndrome coronavirus 2
KAGGTTEM

SEQ ID NO: 345 - protein, 8 aa, Severe acute respiratory syndrome-related coronavirus
  REGION 1..8: note = Table A: HLA-A*03:01H HLA-A*11:01H HLA-A*11:02H HLA-A*36:01H HLA-A*34:02H HLA-C*07:27H
  source 1..8: note = Severe acute respiratory syndrome coronavirus 2
GTTEMLAK

SEQ ID NO: 346 - protein, 8 aa, Severe acute respiratory syndrome-related coronavirus
  REGION 1..8: note = Table A: HLA-B*44:02H HLA-B*44:05M HLA-B*44:03H HLA-B*18:01H HLA-B*37:01H HLA-B*40:01H HLA-B*40:02M HLA-B*07:05H HLA-B*41:02H HLA-B*49:01H
  source 1..8: note = Severe acute respiratory syndrome coronavirus 2
TEMLAKAL

SEQ ID NO: 347 - protein, 8 aa, Severe acute respiratory syndrome-related coronavirus
  REGION 1..8: note = Table A: HLA-B*15:03H
  source 1..8: note = Severe acute respiratory syndrome coronavirus 2
RKVPTDNY

SEQ ID NO: 348 - protein, 8 aa, Severe acute respiratory syndrome-related coronavirus
  REGION 1..8: note = Table A: HLA-B*18:01H HLA-B*07:05H
  source 1..8: note = Severe acute respiratory syndrome coronavirus 2
TDNYITTY

SEQ ID NO: 349 - protein, 8 aa, Severe acute respiratory syndrome-related coronavirus
  REGION 1..8: note = Table A: HLA-C*03:03H HLA-C*03:04H HLA-C*15:05H HLA-C*08:03H
  source 1..8: note = Severe acute respiratory syndrome coronavirus 2
TTYPGQGL

SEQ ID NO: 350 - protein, 8 aa, Severe acute respiratory syndrome-related coronavirus
  REGION 1..8: note = Table A: HLA-B*39:06H
  source 1..8: note = Severe acute respiratory syndrome coronavirus 2
NGYTVEEA

SEQ ID NO: 351 - protein, 8 aa, Severe acute respiratory syndrome-related coronavirus
  REGION 1..8: note = Table A: HLA-B*40:01H HLA-B*40:02H HLA-B*41:02M
  source 1..8: note = Severe acute respiratory syndrome coronavirus 2
VEEAKTVL

SEQ ID NO: 352 - protein, 8 aa, Severe acute respiratory syndrome-related coronavirus
  REGION 1..8: note = Table A: HLA-A*34:02H
  source 1..8: note = Severe acute respiratory syndrome coronavirus 2
EAKTVLKK

SEQ ID NO: 353 - protein, 8 aa, Severe acute respiratory syndrome-related coronavirus
  REGION 1..8: note = Table A: HLA-B*52:01M
  source 1..8: note = Severe acute respiratory syndrome coronavirus 2
AFYILPSI

SEQ ID NO: 354 - protein, 8 aa, Severe acute respiratory syndrome-related coronavirus
  REGION 1..8: note = Table A: HLA-B*58:02H HLA-C*16:01H
  source 1..8: note = Severe acute respiratory syndrome coronavirus 2
ISNEKQEI

SEQ ID NO: 355 - protein, 8 aa, Severe acute respiratory syndrome-related coronavirus
  REGION 1..8: note = Table A: HLA-B*58:02H HLA-C*03:02H
  source 1..8: note = Severe acute respiratory syndrome coronavirus 2
VSWNLREM

SEQ ID NO: 356 - protein, 8 aa, Severe acute respiratory syndrome-related coronavirus
  REGION 1..8: note = Table A: HLA-B*58:02H HLA-B*35:02H
  source 1..8: note = Severe acute respiratory syndrome coronavirus 2
HAEETRKL

SEQ ID NO: 357 - protein, 8 aa, Severe acute respiratory syndrome-related coronavirus
  REGION 1..8: note = Table A: HLA-B*41:02H
  source 1..8: note = Severe acute respiratory syndrome coronavirus 2
AEETRKLM

SEQ ID NO: 358 - protein, 8 aa, Severe acute respiratory syndrome-related coronavirus
  REGION 1..8: note = Table A: HLA-B*52:01H
  source 1..8: note = Severe acute respiratory syndrome coronavirus 2
TKAIVSTI

SEQ ID NO: 359 - protein, 8 aa, Severe acute respiratory syndrome-related coronavirus
  REGION 1..8: note = Table A: HLA-A*74:01H HLA-A*11:02H HLA-A*68:01H
  source 1..8: note = Severe acute respiratory syndrome coronavirus 2
AIVSTIQR

SEQ ID NO: 360 - protein, 8 aa, Severe acute respiratory syndrome-related coronavirus
  REGION 1..8: note = Table A: HLA-A*03:02H HLA-A*11:02H
  source 1..8: note = Severe acute respiratory syndrome coronavirus 2
IVSTIQRK

SEQ ID NO: 361 - protein, 8 aa, Severe acute respiratory syndrome-related coronavirus
  REGION 1..8: note = Table A: HLA-B*58:01H HLA-B*58:02M HLA-C*16:01H
  source 1..8: note = Severe acute respiratory syndrome coronavirus 2
VSTIQRKY

SEQ ID NO: 362 - protein, 8 aa, Severe acute respiratory syndrome-related coronavirus
  REGION 1..8: note = Table A: HLA-B*52:01H
  source 1..8: note = Severe acute respiratory syndrome coronavirus 2
IQRKYKGI

SEQ ID NO: 363 - protein, 8 aa, Severe acute respiratory syndrome-related coronavirus
  REGION 1..8: note = Table A: HLA-B*15:03H
  source 1..8: note = Severe acute respiratory syndrome coronavirus 2
RKYKGIKI

SEQ ID NO: 364 - protein, 8 aa, Severe acute respiratory syndrome-related coronavirus
  REGION 1..8: note = Table A: HLA-B*15:01H HLA-B*39:01H
  source 1..8: note = Severe acute respiratory syndrome coronavirus 2
IQEGVVDY

SEQ ID NO: 365 - protein, 8 aa, Severe acute respiratory syndrome-related coronavirus
  REGION 1..8: note = Table A: HLA-C*04:03M HLA-C*05:01H
  source 1..8: note = Severe acute respiratory syndrome coronavirus 2
VVDYGARF

SEQ ID NO: 366 - protein, 8 aa, Severe acute respiratory syndrome-related coronavirus
  REGION 1..8: note = Table A: HLA-C*14:03H HLA-B*52:01H
  source 1..8: note = Severe acute respiratory syndrome coronavirus 2
YFYTSKTT

SEQ ID NO: 367 - protein, 8 aa, Severe acute respiratory syndrome-related coronavirus
  REGION 1..8: note = Table A: HLA-B*48:01H
  source 1..8: note = Severe acute respiratory syndrome coronavirus 2
SKTTVASL

SEQ ID NO: 368 - protein, 8 aa, Severe acute respiratory syndrome-related coronavirus
  REGION 1..8: note = Table A: HLA-B*58:01M HLA-B*58:02M HLA-B*57:03H
  source 1..8: note = Severe acute respiratory syndrome coronavirus 2
KTTVASLI

SEQ ID NO: 369 - protein, 8 aa, Severe acute respiratory syndrome-related coronavirus
  REGION 1..8: note = Table A: HLA-C*15:05H
  source 1..8: note = Severe acute respiratory syndrome coronavirus 2
VASLINTL

SEQ ID NO: 370 - protein, 8 aa, Severe acute respiratory syndrome-related coronavirus
  REGION 1..8: note = Table A: HLA-C*08:02M
  source 1..8: note = Severe acute respiratory syndrome coronavirus 2
LNDLNETL

SEQ ID NO: 371 - protein, 8 aa, Severe acute respiratory syndrome-related coronavirus
  REGION 1..8: note = Table A: HLA-A*36:01H
  source 1..8: note = Severe acute respiratory syndrome coronavirus 2
LVTMPLGY

SEQ ID NO: 372 - protein, 8 aa, Severe acute respiratory syndrome-related coronavirus
  REGION 1..8: note = Table A: HLA-B*08:01H HLA-A*02:11H HLA-B*14:01H
  source 1..8: note = Severe acute respiratory syndrome coronavirus 2
LGYVTHGL

SEQ ID NO: 373 - protein, 8 aa, Severe acute respiratory syndrome-related coronavirus
  REGION 1..8: note = Table A: HLA-C*03:04H HLA-C*17:01H
  source 1..8: note = Severe acute respiratory syndrome coronavirus 2
YVTHGLNL

SEQ ID NO: 374 - protein, 8 aa, Severe acute respiratory syndrome-related coronavirus
  REGION 1..8: note = Table A: HLA-B*39:06H
  source 1..8: note = Severe acute respiratory syndrome coronavirus 2
HGLNLEEA

SEQ ID NO: 375 - protein, 8 aa, Severe acute respiratory syndrome-related coronavirus
  REGION 1..8: note = Table A: HLA-B*18:01H
  source 1..8: note = Severe acute respiratory syndrome coronavirus 2
LEEAARYM

SEQ ID NO: 376 - protein, 8 aa, Severe acute respiratory syndrome-related coronavirus
  REGION 1..8: note = Table A: HLA-B*07:04H
  source 1..8: note = Severe acute respiratory syndrome coronavirus 2
AARYMRSL

SEQ ID NO: 377 - protein, 8 aa, Severe acute respiratory syndrome-related coronavirus
  REGION 1..8: note = Table A: HLA-B*08:01H HLA-A*02:11H HLA-B*14:01H HLA-A*02:03M HLA-B*52:01H HLA-C*08:03H HLA-B*38:02M HLA-B*41:02H HLA-B*13:02H
  source 1..8: note = Severe acute respiratory syndrome coronavirus 2
SLKVPATV

SEQ ID NO: 378 - protein, 8 aa, Severe acute respiratory syndrome-related coronavirus
  REGION 1..8: note = Table A: HLA-B*18:01H HLA-C*15:05H HLA-B*35:01M HLA-B*35:08M HLA-B*35:07H HLA-B*38:02H HLA-B*07:05M
  source 1..8: note = Severe acute respiratory syndrome coronavirus 2
SPDAVTAY

SEQ ID NO: 379 - protein, 8 aa, Severe acute respiratory syndrome-related coronavirus
  REGION 1..8: note = Table A: HLA-B*18:01H HLA-B*07:05H HLA-B*49:01H
  source 1..8: note = Severe acute respiratory syndrome coronavirus 2
EEHFIETI

SEQ ID NO: 380 - protein, 8 aa, Severe acute respiratory syndrome-related coronavirus
  REGION 1..8: note = Table A: HLA-C*14:02M HLA-C*14:03M HLA-B*52:01H HLA-B*15:02H
  source 1..8: note = Severe acute respiratory syndrome coronavirus 2
HFIETISL

SEQ ID NO: 381 - protein, 8 aa, Severe acute respiratory syndrome-related coronavirus
  REGION 1..8: note = Table A: HLA-B*58:01H HLA-A*36:01H HLA-A*30:02H HLA-B*38:02H HLA-B*15:01H
  source 1..8: note = Severe acute respiratory syndrome coronavirus 2
GSYKDWSY

SEQ ID NO: 382 - protein, 8 aa, Severe acute respiratory syndrome-related coronavirus
  REGION 1..8: note = Table A: HLA-B*58:01H HLA-A*29:01H HLA-C*03:03H HLA-C*03:04H HLA-C*15:05M HLA-C*15:02H HLA-C*17:01H HLA-C*08:01H HLA-C*08:03H HLA-B*39:01H
  source 1..8: note = Severe acute respiratory syndrome coronavirus 2
YSGQSTQL

SEQ ID NO: 383 - protein, 8 aa, Severe acute respiratory syndrome-related coronavirus
  REGION 1..8: note = Table A: HLA-B*52:01H HLA-B*13:02M
  source 1..8: note = Severe acute respiratory syndrome coronavirus 2
GQSTQLGI

SEQ ID NO: 384 - protein, 8 aa, Severe acute respiratory syndrome-related coronavirus
  REGION 1..8: note = Table A: HLA-A*36:01H
  source 1..8: note = Severe acute respiratory syndrome coronavirus 2
QLGIEFLK

SEQ ID NO: 385 - protein, 8 aa, Severe acute respiratory syndrome-related coronavirus
  REGION 1..8: note = Table A: HLA-A*36:01M
  source 1..8: note = Severe acute respiratory syndrome coronavirus 2
RGDKSVYY

SEQ ID NO: 386 - protein, 8 aa, Severe acute respiratory syndrome-related coronavirus
  REGION 1..8: note = Table A: HLA-B*58:01H HLA-C*15:05M HLA-B*57:03H HLA-C*07:04H
  source 1..8: note = Severe acute respiratory syndrome coronavirus 2
YTSNPTTF

SEQ ID NO: 387 - protein, 8 aa, Severe acute respiratory syndrome-related coronavirus
  REGION 1..8: note = Table A: HLA-B*38:02H HLA-B*15:10H
  source 1..8: note = Severe acute respiratory syndrome coronavirus 2
FHLDGEVI

SEQ ID NO: 388 - protein, 8 aa, Severe acute respiratory syndrome-related coronavirus
  REGION 1..8: note = Table A: HLA-B*37:01H
  source 1..8: note = Severe acute respiratory syndrome coronavirus 2
LDGEVITF

SEQ ID NO: 389 - protein, 8 aa, Severe acute respiratory syndrome-related coronavirus
  REGION 1..8: note = Table A: HLA-A*68:02H
  source 1..8: note = Severe acute respiratory syndrome coronavirus 2
EVITFDNL

SEQ ID NO: 390 - protein, 8 aa, Severe acute respiratory syndrome-related coronavirus
  REGION 1..8: note = Table A: HLA-C*04:01H
  source 1..8: note = Severe acute respiratory syndrome coronavirus 2
TFDNLKTL

SEQ ID NO: 391 - protein, 8 aa, Severe acute respiratory syndrome-related coronavirus
  REGION 1..8: note = Table A: HLA-B*08:01H HLA-B*37:01M HLA-B*41:02H HLA-C*07:04H
  source 1..8: note = Severe acute respiratory syndrome coronavirus 2
FDNLKTLL

SEQ ID NO: 392 - protein, 8 aa, Severe acute respiratory syndrome-related coronavirus
  REGION 1..8: note = Table A: HLA-B*08:01H
  source 1..8: note = Severe acute respiratory syndrome coronavirus 2
NLKTLLSL

SEQ ID NO: 393 - protein, 8 aa, Severe acute respiratory syndrome-related coronavirus
  REGION 1..8: note = Table A: HLA-B*38:02H
  source 1..8: note = Severe acute respiratory syndrome coronavirus 2
TLLSLREV

SEQ ID NO: 394 - protein, 8 aa, Severe acute respiratory syndrome-related coronavirus
  REGION 1..8: note = Table A: HLA-A*02:03H HLA-B*52:01M HLA-B*38:02H
  source 1..8: note = Severe acute respiratory syndrome coronavirus 2
SLREVRTI

SEQ ID NO: 395 - protein, 8 aa, Severe acute respiratory syndrome-related coronavirus
  REGION 1..8: note = Table A: HLA-B*40:02H HLA-B*49:01M
  source 1..8: note = Severe acute respiratory syndrome coronavirus 2
REVRTIKV

SEQ ID NO: 396 - protein, 8 aa, Severe acute respiratory syndrome-related coronavirus
  REGION 1..8: note = Table A: HLA-B*15:02H
  source 1..8: note = Severe acute respiratory syndrome coronavirus 2
EVRTIKVF

SEQ ID NO: 397 - protein, 8 aa, Severe acute respiratory syndrome-related coronavirus
  REGION 1..8: note = Table A: HLA-B*08:01H HLA-A*02:03H HLA-B*52:01H HLA-B*38:02H HLA-B*41:02H
  source 1..8: note = Severe acute respiratory syndrome coronavirus 2
TIKVFTTV

SEQ ID NO: 398 - protein, 8 aa, Severe acute respiratory syndrome-related coronavirus
  REGION 1..8: note = Table A: HLA-B*08:01H
  source 1..8: note = Severe acute respiratory syndrome coronavirus 2
NINLHTQV

SEQ ID NO: 399 - protein, 8 aa, Severe acute respiratory syndrome-related coronavirus
  REGION 1..8: note = Table A: HLA-B*39:01H HLA-B*15:10H
  source 1..8: note = Severe acute respiratory syndrome coronavirus 2
LHTQVVDM

SEQ ID NO: 400 - protein, 8 aa, Severe acute respiratory syndrome-related coronavirus
  REGION 1..8: note = Table A: HLA-B*35:02H HLA-B*38:02H HLA-B*15:01H HLA-B*15:02H HLA-B*39:01H
  source 1..8: note = Severe acute respiratory syndrome coronavirus 2
TQVVDMSM

SEQ ID NO: 401 - protein, 8 aa, Severe acute respiratory syndrome-related coronavirus
  REGION 1..8: note = Table A: HLA-B*58:01H HLA-A*03:01H HLA-A*36:01M HLA-A*01:01M HLA-B*38:02H
  source 1..8: note = Severe acute respiratory syndrome coronavirus 2
VVDMSMTY

SEQ ID NO: 402 - protein, 8 aa, Severe acute respiratory syndrome-related coronavirus
  REGION 1..8: note = Table A: HLA-B*07:05H
  source 1..8: note = Severe acute respiratory syndrome coronavirus 2
SMTYGQQF

SEQ ID NO: 403 - protein, 8 aa, Severe acute respiratory syndrome-related coronavirus
  REGION 1..8: note = Table A: HLA-A*30:02H HLA-B*15:01M HLA-B*15:03M HLA-B*39:01H
  source 1..8: note = Severe acute respiratory syndrome coronavirus 2
GQQFGPTY

SEQ ID NO: 404 - protein, 8 aa, Severe acute respiratory syndrome-related coronavirus
  REGION 1..8: note = Table A: HLA-B*52:01H HLA-B*38:02H HLA-B*39:01H
  source 1..8: note = Severe acute respiratory syndrome coronavirus 2
QQFGPTYL

SEQ ID NO: 405 - protein, 8 aa, Severe acute respiratory syndrome-related coronavirus
  REGION 1..8: note = Table A: HLA-C*15:05H HLA-B*51:01H
  source 1..8: note = Severe acute respiratory syndrome coronavirus 2
DGADVTKI

SEQ ID NO: 406 - protein, 8 aa, Severe acute respiratory syndrome-related coronavirus
  REGION 1..8: note = Table A: HLA-B*49:01M
  source 1..8: note = Severe acute respiratory syndrome coronavirus 2
HEGKTFYV

SEQ ID NO: 407 - protein, 8 aa, Severe acute respiratory syndrome-related coronavirus
  REGION 1..8: note = Table A: HLA-B*08:01H
  source 1..8: note = Severe acute respiratory syndrome coronavirus 2
EGKTFYVL

SEQ ID NO: 408 - protein, 8 aa, Severe acute respiratory syndrome-related coronavirus
  REGION 1..8: note = Table A: HLA-C*15:05H
  source 1..8: note = Severe acute respiratory syndrome coronavirus 2
PNDDTLRV

SEQ ID NO: 409 - protein, 8 aa, Severe acute respiratory syndrome-related coronavirus
  REGION 1..8: note = Table A: HLA-A*25:01H HLA-B*18:01H HLA-B*38:02H HLA-B*15:02H HLA-B*07:05H
  source 1..8: note = Severe acute respiratory syndrome coronavirus 2
DTLRVEAF

SEQ ID NO: 410 - protein, 8 aa, Severe acute respiratory syndrome-related coronavirus
  REGION 1..8: note = Table A: HLA-A*36:01M
  source 1..8: note = Severe acute respiratory syndrome coronavirus 2
RVEAFEYY

SEQ ID NO: 411 - protein, 8 aa, Severe acute respiratory syndrome-related coronavirus
  REGION 1..8: note = Table A: HLA-B*38:01M HLA-B*38:02M HLA-B*39:06H HLA-B*39:01M HLA-B*15:10H
  source 1..8: note = Severe acute respiratory syndrome coronavirus 2
YHTTDPSF

SEQ ID NO: 412 - protein, 8 aa, Severe acute respiratory syndrome-related coronavirus
  REGION 1..8: note = Table A: HLA-C*15:05H HLA-C*15:02H HLA-C*17:01H HLA-C*08:03H
  source 1..8: note = Severe acute respiratory syndrome coronavirus 2
HTTDPSFL

SEQ ID NO: 413 - protein, 8 aa, Severe acute respiratory syndrome-related coronavirus
  REGION 1..8: note = Table A: HLA-A*36:01H
  source 1..8: note = Severe acute respiratory syndrome coronavirus 2
TTDPSFLG

SEQ ID NO: 414 - protein, 8 aa, Severe acute respiratory syndrome-related coronavirus
  REGION 1..8: note = Table A: HLA-B*58:02H HLA-C*15:05H
  source 1..8: note = Severe acute respiratory syndrome coronavirus 2
PSFLGRYM

SEQ ID NO: 415 - protein, 8 aa, Severe acute respiratory syndrome-related coronavirus
  REGION 1..8: note = Table A: HLA-C*04:03H HLA-C*08:02M HLA-C*05:01H
  source 1..8: note = Severe acute respiratory syndrome coronavirus 2
WADNNCYL

SEQ ID NO: 416 - protein, 8 aa, Severe acute respiratory syndrome-related coronavirus
  REGION 1..8: note = Table A: HLA-B*15:02H
  source 1..8: note = Severe acute respiratory syndrome coronavirus 2
NCYLATAL

SEQ ID NO: 417 - protein, 8 aa, Severe acute respiratory syndrome-related coronavirus
  REGION 1..8: note = Table A: HLA-C*03:02H HLA-C*15:05H
  source 1..8: note = Severe acute respiratory syndrome coronavirus 2
LATALLTL

SEQ ID NO: 418 - protein, 8 aa, Severe acute respiratory syndrome-related coronavirus
  REGION 1..8: note = Table A: HLA-A*02:04H
  source 1..8: note = Severe acute respiratory syndrome coronavirus 2
ALLTLQQI

SEQ ID NO: 419 - protein, 8 aa, Severe acute respiratory syndrome-related coronavirus
  REGION 1..8: note = Table A: HLA-B*45:01H HLA-B*40:06H HLA-B*50:01M
  source 1..8: note = Severe acute respiratory syndrome coronavirus 2
IELKFNPP

SEQ ID NO: 420 - protein, 8 aa, Severe acute respiratory syndrome-related coronavirus
  REGION 1..8: note = Table A: HLA-B*48:01H HLA-B*15:03H
  source 1..8: note = Severe acute respiratory syndrome coronavirus 2
LKFNPPAL

SEQ ID NO: 421 - protein, 8 aa, Severe acute respiratory syndrome-related coronavirus
  REGION 1..8: note = Table A: HLA-B*35:01H HLA-B*35:07H
  source 1..8: note = Severe acute respiratory syndrome coronavirus 2
PPALQDAY

SEQ ID NO: 422 - protein, 8 aa, Severe acute respiratory syndrome-related coronavirus
  REGION 1..8: note = Table A: HLA-B*58:01M HLA-B*58:02H HLA-C*15:05H HLA-B*57:03M
  source 1..8: note = Severe acute respiratory syndrome coronavirus 2
RAGEAANF

SEQ ID NO: 423 - protein, 8 aa, Severe acute respiratory syndrome-related coronavirus
  REGION 1..8: note = Table A: HLA-B*38:02H HLA-B*15:02H
  source 1..8: note = Severe acute respiratory syndrome coronavirus 2
FCALILAY

SEQ ID NO: 424 - protein, 8 aa, Severe acute respiratory syndrome-related coronavirus
  REGION 1..8: note = Table A: HLA-B*51:01H
  source 1..8: note = Severe acute respiratory syndrome coronavirus 2
LAYCNKTV

SEQ ID NO: 425 - protein, 8 aa, Severe acute respiratory syndrome-related coronavirus
  REGION 1..8: note = Table A: HLA-B*38:02M HLA-B*15:02H
  source 1..8: note = Severe acute respiratory syndrome coronavirus 2
DVRETMSY

SEQ ID NO: 426 - protein, 8 aa, Severe acute respiratory syndrome-related coronavirus
  REGION 1..8: note = Table A: HLA-B*37:01H
  source 1..8: note = Severe acute respiratory syndrome coronavirus 2
RETMSYLF

SEQ ID NO: 427 - protein, 8 aa, Severe acute respiratory syndrome-related coronavirus
  REGION 1..8: note = Table A: HLA-B*54:01H
  source 1..8: note = Severe acute respiratory syndrome coronavirus 2
MSYLFQHA

SEQ ID NO: 428 - protein, 8 aa, Severe acute respiratory syndrome-related coronavirus
  REGION 1..8: note = Table A: HLA-B*08:01H HLA-A*02:11M HLA-B*14:02H HLA-A*02:04H HLA-B*14:01H HLA-A*02:02M HLA-B*38:02H
  source 1..8: note = Severe acute respiratory syndrome coronavirus 2
YLFQHANL

SEQ ID NO: 429 - protein, 8 aa, Severe acute respiratory syndrome-related coronavirus
  REGION 1..8: note = Table A: HLA-B*39:06H
  source 1..8: note = Severe acute respiratory syndrome coronavirus 2
QHANLDSC

SEQ ID NO: 430 - protein, 8 aa, Severe acute respiratory syndrome-related coronavirus
  REGION 1..8: note = Table A: HLA-A*11:02H
  source 1..8: note = Severe acute respiratory syndrome coronavirus 2
RVLNVVCK

SEQ ID NO: 431 - protein, 8 aa, Severe acute respiratory syndrome-related coronavirus
  REGION 1..8: note = Table A: HLA-A*03:02H
  source 1..8: note = Severe acute respiratory syndrome coronavirus 2
GQQQTTLK

SEQ ID NO: 432 - protein, 8 aa, Severe acute respiratory syndrome-related coronavirus
  REGION 1..8: note = Table A: HLA-B*52:01H HLA-B*13:02H
  source 1..8: note = Severe acute respiratory syndrome coronavirus 2
QQTTLKGV

SEQ ID NO: 433 - protein, 8 aa, Severe acute respiratory syndrome-related coronavirus
  REGION 1..8: note = Table A: HLA-A*02:03H
  source 1..8: note = Severe acute respiratory syndrome coronavirus 2
TLKGVEAV

SEQ ID NO: 434 - protein, 8 aa, Severe acute respiratory syndrome-related coronavirus
  REGION 1..8: note = Table A: HLA-B*58:01H HLA-B*15:01H HLA-B*15:03H HLA-B*07:05H
  source 1..8: note = Severe acute respiratory syndrome coronavirus 2
KGVEAVMY

SEQ ID NO: 435 - protein, 8 aa, Severe acute respiratory syndrome-related coronavirus
  REGION 1..8: note = Table A: HLA-C*15:05H
  source 1..8: note = Severe acute respiratory syndrome coronavirus 2
AVMYMGTL

SEQ ID NO: 436 - protein, 8 aa, Severe acute respiratory syndrome-related coronavirus
  REGION 1..8: note = Table A: HLA-C*14:03H HLA-A*29:02H HLA-A*30:02H HLA-B*15:02H
  source 1..8: note = Severe acute respiratory syndrome coronavirus 2
MYMGTLSY

SEQ ID NO: 437 - protein, 8 aa, Severe acute respiratory syndrome-related coronavirus
  REGION 1..8: note = Table A: HLA-B*49:01H
  source 1..8: note = Severe acute respiratory syndrome coronavirus 2
YEQFKKGV

SEQ ID NO: 438 - protein, 8 aa, Severe acute respiratory syndrome-related coronavirus
  REGION 1..8: note = Table A: HLA-B*52:01H
  source 1..8: note = Severe acute respiratory syndrome coronavirus 2
QFKKGVQI

SEQ ID NO: 439 - protein, 8 aa, Severe acute respiratory syndrome-related coronavirus
  REGION 1..8: note = Table A: HLA-B*13:02M
  source 1..8: note = Severe acute respiratory syndrome coronavirus 2
KQATKYLV

SEQ ID NO: 440 - protein, 8 aa, Severe acute respiratory syndrome-related coronavirus
  REGION 1..8: note = Table A: HLA-B*52:01M HLA-B*13:02M
  source 1..8: note = Severe acute respiratory syndrome coronavirus 2
VQQESPFV

SEQ ID NO: 441 - protein, 8 aa, Severe acute respiratory syndrome-related coronavirus
  REGION 1..8: note = Table A: HLA-B*39:01H
  source 1..8: note = Severe acute respiratory syndrome coronavirus 2
QQESPFVM

SEQ ID NO: 442 - protein, 8 aa, Severe acute respiratory syndrome-related coronavirus
  REGION 1..8: note = Table A: HLA-B*44:05H HLA-B*45:01H HLA-B*18:01M HLA-B*37:01M HLA-B*40:01H HLA-B*40:02H HLA-B*07:05M HLA-B*41:02H HLA-B*49:01M HLA-B*50:01H
  source 1..8: note = Severe acute respiratory syndrome coronavirus 2
QESPFVMM

SEQ ID NO: 443 - protein, 8 aa, Severe acute respiratory syndrome-related coronavirus
  REGION 1..8: note = Table A: HLA-B*56:01M HLA-B*55:02M HLA-C*15:05H HLA-B*55:01M HLA-B*39:06M HLA-B*54:01M HLA-B*07:05H
  source 1..8: note = Severe acute respiratory syndrome coronavirus 2
SPFVMMSA

SEQ ID NO: 444 - protein, 8 aa, Severe acute respiratory syndrome-related coronavirus
  REGION 1..8: note = Table A: HLA-B*58:01M HLA-B*58:02H HLA-A*36:01H HLA-A*01:01H HLA-A*30:02H HLA-C*15:05H HLA-B*35:01H HLA-B*38:02H HLA-B*15:01H HLA-B*39:01H
  source 1..8: note = Severe acute respiratory syndrome coronavirus 2
MSAPPAQY

SEQ ID NO: 445 - protein, 8 aa, Severe acute respiratory syndrome-related coronavirus
  REGION 1..8: note = Table A: HLA-C*15:05M HLA-B*07:02H HLA-B*07:05H
  source 1..8: note = Severe acute respiratory syndrome coronavirus 2
APPAQYEL

SEQ ID NO: 446 - protein, 8 aa, Severe acute respiratory syndrome-related coronavirus
  REGION 1..8: note = Table A: HLA-B*14:02H HLA-B*37:01H
  source 1..8: note = Severe acute respiratory syndrome coronavirus 2
YELKHGTF

SEQ ID NO: 447 - protein, 8 aa, Severe acute respiratory syndrome-related coronavirus
  REGION 1..8: note = Table A: HLA-B*39:06H
  source 1..8: note = Severe acute respiratory syndrome coronavirus 2
KHGTFTCA

SEQ ID NO: 448 - protein, 8 aa, Severe acute respiratory syndrome-related coronavirus
  REGION 1..8: note = Table A: HLA-A*36:01H
  source 1..8: note = Severe acute respiratory syndrome coronavirus 2
ASEYTGNY

SEQ ID NO: 449 - protein, 8 aa, Severe acute respiratory syndrome-related coronavirus
  REGION 1..8: note = Table A: HLA-A*33:03H
  source 1..8: note = Severe acute respiratory syndrome coronavirus 2
HYKHITSK

SEQ ID NO: 450 - protein, 8 aa, Severe acute respiratory syndrome-related coronavirus
  REGION 1..8: note = Table A: HLA-B*08:01H
  source 1..8: note = Severe acute respiratory syndrome coronavirus 2
HITSKETL

SEQ ID NO: 451 - protein, 8 aa, Severe acute respiratory syndrome-related coronavirus
  REGION 1..8: note = Table A: HLA-B*58:01H HLA-A*36:01H
  source 1..8: note = Severe acute respiratory syndrome coronavirus 2
ITSKETLY

SEQ ID NO: 452 - protein, 8 aa, Severe acute respiratory syndrome-related coronavirus
  REGION 1..8: note = Table A: HLA-C*03:03H HLA-C*03:04H
  source 1..8: note = Severe acute respiratory syndrome coronavirus 2
YCIDGALL

SEQ ID NO: 453 - protein, 8 aa, Severe acute respiratory syndrome-related coronavirus
  REGION 1..8: note = Table A: HLA-A*03:01H HLA-A*03:02H HLA-A*11:01H HLA-A*11:02H HLA-A*36:01H HLA-A*34:02H
  source 1..8: note = Severe acute respiratory syndrome coronavirus 2
IDGALLTK

SEQ ID NO: 454 - protein, 8 aa, Severe acute respiratory syndrome-related coronavirus
  REGION 1..8: note = Table A: HLA-B*46:01H HLA-B*38:02H HLA-B*15:01H HLA-B*15:02H
  source 1..8: note = Severe acute respiratory syndrome coronavirus 2
LLTKSSEY

SEQ ID NO: 455 - protein, 8 aa, Severe acute respiratory syndrome-related coronavirus
  REGION 1..8: note = Table A: HLA-B*45:01H HLA-B*40:02H HLA-B*40:06H HLA-B*41:02H HLA-B*49:01H HLA-B*50:01H
  source 1..8: note = Severe acute respiratory syndrome coronavirus 2
SEYKGPIT

SEQ ID NO: 456 - protein, 8 aa, Severe acute respiratory syndrome-related coronavirus
  REGION 1..8: note = Table A: HLA-A*11:02H
  source 1..8: note = Severe acute respiratory syndrome coronavirus 2
PITDVFYK

SEQ ID NO: 457 - protein, 8 aa, Severe acute respiratory syndrome-related coronavirus
  REGION 1..8: note = Table A: HLA-C*14:03H
  source 1..8: note = Severe acute respiratory syndrome coronavirus 2
VFYKENSY

SEQ ID NO: 458 - protein, 8 aa, Severe acute respiratory syndrome-related coronavirus
  REGION 1..8: note = Table A: HLA-B*58:01M HLA-B*58:02M HLA-B*57:01M HLA-B*46:01H HLA-B*18:01H HLA-C*07:01H HLA-A*30:02H HLA-C*15:05M HLA-C*12:02H HLA-C*12:03H HLA-B*35:01H HLA-B*38:02H HLA-B*15:01H HLA-B*15:02H HLA-B*15:03H HLA-B*39:01H
  REGION 1..8: note = CONT. FROM ABOVE: HLA-B*07:05H HLA-B*57:03M HLA-C*02:02H
  source 1..8: note = Severe acute respiratory syndrome coronavirus 2
TTIKPVTY

SEQ ID NO: 459 - protein, 8 aa, Severe acute respiratory syndrome-related coronavirus
  REGION 1..8: note = Table A: HLA-A*02:11H
  source 1..8: note = Severe acute respiratory syndrome coronavirus 2
VTYKLDGV

SEQ ID NO: 460 - protein, 8 aa, Severe acute respiratory syndrome-related coronavirus
  REGION 1..8: note = Table A: HLA-B*51:01M
  source 1..8: note = Severe acute respiratory syndrome coronavirus 2
DGVVCTEI

SEQ ID NO: 461 - protein, 8 aa, Severe acute respiratory syndrome-related coronavirus
  REGION 1..8: note = Table A: HLA-B*38:02H HLA-B*15:02H
  source 1..8: note = Severe acute respiratory syndrome coronavirus 2
DPKLDNYY

SEQ ID NO: 462 - protein, 8 aa, Severe acute respiratory syndrome-related coronavirus
  REGION 1..8: note = Table A: HLA-C*04:03M HLA-C*03:03H HLA-C*03:04H HLA-C*05:01H
  source 1..8: note = Severe acute respiratory syndrome coronavirus 2
FTEQPIDL

SEQ ID NO: 463 - protein, 8 aa, Severe acute respiratory syndrome-related coronavirus
  REGION 1..8: note = Table A: HLA-B*49:01H
  source 1..8: note = Severe acute respiratory syndrome coronavirus 2
TEQPIDLV

SEQ ID NO: 464 - protein, 8 aa, Severe acute respiratory syndrome-related coronavirus
  REGION 1..8: note = Table A: HLA-C*15:05H HLA-B*38:02H HLA-B*07:05H
  source 1..8: note = Severe acute respiratory syndrome coronavirus 2
QPYPNASF

SEQ ID NO: 465 - protein, 8 aa, Severe acute respiratory syndrome-related coronavirus
  REGION 1..8: note = Table A: HLA-B*58:01H HLA-B*57:03H
  source 1..8: note = Severe acute respiratory syndrome coronavirus 2
ASFDNFKF

SEQ ID NO: 466 - protein, 8 aa, Severe acute respiratory syndrome-related coronavirus
  REGION 1..8: note = Table A: HLA-C*04:01H
  source 1..8: note = Severe acute respiratory syndrome coronavirus 2
SFDNFKFV

SEQ ID NO: 467 - protein, 8 aa, Severe acute respiratory syndrome-related coronavirus
  REGION 1..8: note = Table A: HLA-C*04:03H HLA-C*08:01H HLA-C*08:02H HLA-C*05:01H
  source 1..8: note = Severe acute respiratory syndrome coronavirus 2
FADDLNQL

SEQ ID NO: 468 - protein, 8 aa, Severe acute respiratory syndrome-related coronavirus
  REGION 1..8: note = Table A: HLA-B*38:02M HLA-B*15:02M
  source 1..8: note = Severe acute respiratory syndrome coronavirus 2
DLNQLTGY

SEQ ID NO: 469 - protein, 8 aa, Severe acute respiratory syndrome-related coronavirus
  REGION 1..8: note = Table A: HLA-A*33:03H
  source 1..8: note = Severe acute respiratory syndrome coronavirus 2
GYKKPASR

SEQ ID NO: 470 - protein, 8 aa, Severe acute respiratory syndrome-related coronavirus
  REGION 1..8: note = Table A: HLA-C*15:05H HLA-B*51:01H
  source 1..8: note = Severe acute respiratory syndrome coronavirus 2
PASRELKV

SEQ ID NO: 471 - protein, 8 aa, Severe acute respiratory syndrome-related coronavirus
  REGION 1..8: note = Table A: HLA-B*37:01H
  source 1..8: note = Severe acute respiratory syndrome coronavirus 2
RELKVTFF

SEQ ID NO: 472 - protein, 8 aa, Severe acute respiratory syndrome-related coronavirus
  REGION 1..8: note = Table A: HLA-B*18:01H HLA-B*07:05H
  source 1..8: note = Severe acute respiratory syndrome coronavirus 2
GDVVAIDY

SEQ ID NO: 473 - protein, 8 aa, Severe acute respiratory syndrome-related coronavirus
  REGION 1..8: note = Table A: HLA-B*15:03H
  source 1..8: note = Severe acute respiratory syndrome coronavirus 2
YKHYTPSF

SEQ ID NO: 474 - protein, 8 aa, Severe acute respiratory syndrome-related coronavirus
  REGION 1..8: note = Table A: HLA-A*03:01H
  source 1..8: note = Severe acute respiratory syndrome coronavirus 2
KHYTPSFK

SEQ ID NO: 475 - protein, 8 aa, Severe acute respiratory syndrome-related coronavirus
  REGION 1..8: note = Table A: HLA-A*36:01H
  source 1..8: note = Severe acute respiratory syndrome coronavirus 2
HYTPSFKK

SEQ ID NO: 476 - protein, 8 aa, Severe acute respiratory syndrome-related coronavirus
  REGION 1..8: note = Table A: HLA-B*58:01H HLA-B*57:03M HLA-B*13:01H
  source 1..8: note = Severe acute respiratory syndrome coronavirus 2
LLHKPIVW

SEQ ID NO: 477 - protein, 8 aa, Severe acute respiratory syndrome-related coronavirus
  REGION 1..8: note = Table A: HLA-B*52:01H
  source 1..8: note = Severe acute respiratory syndrome coronavirus 2
HKPIVWHV

SEQ ID NO: 478 - protein, 8 aa, Severe acute respiratory syndrome-related coronavirus
  REGION 1..8: note = Table A: HLA-A*03:02H HLA-A*34:02H
  source 1..8: note = Severe acute respiratory syndrome coronavirus 2
HVNNATNK

SEQ ID NO: 479 - protein, 8 aa, Severe acute respiratory syndrome-related coronavirus
  REGION 1..8: note = Table A: HLA-C*16:01H HLA-B*35:01H
  source 1..8: note = Severe acute respiratory syndrome coronavirus 2
NATNKATY

SEQ ID NO: 480 - protein, 8 aa, Severe acute respiratory syndrome-related coronavirus
  REGION 1..8: note = Table A: HLA-A*11:303H HLA-A*03:01H HLA-A*03:02M HLA-A*11:01H HLA-A*11:02H HLA-C*07:27H
  source 1..8: note = Severe acute respiratory syndrome coronavirus 2
ATNKATYK

SEQ ID NO: 481 - protein, 8 aa, Severe acute respiratory syndrome-related coronavirus
  REGION 1..8: note = Table A: HLA-B*58:01H HLA-B*58:02H HLA-B*57:01H HLA-A*32:01M HLA-B*57:03H
  source 1..8: note = Severe acute respiratory syndrome coronavirus 2
ATYKPNTW

SEQ ID NO: 482 - protein, 8 aa, Severe acute respiratory syndrome-related coronavirus
  REGION 1..8: note = Table A: HLA-B*35:02H
  source 1..8: note = Severe acute respiratory syndrome coronavirus 2
DAQGMDNL

SEQ ID NO: 483 - protein, 8 aa, Severe acute respiratory syndrome-related coronavirus
  REGION 1..8: note = Table A: HLA-B*51:01H HLA-B*38:02H HLA-B*39:01H
  source 1..8: note = Severe acute respiratory syndrome coronavirus 2
EVVENPTI

SEQ ID NO: 484 - protein, 8 aa, Severe acute respiratory syndrome-related coronavirus
  REGION 1..8: note = Table A: HLA-B*08:01H
  source 1..8: note = Severe acute respiratory syndrome coronavirus 2
NVKTTEVV

SEQ ID NO: 485 - protein, 8 aa, Severe acute respiratory syndrome-related coronavirus
  REGION 1..8: note = Table A: HLA-B*40:01H HLA-B*49:01M
  source 1..8: note = Severe acute respiratory syndrome coronavirus 2
TEVVGDII

SEQ ID NO: 486 - protein, 8 aa, Severe acute respiratory syndrome-related coronavirus
  REGION 1..8: note = Table A: HLA-B*35:02H
  source 1..8: note = Severe acute respiratory syndrome coronavirus 2
EVVGDIIL

SEQ ID NO: 487 - protein, 8 aa, Severe acute respiratory syndrome-related coronavirus
  REGION 1..8: note = Table A: HLA-A*03:02H HLA-A*11:01H HLA-A*11:02H HLA-A*34:02H
  source 1..8: note = Severe acute respiratory syndrome coronavirus 2
VVGDIILK

SEQ ID NO: 488 - protein, 8 aa, Severe acute respiratory syndrome-related coronavirus
  REGION 1..8: note = Table A: HLA-B*50:01H
  source 1..8: note = Severe acute respiratory syndrome coronavirus 2
GDIILKPA

SEQ ID NO: 489 - protein, 8 aa, Severe acute respiratory syndrome-related coronavirus
  REGION 1..8: note = Table A: HLA-C*15:05M HLA-B*51:01M
  source 1..8: note = Severe acute respiratory syndrome coronavirus 2
PANNSLKI

SEQ ID NO: 490 - protein, 8 aa, Severe acute respiratory syndrome-related coronavirus
  REGION 1..8: note = Table A: HLA-B*44:05H HLA-B*14:02H
  source 1..8: note = Severe acute respiratory syndrome coronavirus 2
EEVGHTDL

SEQ ID NO: 491 - protein, 8 aa, Severe acute respiratory syndrome-related coronavirus
  REGION 1..8: note = Table A: HLA-B*39:06M
  source 1..8: note = Severe acute respiratory syndrome coronavirus 2
GHTDLMAA

SEQ ID NO: 492 - protein, 8 aa, Severe acute respiratory syndrome-related coronavirus
  REGION 1..8: note = Table A: HLA-A*36:01M HLA-A*01:01H
  source 1..8: note = Severe acute respiratory syndrome coronavirus 2
HTDLMAAY

SEQ ID NO: 493 - protein, 8 aa, Severe acute respiratory syndrome-related coronavirus
  REGION 1..8: note = Table A: HLA-C*14:02M HLA-C*14:03H HLA-B*39:01H
  source 1..8: note = Severe acute respiratory syndrome coronavirus 2
AYVDNSSL

SEQ ID NO: 494 - protein, 8 aa, Severe acute respiratory syndrome-related coronavirus
  REGION 1..8: note = Table A: HLA-C*15:05H HLA-B*49:01H
  source 1..8: note = Severe acute respiratory syndrome coronavirus 2
VDNSSLTI

SEQ ID NO: 495 - protein, 8 aa, Severe acute respiratory syndrome-related coronavirus
  REGION 1..8: note = Table A: HLA-B*08:01M HLA-B*07:04H
  source 1..8: note = Severe acute respiratory syndrome coronavirus 2
TIKKPNEL

SEQ ID NO: 496 - protein, 8 aa, Severe acute respiratory syndrome-related coronavirus
  REGION 1..8: note = Table A: HLA-C*15:05H HLA-B*55:01H
  source 1..8: note = Severe acute respiratory syndrome coronavirus 2
KPNELSRV

SEQ ID NO: 497 - protein, 8 aa, Severe acute respiratory syndrome-related coronavirus
  REGION 1..8: note = Table A: HLA-B*07:04H
  source 1..8: note = Severe acute respiratory syndrome coronavirus 2
RVLGLKTL

SEQ ID NO: 498 - protein, 8 aa, Severe acute respiratory syndrome-related coronavirus
  REGION 1..8: note = Table A: HLA-B*58:02M HLA-A*02:11H HLA-B*57:03H
  source 1..8: note = Severe acute respiratory syndrome coronavirus 2
KTLATHGL

SEQ ID NO: 499 - protein, 8 aa, Severe acute respiratory syndrome-related coronavirus
  REGION 1..8: note = Table A: HLA-B*54:01H
  source 1..8: note = Severe acute respiratory syndrome coronavirus 2
LATHGLAA

SEQ ID NO: 500 - protein, 8 aa, Severe acute respiratory syndrome-related coronavirus
  REGION 1..8: note = Table A: HLA-A*02:03H
  source 1..8: note = Severe acute respiratory syndrome coronavirus 2
GLAAVNSV

SEQ ID NO: 501 - protein, 8 aa, Severe acute respiratory syndrome-related coronavirus
  REGION 1..8: note = Table A: HLA-B*58:01H
  source 1..8: note = Severe acute respiratory syndrome coronavirus 2
AAVNSVPW

SEQ ID NO: 502 - protein, 8 aa, Severe acute respiratory syndrome-related coronavirus
  REGION 1..8: note = Table A: HLA-A*34:02H
  source 1..8: note = Severe acute respiratory syndrome coronavirus 2
YAKPFLNK

SEQ ID NO: 503 - protein, 8 aa, Severe acute respiratory syndrome-related coronavirus
  REGION 1..8: note = Table A: HLA-B*56:01H HLA-B*08:01H HLA-B*55:02M HLA-C*15:05H HLA-B*55:01M HLA-B*51:01H HLA-B*52:01H HLA-B*54:01H HLA-B*07:02H HLA-B*07:04M
  source 1..8: note = Severe acute respiratory syndrome coronavirus 2
KPFLNKVV

SEQ ID NO: 504 - protein, 8 aa, Severe acute respiratory syndrome-related coronavirus
  REGION 1..8: note = Table A: HLA-A*74:01M HLA-A*03:02H HLA-A*11:01M HLA-A*11:02M HLA-B*57:01H HLA-A*33:01H HLA-A*33:03H HLA-A*26:03H HLA-A*68:01H HLA-A*68:02H HLA-A*34:01H HLA-A*34:02M HLA-C*07:27H HLA-A*31:01M HLA-A*66:01M
  source 1..8: note = Severe acute respiratory syndrome coronavirus 2
TTTNIVTR

SEQ ID NO: 505 - protein, 8 aa, Severe acute respiratory syndrome-related coronavirus
  REGION 1..8: note = Table A: HLA-C*15:05H HLA-B*51:01H
  source 1..8: note = Severe acute respiratory syndrome coronavirus 2
MPYFFTLL

SEQ ID NO: 506 - protein, 8 aa, Severe acute respiratory syndrome-related coronavirus
  REGION 1..8: note = Table A: HLA-A*24:07H
  source 1..8: note = Severe acute respiratory syndrome coronavirus 2
PYFFTLLL

SEQ ID NO: 507 - protein, 8 aa, Severe acute respiratory syndrome-related coronavirus
  REGION 1..8: note = Table A: HLA-B*08:01H
  source 1..8: note = Severe acute respiratory syndrome coronavirus 2
NSRIKASM

SEQ ID NO: 508 - protein, 8 aa, Severe acute respiratory syndrome-related coronavirus
  REGION 1..8: note = Table A: HLA-B*58:02H HLA-C*15:05H HLA-B*57:03H
  source 1..8: note = Severe acute respiratory syndrome coronavirus 2
KASMPTTI

SEQ ID NO: 509 - protein, 8 aa, Severe acute respiratory syndrome-related coronavirus
  REGION 1..8: note = Table A: HLA-A*03:01H HLA-A*03:02H HLA-A*11:01H HLA-A*11:02H
  source 1..8: note = Severe acute respiratory syndrome coronavirus 2
SMPTTIAK

SEQ ID NO: 510 - protein, 8 aa, Severe acute respiratory syndrome-related coronavirus
  REGION 1..8: note = Table A: HLA-B*51:01H HLA-B*54:01H
  source 1..8: note = Severe acute respiratory syndrome coronavirus 2
MPTTIAKN

SEQ ID NO: 511 - protein, 8 aa, Severe acute respiratory syndrome-related coronavirus
  REGION 1..8: note = Table A: HLA-A*26:01H HLA-A*26:02H HLA-A*26:03H
  source 1..8: note = Severe acute respiratory syndrome coronavirus 2
TVKSVGKF

SEQ ID NO: 512 - protein, 8 aa, Severe acute respiratory syndrome-related coronavirus
  REGION 1..8: note = Table A: HLA-B*18:01H HLA-B*49:01H
  source 1..8: note = Severe acute respiratory syndrome coronavirus 2
LEASFNYL

SEQ ID NO: 513 - protein, 8 aa, Severe acute respiratory syndrome-related coronavirus
  REGION 1..8: note = Table A: HLA-A*36:01H HLA-A*34:01H HLA-A*34:02H
  source 1..8: note = Severe acute respiratory syndrome coronavirus 2
EASFNYLK

SEQ ID NO: 514 - protein, 8 aa, Severe acute respiratory syndrome-related coronavirus
  REGION 1..8: note = Table A: HLA-C*14:02H HLA-C*14:03H HLA-A*24:02M HLA-A*24:07M HLA-A*23:01M
  source 1..8: note = Severe acute respiratory syndrome coronavirus 2
NYLKSPNF

SEQ ID NO: 515 - protein, 8 aa, Severe acute respiratory syndrome-related coronavirus
  REGION 1..8: note = Table A: HLA-C*15:05H
  source 1..8: note = Severe acute respiratory syndrome coronavirus 2
SPNFSKLI

SEQ ID NO: 516 - protein, 8 aa, Severe acute respiratory syndrome-related coronavirus
  REGION 1..8: note = Table A: HLA-B*13:02H
  source 1..8: note = Severe acute respiratory syndrome coronavirus 2
YSTAALGV

SEQ ID NO: 517 - protein, 8 aa, Severe acute respiratory syndrome-related coronavirus
  REGION 1..8: note = Table A: HLA-C*15:05H
  source 1..8: note = Severe acute respiratory syndrome coronavirus 2
STAALGVL

SEQ ID NO: 518 - protein, 8 aa, Severe acute respiratory syndrome-related coronavirus
  REGION 1..8: note = Table A: HLA-C*16:01H HLA-C*03:04H HLA-B*35:03H HLA-C*15:05H HLA-B*35:01H HLA-B*35:02H HLA-B*51:01H HLA-C*17:01H HLA-B*35:12H HLA-B*38:02H HLA-B*15:02H
  source 1..8: note = Severe acute respiratory syndrome coronavirus 2
TAALGVLM

SEQ ID NO: 519 - protein, 8 aa, Severe acute respiratory syndrome-related coronavirus
  REGION 1..8: note = Table A: HLA-B*35:01H
  source 1..8: note = Severe acute respiratory syndrome coronavirus 2
MPSYCTGY

SEQ ID NO: 520 - protein, 8 aa, Severe acute respiratory syndrome-related coronavirus
  REGION 1..8: note = Table A: HLA-B*18:01M HLA-C*07:01H HLA-A*30:02H HLA-B*35:01H HLA-B*38:02H HLA-B*15:01H HLA-B*15:02H HLA-B*39:01H HLA-B*07:05M
  source 1..8: note = Severe acute respiratory syndrome coronavirus 2
TNVTIATY

SEQ ID NO: 521 - protein, 8 aa, Severe acute respiratory syndrome-related coronavirus
  REGION 1..8: note = Table A: HLA-C*15:05H
  source 1..8: note = Severe acute respiratory syndrome coronavirus 2
TGSIPCSV

SEQ ID NO: 522 - protein, 8 aa, Severe acute respiratory syndrome-related coronavirus
  REGION 1..8: note = Table A: HLA-C*15:05H
  source 1..8: note = Severe acute respiratory syndrome coronavirus 2
PSLETIQI

SEQ ID NO: 523 - protein, 8 aa, Severe acute respiratory syndrome-related coronavirus
  REGION 1..8: note = Table A: HLA-B*49:01M
  source 1..8: note = Severe acute respiratory syndrome coronavirus 2
LETIQITI

SEQ ID NO: 524 - protein, 8 aa, Severe acute respiratory syndrome-related coronavirus
  REGION 1..8: note = Table A: HLA-B*46:01H HLA-B*52:01H HLA-B*38:02H HLA-B*15:01H HLA-B*15:02H HLA-B*15:03M
  source 1..8: note = Severe acute respiratory syndrome coronavirus 2
IQITISSF

SEQ ID NO: 525 - protein, 8 aa, Severe acute respiratory syndrome-related coronavirus
  REGION 1..8: note = Table A: HLA-B*58:01M HLA-B*58:02H HLA-B*57:01H HLA-B*57:03M
  source 1..8: note = Severe acute respiratory syndrome coronavirus 2
ITISSFKW

SEQ ID NO: 526 - protein, 8 aa, Severe acute respiratory syndrome-related coronavirus
  REGION 1..8: note = Table A: HLA-C*16:01H
  source 1..8: note = Severe acute respiratory syndrome coronavirus 2
ISSFKWDL

SEQ ID NO: 527 - protein, 8 aa, Severe acute respiratory syndrome-related coronavirus
  REGION 1..8: note = Table A: HLA-B*15:03H
  source 1..8: note = Severe acute respiratory syndrome coronavirus 2
FKWDLTAF

SEQ ID NO: 528 - protein, 8 aa, Severe acute respiratory syndrome-related coronavirus
  REGION 1..8: note = Table A: HLA-A*36:01H
  source 1..8: note = Severe acute respiratory syndrome coronavirus 2
VAEWFLAY

SEQ ID NO: 529 - protein, 8 aa, Severe acute respiratory syndrome-related coronavirus
  REGION 1..8: note = Table A: HLA-A*29:02H
  source 1..8: note = Severe acute respiratory syndrome coronavirus 2
ILFTRFFY

SEQ ID NO: 530 - protein, 8 aa, Severe acute respiratory syndrome-related coronavirus
  REGION 1..8: note = Table A: HLA-C*14:03H
  source 1..8: note = Severe acute respiratory syndrome coronavirus 2
FYVLGLAA

SEQ ID NO: 531 - protein, 8 aa, Severe acute respiratory syndrome-related coronavirus
  REGION 1..8: note = Table A: HLA-B*58:02H HLA-B*57:03H
  source 1..8: note = Severe acute respiratory syndrome coronavirus 2
FSYFAVHF

SEQ ID NO: 532 - protein, 8 aa, Severe acute respiratory syndrome-related coronavirus
  REGION 1..8: note = Table A: HLA-C*14:03H HLA-A*24:02H HLA-A*24:07H HLA-B*52:01H HLA-C*08:01H
  source 1..8: note = Severe acute respiratory syndrome coronavirus 2
SYFAVHFI

SEQ ID NO: 533 - protein, 8 aa, Severe acute respiratory syndrome-related coronavirus
  REGION 1..8: note = Table A: HLA-B*38:02M
  source 1..8: note = Severe acute respiratory syndrome coronavirus 2
VHFISNSW

SEQ ID NO: 534 - protein, 8 aa, Severe acute respiratory syndrome-related coronavirus
  REGION 1..8: note = Table A: HLA-A*02:11M HLA-A*02:04H
  source 1..8: note = Severe acute respiratory syndrome coronavirus 2
LMWLIINL

SEQ ID NO: 535 - protein, 8 aa, Severe acute respiratory syndrome-related coronavirus
  REGION 1..8: note = Table A: HLA-B*39:06M
  source 1..8: note = Severe acute respiratory syndrome coronavirus 2
VQMAPISA

SEQ ID NO: 536 - protein, 8 aa, Severe acute respiratory syndrome-related coronavirus
  REGION 1..8: note = Table A: HLA-C*15:05H HLA-B*38:02M HLA-B*15:01H HLA-B*15:02M HLA-B*07:05H
  source 1..8: note = Severe acute respiratory syndrome coronavirus 2
QMAPISAM

SEQ ID NO: 537 - protein, 8 aa, Severe acute respiratory syndrome-related coronavirus
  REGION 1..8: note = Table A: HLA-C*15:05H HLA-B*51:01H HLA-B*52:01H
  source 1..8: note = Severe acute respiratory syndrome coronavirus 2
MAPISAMV

SEQ ID NO: 538 - protein, 8 aa, Severe acute respiratory syndrome-related coronavirus
  REGION 1..8: note = Table A: HLA-A*34:01H HLA-A*66:01H
  source 1..8: note = Severe acute respiratory syndrome coronavirus 2
APISAMVR

SEQ ID NO: 539 - protein, 8 aa, Severe acute respiratory syndrome-related coronavirus
  REGION 1..8: note = Table A: HLA-C*15:05H
  source 1..8: note = Severe acute respiratory syndrome coronavirus 2
PISAMVRM

SEQ ID NO: 540 - protein, 8 aa, Severe acute respiratory syndrome-related coronavirus
  REGION 1..8: note = Table A: HLA-B*58:02H
  source 1..8: note = Severe acute respiratory syndrome coronavirus 2
ISAMVRMY

SEQ ID NO: 541 - protein, 8 aa, Severe acute respiratory syndrome-related coronavirus
  REGION 1..8: note = Table A: HLA-B*38:02H
  source 1..8: note = Severe acute respiratory syndrome coronavirus 2
YIFFASFY

SEQ ID NO: 542 - protein, 8 aa, Severe acute respiratory syndrome-related coronavirus
  REGION 1..8: note = Table A: HLA-C*14:03H HLA-A*29:02H
  source 1..8: note = Severe acute respiratory syndrome coronavirus 2
IFFASFYY

SEQ ID NO: 543 - protein, 8 aa, Severe acute respiratory syndrome-related coronavirus
  REGION 1..8: note = Table A: HLA-C*14:02H HLA-C*14:03M HLA-B*46:01H
  source 1..8: note = Severe acute respiratory syndrome coronavirus 2
FYYVWKSY

SEQ ID NO: 544 - protein, 8 aa, Severe acute respiratory syndrome-related coronavirus
  REGION 1..8: note = Table A: HLA-C*08:01H
  source 1..8: note = Severe acute respiratory syndrome coronavirus 2
YVHVVDGC

SEQ ID NO: 545 - protein, 8 aa, Severe acute respiratory syndrome-related coronavirus
  REGION 1..8: note = Table A: HLA-B*14:01H
  source 1..8: note = Severe acute respiratory syndrome coronavirus 2
NRATRVEC

SEQ ID NO: 546 - protein, 8 aa, Severe acute respiratory syndrome-related coronavirus
  REGION 1..8: note = Table A: HLA-A*34:01H HLA-A*66:01M
  source 1..8: note = Severe acute respiratory syndrome coronavirus 2
TTIVNGVR

SEQ ID NO: 547 - protein, 8 aa, Severe acute respiratory syndrome-related coronavirus
  REGION 1..8: note = Table A: HLA-B*46:01H HLA-C*03:04H
  source 1..8: note = Severe acute respiratory syndrome coronavirus 2
YANGGKGF

SEQ ID NO: 548 - protein, 8 aa, Severe acute respiratory syndrome-related coronavirus
  REGION 1..8: note = Table A: HLA-A*68:02H HLA-B*39:01H
  source 1..8: note = Severe acute respiratory syndrome coronavirus 2
STFISDEV

SEQ ID NO: 549 - protein, 8 aa, Severe acute respiratory syndrome-related coronavirus
  REGION 1..8: note = Table A: HLA-B*41:02H
  source 1..8: note = Severe acute respiratory syndrome coronavirus 2
SDEVARDL

SEQ ID NO: 550 - protein, 8 aa, Severe acute respiratory syndrome-related coronavirus
  REGION 1..8: note = Table A: HLA-B*35:02H
  source 1..8: note = Severe acute respiratory syndrome coronavirus 2
EVARDLSL

SEQ ID NO: 551 - protein, 8 aa, Severe acute respiratory syndrome-related coronavirus
  REGION 1..8: note = Table A: HLA-B*35:01H
  source 1..8: note = Severe acute respiratory syndrome coronavirus 2
NPTDQSSY

SEQ ID NO: 552 - protein, 8 aa, Severe acute respiratory syndrome-related coronavirus
  REGION 1..8: note = Table A: HLA-C*15:05H HLA-B*51:01H HLA-B*52:01M HLA-B*39:06H HLA-B*13:02H
  source 1..8: note = Severe acute respiratory syndrome coronavirus 2
SSYIVDSV

SEQ ID NO: 553 - protein, 8 aa, Severe acute respiratory syndrome-related coronavirus
  REGION 1..8: note = Table A: HLA-A*02:11H HLA-A*68:02H HLA-C*15:05H HLA-B*14:01H HLA-A*02:01H HLA-C*08:01H HLA-B*38:02H HLA-B*39:01H HLA-B*13:02H HLA-B*49:01H
  source 1..8: note = Severe acute respiratory syndrome coronavirus 2
YIVDSVTV

SEQ ID NO: 554 - protein, 8 aa, Severe acute respiratory syndrome-related coronavirus
  REGION 1..8: note = Table A: HLA-A*03:01H HLA-A*03:02M HLA-A*11:01H HLA-A*11:02H HLA-A*36:01H HLA-A*34:02H
  source 1..8: note = Severe acute respiratory syndrome coronavirus 2
IVDSVTVK

SEQ ID NO: 555 - protein, 8 aa, Severe acute respiratory syndrome-related coronavirus
  REGION 1..8: note = Table A: HLA-A*30:02H
  source 1..8: note = Severe acute respiratory syndrome coronavirus 2
KNGSIHLY

SEQ ID NO: 556 - protein, 8 aa, Severe acute respiratory syndrome-related coronavirus
  REGION 1..8: note = Table A: HLA-A*36:01H HLA-C*04:01H
  source 1..8: note = Severe acute respiratory syndrome coronavirus 2
YFDKAGQK

SEQ ID NO: 557 - protein, 8 aa, Severe acute respiratory syndrome-related coronavirus
  REGION 1..8: note = Table A: HLA-B*58:02H HLA-C*16:01H HLA-A*32:01H HLA-B*57:03H
  source 1..8: note = Severe acute respiratory syndrome coronavirus 2
KTYERHSL

SEQ ID NO: 558 - protein, 8 aa, Severe acute respiratory syndrome-related coronavirus
  REGION 1..8: note = Table A: HLA-A*02:02H
  source 1..8: note = Severe acute respiratory syndrome coronavirus 2
SLSHFVNL

SEQ ID NO: 559 - protein, 8 aa, Severe acute respiratory syndrome-related coronavirus
  REGION 1..8: note = Table A: HLA-B*52:01H
  source 1..8: note = Severe acute respiratory syndrome coronavirus 2
GSLPINVI

SEQ ID NO: 560 - protein, 8 aa, Severe acute respiratory syndrome-related coronavirus
  REGION 1..8: note = Table A: HLA-B*35:03H HLA-C*15:05H HLA-B*35:01M HLA-B*51:01H HLA-B*35:07M HLA-B*38:02H HLA-B*54:01H HLA-B*15:02H HLA-B*07:05H HLA-B*15:11H
  source 1..8: note = Severe acute respiratory syndrome coronavirus 2
LPINVIVF

SEQ ID NO: 561 - protein, 8 aa, Severe acute respiratory syndrome-related coronavirus
  REGION 1..8: note = Table A: HLA-A*11:02H
  source 1..8: note = Severe acute respiratory syndrome coronavirus 2
IVFDGKSK

SEQ ID NO: 562 - protein, 8 aa, Severe acute respiratory syndrome-related coronavirus
  REGION 1..8: note = Table A: HLA-B*46:01H HLA-C*12:02H HLA-B*38:02H HLA-B*15:01M HLA-B*15:02H HLA-B*15:11H
  source 1..8: note = Severe acute respiratory syndrome coronavirus 2
SAKSASVY

SEQ ID NO: 563 - protein, 8 aa, Severe acute respiratory syndrome-related coronavirus
  REGION 1..8: note = Table A: HLA-B*15:03H
  source 1..8: note = Severe acute respiratory syndrome coronavirus 2
AKSASVYY

SEQ ID NO: 564 - protein, 8 aa, Severe acute respiratory syndrome-related coronavirus
  REGION 1..8: note = Table A: HLA-B*15:02H
  source 1..8: note = Severe acute respiratory syndrome coronavirus 2
SVYYSQLM

SEQ ID NO: 565 - protein, 8 aa, Severe acute respiratory syndrome-related coronavirus
  REGION 1..8: note = Table A: HLA-B*14:01H HLA-B*51:01H HLA-B*38:02H
  source 1..8: note = Severe acute respiratory syndrome coronavirus 2
DQALVSDV

SEQ ID NO: 566 - protein, 8 aa, Severe acute respiratory syndrome-related coronavirus
  REGION 1..8: note = Table A: HLA-A*34:02H
  source 1..8: note = Severe acute respiratory syndrome coronavirus 2
DSAEVAVK

SEQ ID NO: 567 - protein, 8 aa, Severe acute respiratory syndrome-related coronavirus
  REGION 1..8: note = Table A: HLA-C*04:03H HLA-B*35:01H HLA-B*35:02H HLA-B*35:12H HLA-C*05:01H
  source 1..8: note = Severe acute respiratory syndrome coronavirus 2
SAEVAVKM

SEQ ID NO: 568 - protein, 8 aa, Severe acute respiratory syndrome-related coronavirus
  REGION 1..8: note = Table A: HLA-B*44:02H HLA-B*44:05M HLA-B*44:03H HLA-B*18:01H HLA-B*37:01H HLA-B*40:02H HLA-B*07:05H HLA-B*41:02M HLA-B*49:01H
  source 1..8: note = Severe acute respiratory syndrome coronavirus 2
AEVAVKMF

SEQ ID NO: 569 - protein, 8 aa, Severe acute respiratory syndrome-related coronavirus
  REGION 1..8: note = Table A: HLA-B*54:01H
  source 1..8: note = Severe acute respiratory syndrome coronavirus 2
VAVKMFDA

SEQ ID NO: 570 - protein, 8 aa, Severe acute respiratory syndrome-related coronavirus
  REGION 1..8: note = Table A: HLA-A*30:02H HLA-B*15:01H
  source 1..8: note = Severe acute respiratory syndrome coronavirus 2
AVKMFDAY

SEQ ID NO: 571 - protein, 8 aa, Severe acute respiratory syndrome-related coronavirus
  REGION 1..8: note = Table A: HLA-B*44:05H HLA-B*18:01H HLA-B*37:01H HLA-B*38:02H HLA-B*40:02H HLA-B*07:05H HLA-B*41:02H HLA-C*07:04H
  source 1..8: note = Severe acute respiratory syndrome coronavirus 2
FDAYVNTF

SEQ ID NO: 572 - protein, 8 aa, Severe acute respiratory syndrome-related coronavirus
  REGION 1..8: note = Table A: HLA-A*03:01H HLA-A*03:02H HLA-A*11:01H HLA-A*11:02H HLA-A*33:03H HLA-A*34:02H
  source 1..8: note = Severe acute respiratory syndrome coronavirus 2
TFNVPMEK

SEQ ID NO: 573 - protein, 8 aa, Severe acute respiratory syndrome-related coronavirus
  REGION 1..8: note = Table A: HLA-B*41:02H
  source 1..8: note = Severe acute respiratory syndrome coronavirus 2
MEKLKTLV

SEQ ID NO: 574 - protein, 8 aa, Severe acute respiratory syndrome-related coronavirus
  REGION 1..8: note = Table A: HLA-B*39:06H
  source 1..8: note = Severe acute respiratory syndrome coronavirus 2
EKLKTLVA

SEQ ID NO: 575 - protein, 8 aa, Severe acute respiratory syndrome-related coronavirus
  REGION 1..8: note = Table A: HLA-B*39:06H
  source 1..8: note = Severe acute respiratory syndrome coronavirus 2
LKTLVATA

SEQ ID NO: 576 - protein, 8 aa, Severe acute respiratory syndrome-related coronavirus
  REGION 1..8: note = Table A: HLA-B*39:06H
  source 1..8: note = Severe acute respiratory syndrome coronavirus 2
TLVATAEA

SEQ ID NO: 577 - protein, 8 aa, Severe acute respiratory syndrome-related coronavirus
  REGION 1..8: note = Table A: HLA-A*11:303H HLA-C*03:03H HLA-C*03:04H HLA-C*15:05H HLA-B*35:02M HLA-C*17:01H HLA-C*08:01H HLA-B*35:12H
  source 1..8: note = Severe acute respiratory syndrome coronavirus 2
VATAEAEL

SEQ ID NO: 578 - protein, 8 aa, Severe acute respiratory syndrome-related coronavirus
  REGION 1..8: note = Table A: HLA-B*08:01H HLA-B*14:01H
  source 1..8: note = Severe acute respiratory syndrome coronavirus 2
ELAKNVSL

SEQ ID NO: 579 - protein, 8 aa, Severe acute respiratory syndrome-related coronavirus
  REGION 1..8: note = Table A: HLA-B*35:03H HLA-B*35:02H HLA-B*35:12H
  source 1..8: note = Severe acute respiratory syndrome coronavirus 2
NVSLDNVL

SEQ ID NO: 580 - protein, 8 aa, Severe acute respiratory syndrome-related coronavirus
  REGION 1..8: note = Table A: HLA-B*37:01M
  source 1..8: note = Severe acute respiratory syndrome coronavirus 2
LDNVLSTF

SEQ ID NO: 581 - protein, 8 aa, Severe acute respiratory syndrome-related coronavirus
  REGION 1..8: note = Table A: HLA-B*51:01H
  source 1..8: note = Severe acute respiratory syndrome coronavirus 2
DNVLSTFI

SEQ ID NO: 582 - protein, 8 aa, Severe acute respiratory syndrome-related coronavirus
  REGION 1..8: note = Table A: HLA-B*39:06H HLA-B*54:01H
  source 1..8: note = Severe acute respiratory syndrome coronavirus 2
LSTFISAA

SEQ ID NO: 583 - protein, 8 aa, Severe acute respiratory syndrome-related coronavirus
  REGION 1..8: note = Table A: HLA-A*74:01H HLA-A*11:02H HLA-A*33:03H HLA-A*26:03H HLA-C*03:03H HLA-A*68:01H HLA-A*34:01M HLA-A*34:02H HLA-A*31:01H HLA-A*66:01M
  source 1..8: note = Severe acute respiratory syndrome coronavirus 2
STFISAAR

SEQ ID NO: 584 - protein, 8 aa, Severe acute respiratory syndrome-related coronavirus
  REGION 1..8: note = Table A: HLA-C*16:01H
  source 1..8: note = Severe acute respiratory syndrome coronavirus 2
ISAARQGF

SEQ ID NO: 585 - protein, 8 aa, Severe acute respiratory syndrome-related coronavirus
  REGION 1..8: note = Table A: HLA-B*35:02H
  source 1..8: note = Severe acute respiratory syndrome coronavirus 2
FVDSDVET

SEQ ID NO: 586 - protein, 8 aa, Severe acute respiratory syndrome-related coronavirus
  REGION 1..8: note = Table A: HLA-B*39:06H HLA-B*39:01H
  source 1..8: note = Severe acute respiratory syndrome coronavirus 2
SHQSDIEV

SEQ ID NO: 587 - protein, 8 aa, Severe acute respiratory syndrome-related coronavirus
  REGION 1..8: note = Table A: HLA-A*02:11H
  source 1..8: note = Severe acute respiratory syndrome coronavirus 2
YMLTYNKV

SEQ ID NO: 588 - protein, 8 aa, Severe acute respiratory syndrome-related coronavirus
  REGION 1..8: note = Table A: HLA-B*14:01H HLA-B*39:06H
  source 1..8: note = Severe acute respiratory syndrome coronavirus 2
ARHINAQV

SEQ ID NO: 589 - protein, 8 aa, Severe acute respiratory syndrome-related coronavirus
  REGION 1..8: note = Table A: HLA-B*39:06M
  source 1..8: note = Severe acute respiratory syndrome coronavirus 2
RHINAQVA

SEQ ID NO: 590 - protein, 8 aa, Severe acute respiratory syndrome-related coronavirus
  REGION 1..8: note = Table A: HLA-A*03:02H
  source 1..8: note = Severe acute respiratory syndrome coronavirus 2
HINAQVAK

SEQ ID NO: 591 - protein, 8 aa, Severe acute respiratory syndrome-related coronavirus
  REGION 1..8: note = Table A: HLA-B*58:02H HLA-B*57:03H
  source 1..8: note = Severe acute respiratory syndrome coronavirus 2
KSHNIALI

SEQ ID NO: 592 - protein, 8 aa, Severe acute respiratory syndrome-related coronavirus
  REGION 1..8: note = Table A: HLA-B*38:02H
  source 1..8: note = Severe acute respiratory syndrome coronavirus 2
SHNIALIW

SEQ ID NO: 593 - protein, 8 aa, Severe acute respiratory syndrome-related coronavirus
  REGION 1..8: note = Table A: HLA-A*02:11H
  source 1..8: note = Severe acute respiratory syndrome coronavirus 2
NIALIWNV

SEQ ID NO: 594 - protein, 8 aa, Severe acute respiratory syndrome-related coronavirus
  REGION 1..8: note = Table A: HLA-A*02:02H HLA-B*38:02H HLA-B*39:01H
  source 1..8: note = Severe acute respiratory syndrome coronavirus 2
FMSLSEQL

SEQ ID NO: 595 - protein, 8 aa, Severe acute respiratory syndrome-related coronavirus
  REGION 1..8: note = Table A: HLA-B*41:02M HLA-B*49:01H
  source 1..8: note = Severe acute respiratory syndrome coronavirus 2
SEQLRKQI

SEQ ID NO: 596 - protein, 8 aa, Severe acute respiratory syndrome-related coronavirus
  REGION 1..8: note = Table A: HLA-B*56:01M HLA-B*55:02M HLA-C*15:05H HLA-B*55:01M HLA-B*51:01H HLA-B*39:06H HLA-B*54:01H
  source 1..8: note = Severe acute respiratory syndrome coronavirus 2
LPFKLTCA

SEQ ID NO: 597 - protein, 8 aa, Severe acute respiratory syndrome-related coronavirus
  REGION 1..8: note = Table A: HLA-C*16:01H
  source 1..8: note = Severe acute respiratory syndrome coronavirus 2
CATTRQVV

SEQ ID NO: 598 - protein, 8 aa, Severe acute respiratory syndrome-related coronavirus
  REGION 1..8: note = Table A: HLA-B*52:01H
  source 1..8: note = Severe acute respiratory syndrome coronavirus 2
TTRQVVNV

SEQ ID NO: 599 - protein, 8 aa, Severe acute respiratory syndrome-related coronavirus
  REGION 1..8: note = Table A: HLA-B*14:01M HLA-B*39:06M HLA-B*39:01H
  source 1..8: note = Severe acute respiratory syndrome coronavirus 2
TRQVVNVV

SEQ ID NO: 600 - protein, 8 aa, Severe acute respiratory syndrome-related coronavirus
  REGION 1..8: note = Table A: HLA-A*03:01M HLA-A*03:02H HLA-A*11:01M HLA-A*11:02H HLA-A*30:02H HLA-A*34:02H HLA-C*07:27H
  source 1..8: note = Severe acute respiratory syndrome coronavirus 2
VVNVVTTK

SEQ ID NO: 601 - protein, 8 aa, Severe acute respiratory syndrome-related coronavirus
  REGION 1..8: note = Table A: HLA-C*15:05H HLA-B*52:01M
  source 1..8: note = Severe acute respiratory syndrome coronavirus 2
VNVVTTKI

SEQ ID NO: 602 - protein, 8 aa, Severe acute respiratory syndrome-related coronavirus
  REGION 1..8: note = Table A: HLA-C*16:01M HLA-B*08:01M HLA-C*15:05H HLA-B*14:02H HLA-B*14:01H HLA-B*07:02H HLA-B*07:04H HLA-C*07:04H
  source 1..8: note = Severe acute respiratory syndrome coronavirus 2
VVTTKIAL

SEQ ID NO: 603 - protein, 8 aa, Severe acute respiratory syndrome-related coronavirus
  REGION 1..8: note = Table A: HLA-A*11:303H HLA-A*03:01H HLA-A*03:02M HLA-A*11:01M HLA-A*11:02M HLA-A*36:01H HLA-A*30:02H HLA-A*34:02M HLA-C*07:27H
  source 1..8: note = Severe acute respiratory syndrome coronavirus 2
VTTKIALK

SEQ ID NO: 604 - protein, 8 aa, Severe acute respiratory syndrome-related coronavirus
  REGION 1..8: note = Table A: HLA-B*58:02H HLA-B*51:01H
  source 1..8: note = Severe acute respiratory syndrome coronavirus 2
IALKGGKI

SEQ ID NO: 605 - protein, 8 aa, Severe acute respiratory syndrome-related coronavirus
  REGION 1..8: note = Table A: HLA-A*11:02H HLA-A*36:01H
  source 1..8: note = Severe acute respiratory syndrome coronavirus 2
KIVNNWLK

SEQ ID NO: 606 - protein, 8 aa, Severe acute respiratory syndrome-related coronavirus
  REGION 1..8: note = Table A: HLA-B*48:01M HLA-B*08:01H
  source 1..8: note = Severe acute respiratory syndrome coronavirus 2
KQLIKVTL

SEQ ID NO: 607 - protein, 8 aa, Severe acute respiratory syndrome-related coronavirus
  REGION 1..8: note = Table A: HLA-A*02:03H HLA-B*52:01H HLA-B*38:02H HLA-B*13:02H
  source 1..8: note = Severe acute respiratory syndrome coronavirus 2
QLIKVTLV

SEQ ID NO: 608 - protein, 8 aa, Severe acute respiratory syndrome-related coronavirus
  REGION 1..8: note = Table A: HLA-B*08:01H
  source 1..8: note = Severe acute respiratory syndrome coronavirus 2
LIKVTLVF

SEQ ID NO: 609 - protein, 8 aa, Severe acute respiratory syndrome-related coronavirus
  REGION 1..8: note = Table A: HLA-B*58:01H HLA-B*58:02H HLA-B*57:03H
  source 1..8: note = Severe acute respiratory syndrome coronavirus 2
KVTLVFLF

SEQ ID NO: 610 - protein, 8 aa, Severe acute respiratory syndrome-related coronavirus
  REGION 1..8: note = Table A: HLA-B*54:01H
  source 1..8: note = Severe acute respiratory syndrome coronavirus 2
LVFLFVAA

SEQ ID NO: 611 - protein, 8 aa, Severe acute respiratory syndrome-related coronavirus
  REGION 1..8: note = Table A: HLA-B*15:02H
  source 1..8: note = Severe acute respiratory syndrome coronavirus 2
FLFVAAIF

SEQ ID NO: 612 - protein, 8 aa, Severe acute respiratory syndrome-related coronavirus
  REGION 1..8: note = Table A: HLA-A*02:04H
  source 1..8: note = Severe acute respiratory syndrome coronavirus 2
FVAAIFYL

SEQ ID NO: 613 - protein, 8 aa, Severe acute respiratory syndrome-related coronavirus
  REGION 1..8: note = Table A: HLA-C*14:03H
  source 1..8: note = Severe acute respiratory syndrome coronavirus 2
FYLITPVH

SEQ ID NO: 614 - protein, 8 aa, Severe acute respiratory syndrome-related coronavirus
  REGION 1..8: note = Table A: HLA-C*04:03H HLA-A*02:11M HLA-A*68:02H HLA-A*02:04H HLA-A*02:02H HLA-A*02:03H HLA-C*17:01H HLA-B*38:02H HLA-B*13:02H
  source 1..8: note = Severe acute respiratory syndrome coronavirus 2
YLITPVHV

SEQ ID NO: 615 - protein, 8 aa, Severe acute respiratory syndrome-related coronavirus
  REGION 1..8: note = Table A: HLA-C*03:02H HLA-B*15:02H HLA-C*07:04H
  source 1..8: note = Severe acute respiratory syndrome coronavirus 2
LITPVHVM

SEQ ID NO: 616 - protein, 8 aa, Severe acute respiratory syndrome-related coronavirus
  REGION 1..8: note = Table A: HLA-C*04:03H HLA-C*08:02M HLA-C*05:01H
  source 1..8: note = Severe acute respiratory syndrome coronavirus 2
HTDFSSEI

SEQ ID NO: 617 - protein, 8 aa, Severe acute respiratory syndrome-related coronavirus
  REGION 1..8: note = Table A: HLA-B*35:01H HLA-B*38:02H HLA-B*15:01H
  source 1..8: note = Severe acute respiratory syndrome coronavirus 2
FSSEIIGY

SEQ ID NO: 618 - protein, 8 aa, Severe acute respiratory syndrome-related coronavirus
  REGION 1..8: note = Table A: HLA-A*11:01H
  source 1..8: note = Severe acute respiratory syndrome coronavirus 2
SSEIIGYK

SEQ ID NO: 619 - protein, 8 aa, Severe acute respiratory syndrome-related coronavirus
  REGION 1..8: note = Table A: HLA-B*45:01H HLA-B*18:01H HLA-B*39:06H HLA-B*40:02H HLA-B*40:06M HLA-B*07:05H HLA-B*41:02H HLA-B*50:01M
  source 1..8: note = Severe acute respiratory syndrome coronavirus 2
SEIIGYKA

SEQ ID NO: 620 - protein, 8 aa, Severe acute respiratory syndrome-related coronavirus
  REGION 1..8: note = Table A: HLA-B*51:01H
  source 1..8: note = Severe acute respiratory syndrome coronavirus 2
DGGVTRDI

SEQ ID NO: 621 - protein, 8 aa, Severe acute respiratory syndrome-related coronavirus
  REGION 1..8: note = Table A: HLA-C*15:05H HLA-B*35:02H HLA-B*35:08H HLA-B*35:12H HLA-B*38:02H
  source 1..8: note = Severe acute respiratory syndrome coronavirus 2
IASTDTCF

SEQ ID NO: 622 - protein, 8 aa, Severe acute respiratory syndrome-related coronavirus
  REGION 1..8: note = Table A: HLA-C*16:01H HLA-B*46:01H HLA-B*08:01H HLA-C*03:02H HLA-C*03:04H HLA-C*12:02H HLA-C*12:03H HLA-C*02:02H
  source 1..8: note = Severe acute respiratory syndrome coronavirus 2
FANKHADF

SEQ ID NO: 623 - protein, 8 aa, Severe acute respiratory syndrome-related coronavirus
  REGION 1..8: note = Table A: HLA-B*38:02H
  source 1..8: note = Severe acute respiratory syndrome coronavirus 2
KHADFDTW

SEQ ID NO: 624 - protein, 8 aa, Severe acute respiratory syndrome-related coronavirus
  REGION 1..8: note = Table A: HLA-C*04:03M HLA-C*05:01H
  source 1..8: note = Severe acute respiratory syndrome coronavirus 2
HADFDTWF

SEQ ID NO: 625 - protein, 8 aa, Severe acute respiratory syndrome-related coronavirus
  REGION 1..8: note = Table A: HLA-A*66:01H
  source 1..8: note = Severe acute respiratory syndrome coronavirus 2
FDTWFSQR

SEQ ID NO: 626 - protein, 8 aa, Severe acute respiratory syndrome-related coronavirus
  REGION 1..8: note = Table A: HLA-C*16:01H HLA-B*46:01H HLA-A*30:02H
  source 1..8: note = Severe acute respiratory syndrome coronavirus 2
FSQRGGSY

SEQ ID NO: 627 - protein, 8 aa, Severe acute respiratory syndrome-related coronavirus
  REGION 1..8: note = Table A: HLA-C*15:05H HLA-B*51:01M HLA-B*07:05H
  source 1..8: note = Severe acute respiratory syndrome coronavirus 2
CPLIAAVI

SEQ ID NO: 628 - protein, 8 aa, Severe acute respiratory syndrome-related coronavirus
  REGION 1..8: note = Table A: HLA-C*16:01H HLA-C*03:02H HLA-B*52:01H
  source 1..8: note = Severe acute respiratory syndrome coronavirus 2
AAVITREV

SEQ ID NO: 629 - protein, 8 aa, Severe acute respiratory syndrome-related coronavirus
  REGION 1..8: note = Table A: HLA-B*40:06H HLA-B*50:01M
  source 1..8: note = Severe acute respiratory syndrome coronavirus 2
REVGFVVP

SEQ ID NO: 630 - protein, 8 aa, Severe acute respiratory syndrome-related coronavirus
  REGION 1..8: note = Table A: HLA-B*51:01H HLA-B*52:01H HLA-B*40:02H
  source 1..8: note = Severe acute respiratory syndrome coronavirus 2
VGFVVPGL

SEQ ID NO: 631 - protein, 8 aa, Severe acute respiratory syndrome-related coronavirus
  REGION 1..8: note = Table A: HLA-C*15:05M HLA-B*51:01H
  source 1..8: note = Severe acute respiratory syndrome coronavirus 2
VPGLPGTI

SEQ ID NO: 632 - protein, 8 aa, Severe acute respiratory syndrome-related coronavirus
  REGION 1..8: note = Table A: HLA-C*04:03H HLA-C*08:02H
  source 1..8: note = Severe acute respiratory syndrome coronavirus 2
NGDFLHFL

SEQ ID NO: 633 - protein, 8 aa, Severe acute respiratory syndrome-related coronavirus
  REGION 1..8: note = Table A: HLA-B*40:06H
  source 1..8: note = Severe acute respiratory syndrome coronavirus 2
GDFLHFLP

SEQ ID NO: 634 - protein, 8 aa, Severe acute respiratory syndrome-related coronavirus
  REGION 1..8: note = Table A: HLA-B*58:02H HLA-B*15:03H HLA-B*15:10H
  source 1..8: note = Severe acute respiratory syndrome coronavirus 2
LHFLPRVF

SEQ ID NO: 635 - protein, 8 aa, Severe acute respiratory syndrome-related coronavirus
  REGION 1..8: note = Table A: HLA-B*56:01H HLA-B*08:01H HLA-B*55:02H HLA-C*15:05H HLA-B*55:01M HLA-B*51:01M HLA-B*54:01M HLA-B*07:02H HLA-B*07:04H HLA-B*07:05H
  source 1..8: note = Severe acute respiratory syndrome coronavirus 2
LPRVFSAV

SEQ ID NO: 636 - protein, 8 aa, Severe acute respiratory syndrome-related coronavirus
  REGION 1..8: note = Table A: HLA-B*35:01H HLA-B*38:02H HLA-B*15:02H
  source 1..8: note = Severe acute respiratory syndrome coronavirus 2
SAVGNICY

SEQ ID NO: 637 - protein, 8 aa, Severe acute respiratory syndrome-related coronavirus
  REGION 1..8: note = Table A: HLA-B*18:01H HLA-C*15:05H HLA-B*35:01M HLA-B*35:08H HLA-B*35:07M HLA-B*38:02H HLA-B*15:02H HLA-B*07:05H HLA-B*15:11H
  source 1..8: note = Severe acute respiratory syndrome coronavirus 2
TPSKLIEY

SEQ ID NO: 638 - protein, 8 aa, Severe acute respiratory syndrome-related coronavirus
  REGION 1..8: note = Table A: HLA-B*39:06H HLA-B*50:01H
  source 1..8: note = Severe acute respiratory syndrome coronavirus 2
TDFATSAC

SEQ ID NO: 639 - protein, 8 aa, Severe acute respiratory syndrome-related coronavirus
  REGION 1..8: note = Table A: HLA-C*03:03H HLA-C*03:04H HLA-B*35:03H HLA-C*17:01H
  source 1..8: note = Severe acute respiratory syndrome coronavirus 2
FATSACVL

SEQ ID NO: 640 - protein, 8 aa, Severe acute respiratory syndrome-related coronavirus
  REGION 1..8: note = Table A: HLA-B*58:01H HLA-A*36:01H
  source 1..8: note = Severe acute respiratory syndrome coronavirus 2
ASGKPVPY

SEQ ID NO: 641 - protein, 8 aa, Severe acute respiratory syndrome-related coronavirus
  REGION 1..8: note = Table A: HLA-A*33:03H
  source 1..8: note = Severe acute respiratory syndrome coronavirus 2
ESLRPDTR

SEQ ID NO: 642 - protein, 8 aa, Severe acute respiratory syndrome-related coronavirus
  REGION 1..8: note = Table A: HLA-B*38:02H
  source 1..8: note = Severe acute respiratory syndrome coronavirus 2
SLRPDTRY

SEQ ID NO: 643 - protein, 8 aa, Severe acute respiratory syndrome-related coronavirus
  REGION 1..8: note = Table A: HLA-B*42:01M HLA-B*08:01H HLA-C*15:05M HLA-B*35:12H HLA-B*07:02M HLA-B*07:04M HLA-B*07:05H
  source 1..8: note = Severe acute respiratory syndrome coronavirus 2
RPDTRYVL

SEQ ID NO: 644 - protein, 8 aa, Severe acute respiratory syndrome-related coronavirus
  REGION 1..8: note = Table A: HLA-B*37:01H
  source 1..8: note = Severe acute respiratory syndrome coronavirus 2
MDGSIIQF

SEQ ID NO: 645 - protein, 8 aa, Severe acute respiratory syndrome-related coronavirus
  REGION 1..8: note = Table A: HLA-A*33:03H
  source 1..8: note = Severe acute respiratory syndrome coronavirus 2
TYLEGSVR

SEQ ID NO: 646 - protein, 8 aa, Severe acute respiratory syndrome-related coronavirus
  REGION 1..8: note = Table A: HLA-B*40:02H HLA-B*41:02H HLA-B*49:01M HLA-B*50:01H
  source 1..8: note = Severe acute respiratory syndrome coronavirus 2
LEGSVRVV

SEQ ID NO: 647 - protein, 8 aa, Severe acute respiratory syndrome-related coronavirus
  REGION 1..8: note = Table A: HLA-B*46:01H HLA-B*38:02H HLA-B*15:01H HLA-B*15:02M HLA-B*07:05H
  source 1..8: note = Severe acute respiratory syndrome coronavirus 2
SVRVVTTF

SEQ ID NO: 648 - protein, 8 aa, Severe acute respiratory syndrome-related coronavirus
  REGION 1..8: note = Table A: HLA-A*36:01H
  source 1..8: note = Severe acute respiratory syndrome coronavirus 2
VTTFDSEY

SEQ ID NO: 649 - protein, 8 aa, Severe acute respiratory syndrome-related coronavirus
  REGION 1..8: note = Table A: HLA-C*16:01H
  source 1..8: note = Severe acute respiratory syndrome coronavirus 2
STSGRWVL

SEQ ID NO: 650 - protein, 8 aa, Severe acute respiratory syndrome-related coronavirus
  REGION 1..8: note = Table A: HLA-B*38:02H
  source 1..8: note = Severe acute respiratory syndrome coronavirus 2
WVLNNDYY

SEQ ID NO: 651 - protein, 8 aa, Severe acute respiratory syndrome-related coronavirus
  REGION 1..8: note = Table A: HLA-A*74:01H
  source 1..8: note = Severe acute respiratory syndrome coronavirus 2
VLNNDYYR

SEQ ID NO: 652 - protein, 8 aa, Severe acute respiratory syndrome-related coronavirus
  REGION 1..8: note = Table A: HLA-C*15:05H
  source 1..8: note = Severe acute respiratory syndrome coronavirus 2
LPGVFCGV

SEQ ID NO: 653 - protein, 8 aa, Severe acute respiratory syndrome-related coronavirus
  REGION 1..8: note = Table A: HLA-C*04:03H
  source 1..8: note = Severe acute respiratory syndrome coronavirus 2
GVDAVNLL

SEQ ID NO: 654 - protein, 8 aa, Severe acute respiratory syndrome-related coronavirus
  REGION 1..8: note = Table A: HLA-C*15:05H HLA-B*51:01H
  source 1..8: note = Severe acute respiratory syndrome coronavirus 2
QPIGALDI

SEQ ID NO: 655 - protein, 8 aa, Severe acute respiratory syndrome-related coronavirus
  REGION 1..8: note = Table A: HLA-C*15:05H
  source 1..8: note = Severe acute respiratory syndrome coronavirus 2
VAGGIVAI

SEQ ID NO: 656 - protein, 8 aa, Severe acute respiratory syndrome-related coronavirus
  REGION 1..8: note = Table A: HLA-A*11:303H HLA-B*46:01H HLA-B*08:01H HLA-C*03:02H HLA-C*03:04H HLA-C*15:05H HLA-B*14:01H HLA-B*51:01H HLA-C*17:01H HLA-B*38:02H HLA-B*07:05H
  source 1..8: note = Severe acute respiratory syndrome coronavirus 2
VAIVVTCL

SEQ ID NO: 657 - protein, 8 aa, Severe acute respiratory syndrome-related coronavirus
  REGION 1..8: note = Table A: HLA-C*03:02H
  source 1..8: note = Severe acute respiratory syndrome coronavirus 2
LAYYFMRF

SEQ ID NO: 658 - protein, 8 aa, Severe acute respiratory syndrome-related coronavirus
  REGION 1..8: note = Table A: HLA-B*45:01M HLA-B*39:06H HLA-B*40:02H HLA-B*40:06M HLA-B*41:02H HLA-B*49:01H HLA-B*50:01H
  source 1..8: note = Severe acute respiratory syndrome coronavirus 2
GEYSHVVA

SEQ ID NO: 659 - protein, 8 aa, Severe acute respiratory syndrome-related coronavirus
  REGION 1..8: note = Table A: HLA-B*39:06H
  source 1..8: note = Severe acute respiratory syndrome coronavirus 2
SHVVAFNT

SEQ ID NO: 660 - protein, 8 aa, Severe acute respiratory syndrome-related coronavirus
  REGION 1..8: note = Table A: HLA-B*46:01H
  source 1..8: note = Severe acute respiratory syndrome coronavirus 2
YSFLPGVY

SEQ ID NO: 661 - protein, 8 aa, Severe acute respiratory syndrome-related coronavirus
  REGION 1..8: note = Table A: HLA-B*53:01H HLA-C*15:05H HLA-B*51:01M
  source 1..8: note = Severe acute respiratory syndrome coronavirus 2
LPGVYSVI

SEQ ID NO: 662 - protein, 8 aa, Severe acute respiratory syndrome-related coronavirus
  REGION 1..8: note = Table A: HLA-A*68:02H
  source 1..8: note = Severe acute respiratory syndrome coronavirus 2
DVSFLAHI

SEQ ID NO: 663 - protein, 8 aa, Severe acute respiratory syndrome-related coronavirus
  REGION 1..8: note = Table A: HLA-C*14:03H HLA-A*24:07H
  source 1..8: note = Severe acute respiratory syndrome coronavirus 2
SFLAHIQW

SEQ ID NO: 664 - protein, 8 aa, Severe acute respiratory syndrome-related coronavirus
  REGION 1..8: note = Table A: HLA-A*02:02H
  source 1..8: note = Severe acute respiratory syndrome coronavirus 2
FLAHIQWM

SEQ ID NO: 665 - protein, 8 aa, Severe acute respiratory syndrome-related coronavirus
  REGION 1..8: note = Table A: HLA-B*56:01H HLA-B*55:02H HLA-B*55:01H HLA-B*54:01H
  source 1..8: note = Severe acute respiratory syndrome coronavirus 2
VPFWITIA

SEQ ID NO: 666 - protein, 8 aa, Severe acute respiratory syndrome-related coronavirus
  REGION 1..8: note = Table A: HLA-B*58:01M HLA-B*58:02M HLA-B*57:01M HLA-A*24:07H HLA-B*57:03H
  source 1..8: note = Severe acute respiratory syndrome coronavirus 2
ISTKHFYW

SEQ ID NO: 667 - protein, 8 aa, Severe acute respiratory syndrome-related coronavirus
  REGION 1..8: note = Table A: HLA-C*14:03H
  source 1..8: note = Severe acute respiratory syndrome coronavirus 2
FYWFFSNY

SEQ ID NO: 668 - protein, 8 aa, Severe acute respiratory syndrome-related coronavirus
  REGION 1..8: note = Table A: HLA-B*08:01M
  source 1..8: note = Severe acute respiratory syndrome coronavirus 2
YLKRRVVF

SEQ ID NO: 669 - protein, 8 aa, Severe acute respiratory syndrome-related coronavirus
  REGION 1..8: note = Table A: HLA-C*14:02H HLA-C*14:03H HLA-B*46:01M HLA-C*03:02H HLA-C*03:04H HLA-C*15:05H HLA-C*12:02H HLA-B*38:02H HLA-B*15:01H HLA-B*07:05H HLA-B*57:03H
  source 1..8: note = Severe acute respiratory syndrome coronavirus 2
VVFNGVSF

SEQ ID NO: 670 - protein, 8 aa, Severe acute respiratory syndrome-related coronavirus
  REGION 1..8: note = Table A: HLA-B*18:01H
  source 1..8: note = Severe acute respiratory syndrome coronavirus 2
NGVSFSTF

SEQ ID NO: 671 - protein, 8 aa, Severe acute respiratory syndrome-related coronavirus
  REGION 1..8: note = Table A: HLA-A*68:02H HLA-B*38:02H HLA-B*39:01H
  source 1..8: note = Severe acute respiratory syndrome coronavirus 2
STFEEAAL

SEQ ID NO: 672 - protein, 8 aa, Severe acute respiratory syndrome-related coronavirus
  REGION 1..8: note = Table A: HLA-B*44:05H HLA-B*18:01M HLA-B*07:05H
  source 1..8: note = Severe acute respiratory syndrome coronavirus 2
EEAALCTF

SEQ ID NO: 673 - protein, 8 aa, Severe acute respiratory syndrome-related coronavirus
  REGION 1..8: note = Table A: HLA-C*14:02H HLA-C*14:03H HLA-B*15:02H
  source 1..8: note = Severe acute respiratory syndrome coronavirus 2
TFLLNKEM

SEQ ID NO: 674 - protein, 8 aa, Severe acute respiratory syndrome-related coronavirus
  REGION 1..8: note = Table A: HLA-B*38:02H
  source 1..8: note = Severe acute respiratory syndrome coronavirus 2
FLLNKEMY

SEQ ID NO: 675 - protein, 8 aa, Severe acute respiratory syndrome-related coronavirus
  REGION 1..8: note = Table A: HLA-A*02:11H HLA-A*02:04H HLA-A*02:02M HLA-C*17:01H
  source 1..8: note = Severe acute respiratory syndrome coronavirus 2
LLNKEMYL

SEQ ID NO: 676 - protein, 8 aa, Severe acute respiratory syndrome-related coronavirus
  REGION 1..8: note = Table A: HLA-B*40:02H HLA-B*40:06H
  source 1..8: note = Severe acute respiratory syndrome coronavirus 2
SDVLLPLT

SEQ ID NO: 677 - protein, 8 aa, Severe acute respiratory syndrome-related coronavirus
  REGION 1..8: note = Table A: HLA-B*46:01H HLA-B*38:02M HLA-B*15:01H HLA-B*15:02H HLA-B*15:03H
  source 1..8: note = Severe acute respiratory syndrome coronavirus 2
VLLPLTQY

SEQ ID NO: 678 - protein, 8 aa, Severe acute respiratory syndrome-related coronavirus
  REGION 1..8: note = Table A: HLA-B*58:02H
  source 1..8: note = Severe acute respiratory syndrome coronavirus 2
LTQYNRYL

SEQ ID NO: 679 - protein, 8 aa, Severe acute respiratory syndrome-related coronavirus
  REGION 1..8: note = Table A: HLA-B*46:01M HLA-A*30:02H HLA-B*35:01H HLA-B*38:02H HLA-B*15:01M HLA-B*15:02H HLA-B*15:03H HLA-B*07:05H HLA-B*15:11H
  source 1..8: note = Severe acute respiratory syndrome coronavirus 2
GAMDTTSY

SEQ ID NO: 680 - protein, 8 aa, Severe acute respiratory syndrome-related coronavirus
  REGION 1..8: note = Table A: HLA-A*36:01H
  source 1..8: note = Severe acute respiratory syndrome coronavirus 2
AMDTTSYR

SEQ ID NO: 681 - protein, 8 aa, Severe acute respiratory syndrome-related coronavirus
  REGION 1..8: note = Table A: HLA-B*46:01H
  source 1..8: note = Severe acute respiratory syndrome coronavirus 2
LAKALNDF

SEQ ID NO: 682 - protein, 8 aa, Severe acute respiratory syndrome-related coronavirus
  REGION 1..8: note = Table A: HLA-B*51:01H HLA-B*52:01M HLA-B*13:02H
  source 1..8: note = Severe acute respiratory syndrome coronavirus 2
YQPPQTSI

SEQ ID NO: 683 - protein, 8 aa, Severe acute respiratory syndrome-related coronavirus
  REGION 1..8: note = Table A: HLA-C*15:05H
  source 1..8: note = Severe acute respiratory syndrome coronavirus 2
TSITSAVL

SEQ ID NO: 684 - protein, 8 aa, Severe acute respiratory syndrome-related coronavirus
  REGION 1..8: note = Table A: HLA-C*15:05H
  source 1..8: note = Severe acute respiratory syndrome coronavirus 2
SAVLQSGF

SEQ ID NO: 685 - protein, 8 aa, Severe acute respiratory syndrome-related coronavirus
  REGION 1..8: note = Table A: HLA-A*34:01H HLA-A*66:01H
  source 1..8: note = Severe acute respiratory syndrome coronavirus 2
AVLQSGFR

SEQ ID NO: 686 - protein, 8 aa, Severe acute respiratory syndrome-related coronavirus
  REGION 1..8: note = Table A: HLA-A*03:02H HLA-A*11:02H
  source 1..8: note = Severe acute respiratory syndrome coronavirus 2
VLQSGFRK

SEQ ID NO: 687 - protein, 8 aa, Severe acute respiratory syndrome-related coronavirus
  REGION 1..8: note = Table A: HLA-C*15:05H HLA-B*51:01M HLA-B*52:01H HLA-B*54:01H
  source 1..8: note = Severe acute respiratory syndrome coronavirus 2
MAFPSGKV

SEQ ID NO: 688 - protein, 8 aa, Severe acute respiratory syndrome-related coronavirus
  REGION 1..8: note = Table A: HLA-B*49:01H
  source 1..8: note = Severe acute respiratory syndrome coronavirus 2
VEGCMVQV

SEQ ID NO: 689 - protein, 8 aa, Severe acute respiratory syndrome-related coronavirus
  REGION 1..8: note = Table A: HLA-B*58:01H
  source 1..8: note = Severe acute respiratory syndrome coronavirus 2
TTTLNGLW

SEQ ID NO: 690 - protein, 8 aa, Severe acute respiratory syndrome-related coronavirus
  REGION 1..8: note = Table A: HLA-B*07:05H
  source 1..8: note = Severe acute respiratory syndrome coronavirus 2
EDMLNPNY

SEQ ID NO: 691 - protein, 8 aa, Severe acute respiratory syndrome-related coronavirus
  REGION 1..8: note = Table A: HLA-B*35:02H HLA-B*35:12H
  source 1..8: note = Severe acute respiratory syndrome coronavirus 2
NPNYEDLL

SEQ ID NO: 692 - protein, 8 aa, Severe acute respiratory syndrome-related coronavirus
  REGION 1..8: note = Table A: HLA-B*58:02H HLA-C*15:02H
  source 1..8: note = Severe acute respiratory syndrome coronavirus 2
KSNHNFLV

SEQ ID NO: 693 - protein, 8 aa, Severe acute respiratory syndrome-related coronavirus
  REGION 1..8: note = Table A: HLA-B*39:06H
  source 1..8: note = Severe acute respiratory syndrome coronavirus 2
NHNFLVQA

SEQ ID NO: 694 - protein, 8 aa, Severe acute respiratory syndrome-related coronavirus
  REGION 1..8: note = Table A: HLA-B*48:01H HLA-A*02:05H HLA-B*39:01H
  source 1..8: note = Severe acute respiratory syndrome coronavirus 2
VQAGNVQL

SEQ ID NO: 695 - protein, 8 aa, Severe acute respiratory syndrome-related coronavirus
  REGION 1..8: note = Table A: HLA-A*33:03H HLA-A*68:01H
  source 1..8: note = Severe acute respiratory syndrome coronavirus 2
QAGNVQLR

SEQ ID NO: 696 - protein, 8 aa, Severe acute respiratory syndrome-related coronavirus
  REGION 1..8: note = Table A: HLA-C*15:02H
  source 1..8: note = Severe acute respiratory syndrome coronavirus 2
AGNVQLRV

SEQ ID NO: 697 - protein, 8 aa, Severe acute respiratory syndrome-related coronavirus
  REGION 1..8: note = Table A: HLA-B*52:01H HLA-B*15:01M
  source 1..8: note = Severe acute respiratory syndrome coronavirus 2
VQLRVIGH

SEQ ID NO: 698 - protein, 8 aa, Severe acute respiratory syndrome-related coronavirus
  REGION 1..8: note = Table A: HLA-B*14:02M HLA-B*14:01M
  source 1..8: note = Severe acute respiratory syndrome coronavirus 2
LRVIGHSM

SEQ ID NO: 699 - protein, 8 aa, Severe acute respiratory syndrome-related coronavirus
  REGION 1..8: note = Table A: HLA-B*52:01H
  source 1..8: note = Severe acute respiratory syndrome coronavirus 2
MQNCVLKL

SEQ ID NO: 700 - protein, 8 aa, Severe acute respiratory syndrome-related coronavirus
  REGION 1..8: note = Table A: HLA-B*39:06H
  source 1..8: note = Severe acute respiratory syndrome coronavirus 2
LKLKVDTA

SEQ ID NO: 701 - protein, 8 aa, Severe acute respiratory syndrome-related coronavirus
  REGION 1..8: note = Table A: HLA-A*03:02M HLA-A*11:01H HLA-A*36:01H
  source 1..8: note = Severe acute respiratory syndrome coronavirus 2
KVDTANPK

SEQ ID NO: 702 - protein, 8 aa, Severe acute respiratory syndrome-related coronavirus
  REGION 1..8: note = Table A: HLA-C*15:05H
  source 1..8: note = Severe acute respiratory syndrome coronavirus 2
QPGQTFSV

SEQ ID NO: 703 - protein, 8 aa, Severe acute respiratory syndrome-related coronavirus
  REGION 1..8: note = Table A: HLA-A*02:03H
  source 1..8: note = Severe acute respiratory syndrome coronavirus 2
YNGSPSGV

SEQ ID NO: 704 - protein, 8 aa, Severe acute respiratory syndrome-related coronavirus
  REGION 1..8: note = Table A: HLA-B*39:01M
  source 1..8: note = Severe acute respiratory syndrome coronavirus 2
NGSPSGVY

SEQ ID NO: 705 - protein, 8 aa, Severe acute respiratory syndrome-related coronavirus
  REGION 1..8: note = Table A: HLA-C*15:05H
  source 1..8: note = Severe acute respiratory syndrome coronavirus 2
SPSGVYQC

SEQ ID NO: 706 - protein, 8 aa, Severe acute respiratory syndrome-related coronavirus
  REGION 1..8: note = Table A: HLA-B*58:02H HLA-B*52:01M HLA-B*38:02H HLA-B*13:02H
  source 1..8: note = Severe acute respiratory syndrome coronavirus 2
AMRPNFTI

SEQ ID NO: 707 - protein, 8 aa, Severe acute respiratory syndrome-related coronavirus
  REGION 1..8: note = Table A: HLA-C*03:03M HLA-C*03:04M HLA-C*15:05H HLA-C*15:02H HLA-C*17:01M HLA-A*66:01H
  source 1..8: note = Severe acute respiratory syndrome coronavirus 2
FTIKGSFL

SEQ ID NO: 708 - protein, 8 aa, Severe acute respiratory syndrome-related coronavirus
  REGION 1..8: note = Table A: HLA-B*37:01H
  source 1..8: note = Severe acute respiratory syndrome coronavirus 2
IDYDCVSF

SEQ ID NO: 709 - protein, 8 aa, Severe acute respiratory syndrome-related coronavirus
  REGION 1..8: note = Table A: HLA-C*14:02M HLA-C*14:03M
  source 1..8: note = Severe acute respiratory syndrome coronavirus 2
CYMHHMEL

SEQ ID NO: 710 - protein, 8 aa, Severe acute respiratory syndrome-related coronavirus
  REGION 1..8: note = Table A: HLA-B*18:01H
  source 1..8: note = Severe acute respiratory syndrome coronavirus 2
MELPTGVH

SEQ ID NO: 711 - protein, 8 aa, Severe acute respiratory syndrome-related coronavirus
  REGION 1..8: note = Table A: HLA-B*07:05H
  source 1..8: note = Severe acute respiratory syndrome coronavirus 2
TDLEGNFY

SEQ ID NO: 712 - protein, 8 aa, Severe acute respiratory syndrome-related coronavirus
  REGION 1..8: note = Table A: HLA-A*11:02H HLA-A*33:01H HLA-A*33:03M HLA-C*06:02H HLA-C*03:03H HLA-A*34:02H HLA-A*31:01H
  source 1..8: note = Severe acute respiratory syndrome coronavirus 2
FYGPFVDR

SEQ ID NO: 713 - protein, 8 aa, Severe acute respiratory syndrome-related coronavirus
  REGION 1..8: note = Table A: HLA-B*14:01H
  source 1..8: note = Severe acute respiratory syndrome coronavirus 2
DRQTAQAA

SEQ ID NO: 714 - protein, 8 aa, Severe acute respiratory syndrome-related coronavirus
  REGION 1..8: note = Table A: HLA-C*15:05H
  source 1..8: note = Severe acute respiratory syndrome coronavirus 2
GTDTTITV

SEQ ID NO: 715 - protein, 8 aa, Severe acute respiratory syndrome-related coronavirus
  REGION 1..8: note = Table A: HLA-A*68:02H
  source 1..8: note = Severe acute respiratory syndrome coronavirus 2
DTTITVNV

SEQ ID NO: 716 - protein, 8 aa, Severe acute respiratory syndrome-related coronavirus
  REGION 1..8: note = Table A: HLA-C*15:05H
  source 1..8: note = Severe acute respiratory syndrome coronavirus 2
TTITVNVL

SEQ ID NO: 717 - protein, 8 aa, Severe acute respiratory syndrome-related coronavirus
  REGION 1..8: note = Table A: HLA-B*58:01H
  source 1..8: note = Severe acute respiratory syndrome coronavirus 2
ITVNVLAW

SEQ ID NO: 718 - protein, 8 aa, Severe acute respiratory syndrome-related coronavirus
  REGION 1..8: note = Table A: HLA-B*58:01H HLA-B*44:03H HLA-B*15:13H HLA-B*57:03H HLA-B*13:01H
  source 1..8: note = Severe acute respiratory syndrome coronavirus 2
AVINGDRW

SEQ ID NO: 719 - protein, 8 aa, Severe acute respiratory syndrome-related coronavirus
  REGION 1..8: note = Table A: HLA-B*18:01H HLA-B*40:02H HLA-B*07:05H
  source 1..8: note = Severe acute respiratory syndrome coronavirus 2
NDFNLVAM

SEQ ID NO: 720 - protein, 8 aa, Severe acute respiratory syndrome-related coronavirus
  REGION 1..8: note = Table A: HLA-A*36:01H HLA-A*29:02H HLA-B*15:02H
  source 1..8: note = Severe acute respiratory syndrome coronavirus 2
FNLVAMKY

SEQ ID NO: 721 - protein, 8 aa, Severe acute respiratory syndrome-related coronavirus
  REGION 1..8: note = Table A: HLA-B*51:01H
  source 1..8: note = Severe acute respiratory syndrome coronavirus 2
EPLTQDHV

SEQ ID NO: 722 - protein, 8 aa, Severe acute respiratory syndrome-related coronavirus
  REGION 1..8: note = Table A: HLA-B*39:06H HLA-B*39:01H
  source 1..8: note = Severe acute respiratory syndrome coronavirus 2
DHVDILGP

SEQ ID NO: 723 - protein, 8 aa, Severe acute respiratory syndrome-related coronavirus
  REGION 1..8: note = Table A: HLA-C*08:02H
  source 1..8: note = Severe acute respiratory syndrome coronavirus 2
HVDILGPL

SEQ ID NO: 724 - protein, 8 aa, Severe acute respiratory syndrome-related coronavirus
  REGION 1..8: note = Table A: HLA-B*48:01M HLA-B*52:01H HLA-B*15:01H HLA-B*39:01H
  source 1..8: note = Severe acute respiratory syndrome coronavirus 2
AQTGIAVL

SEQ ID NO: 725 - protein, 8 aa, Severe acute respiratory syndrome-related coronavirus
  REGION 1..8: note = Table A: HLA-C*16:01H
  source 1..8: note = Severe acute respiratory syndrome coronavirus 2
CASLKELL

SEQ ID NO: 726 - protein, 8 aa, Severe acute respiratory syndrome-related coronavirus
  REGION 1..8: note = Table A: HLA-B*37:01M HLA-B*40:02H HLA-B*41:02H
  source 1..8: note = Severe acute respiratory syndrome coronavirus 2
KELLQNGM

SEQ ID NO: 727 - protein, 8 aa, Severe acute respiratory syndrome-related coronavirus
  REGION 1..8: note = Table A: HLA-B*51:01H
  source 1..8: note = Severe acute respiratory syndrome coronavirus 2
NGMNGRTI

SEQ ID NO: 728 - protein, 8 aa, Severe acute respiratory syndrome-related coronavirus
  REGION 1..8: note = Table A: HLA-C*03:03H HLA-C*03:04H HLA-C*15:05H
  source 1..8: note = Severe acute respiratory syndrome coronavirus 2
RTILGSAL

SEQ ID NO: 729 - protein, 8 aa, Severe acute respiratory syndrome-related coronavirus
  REGION 1..8: note = Table A: HLA-B*18:01H
  source 1..8: note = Severe acute respiratory syndrome coronavirus 2
LEDEFTPF

SEQ ID NO: 730 - protein, 8 aa, Severe acute respiratory syndrome-related coronavirus
  REGION 1..8: note = Table A: HLA-B*18:01M HLA-B*07:05M
  source 1..8: note = Severe acute respiratory syndrome coronavirus 2
DEFTPFDV

SEQ ID NO: 731 - protein, 8 aa, Severe acute respiratory syndrome-related coronavirus
  REGION 1..8: note = Table A: HLA-B*39:06M HLA-B*50:01H
  source 1..8: note = Severe acute respiratory syndrome coronavirus 2
SGVTFQSA

SEQ ID NO: 732 - protein, 8 aa, Severe acute respiratory syndrome-related coronavirus
  REGION 1..8: note = Table A: HLA-A*03:02H HLA-A*11:01H HLA-A*11:02H HLA-C*03:03H HLA-A*34:02H
  source 1..8: note = Severe acute respiratory syndrome coronavirus 2
VTFQSAVK

SEQ ID NO: 733 - protein, 8 aa, Severe acute respiratory syndrome-related coronavirus
  REGION 1..8: note = Table A: HLA-A*33:03H
  source 1..8: note = Severe acute respiratory syndrome coronavirus 2
TFQSAVKR

SEQ ID NO: 734 - protein, 8 aa, Severe acute respiratory syndrome-related coronavirus
  REGION 1..8: note = Table A: HLA-B*58:02H HLA-B*52:01H
  source 1..8: note = Severe acute respiratory syndrome coronavirus 2
QSAVKRTI

SEQ ID NO: 735 - protein, 8 aa, Severe acute respiratory syndrome-related coronavirus
  REGION 1..8: note = Table A: HLA-A*32:01H
  source 1..8: note = Severe acute respiratory syndrome coronavirus 2
TIKGTHHW

SEQ ID NO: 736 - protein, 8 aa, Severe acute respiratory syndrome-related coronavirus
  REGION 1..8: note = Table A: HLA-B*58:02H
  source 1..8: note = Severe acute respiratory syndrome coronavirus 2
KGTHHWLL

SEQ ID NO: 737 - protein, 8 aa, Severe acute respiratory syndrome-related coronavirus
  REGION 1..8: note = Table A: HLA-B*52:01H HLA-B*38:02H
  source 1..8: note = Severe acute respiratory syndrome coronavirus 2
HHWLLLTI

SEQ ID NO: 738 - protein, 8 aa, Severe acute respiratory syndrome-related coronavirus
  REGION 1..8: note = Table A: HLA-B*58:01M HLA-B*15:13M HLA-B*38:02H
  source 1..8: note = Severe acute respiratory syndrome coronavirus 2
VLVQSTQW

SEQ ID NO: 739 - protein, 8 aa, Severe acute respiratory syndrome-related coronavirus
  REGION 1..8: note = Table A: HLA-C*14:02H HLA-C*14:03H
  source 1..8: note = Severe acute respiratory syndrome coronavirus 2
FFLYENAF

SEQ ID NO: 740 - protein, 8 aa, Severe acute respiratory syndrome-related coronavirus
  REGION 1..8: note = Table A: HLA-C*16:01H HLA-C*03:02H HLA-B*35:03M HLA-C*15:05H HLA-C*12:03H HLA-B*35:01M HLA-B*35:02H HLA-B*51:01H HLA-B*35:07M HLA-C*08:01H HLA-B*35:12H HLA-B*38:02H HLA-B*54:01H HLA-B*15:02H HLA-B*07:05H
  source 1..8: note = Severe acute respiratory syndrome coronavirus 2
NAFLPFAM

SEQ ID NO: 741 - protein, 8 aa, Severe acute respiratory syndrome-related coronavirus
  REGION 1..8: note = Table A: HLA-C*15:05M HLA-B*51:01H HLA-B*54:01H HLA-B*07:05H
  source 1..8: note = Severe acute respiratory syndrome coronavirus 2
LPFAMGII

SEQ ID NO: 742 - protein, 8 aa, Severe acute respiratory syndrome-related coronavirus
  REGION 1..8: note = Table A: HLA-C*03:02H HLA-B*35:01H HLA-B*35:07H HLA-B*15:02H
  source 1..8: note = Severe acute respiratory syndrome coronavirus 2
FAMGIIAM

SEQ ID NO: 743 - protein, 8 aa, Severe acute respiratory syndrome-related coronavirus
  REGION 1..8: note = Table A: HLA-B*39:06H
  source 1..8: note = Severe acute respiratory syndrome coronavirus 2
MGIIAMSA

SEQ ID NO: 744 - protein, 8 aa, Severe acute respiratory syndrome-related coronavirus
  REGION 1..8: note = Table A: HLA-B*35:01H
  source 1..8: note = Severe acute respiratory syndrome coronavirus 2
IAMSAFAM

SEQ ID NO: 745 - protein, 8 aa, Severe acute respiratory syndrome-related coronavirus
  REGION 1..8: note = Table A: HLA-B*58:01H
  source 1..8: note = Severe acute respiratory syndrome coronavirus 2
MSAFAMMF

SEQ ID NO: 746 - protein, 8 aa, Severe acute respiratory syndrome-related coronavirus
  REGION 1..8: note = Table A: HLA-C*15:05H HLA-B*51:01M HLA-B*52:01H
  source 1..8: note = Severe acute respiratory syndrome coronavirus 2
SAFAMMFV

SEQ ID NO: 747 - protein, 8 aa, Severe acute respiratory syndrome-related coronavirus
  REGION 1..8: note = Table A: HLA-C*03:02H
  source 1..8: note = Severe acute respiratory syndrome coronavirus 2
FAMMFVKH

SEQ ID NO: 748 - protein, 8 aa, Severe acute respiratory syndrome-related coronavirus
  REGION 1..8: note = Table A: HLA-A*11:02H
  source 1..8: note = Severe acute respiratory syndrome coronavirus 2
AMMFVKHK

SEQ ID NO: 749 - protein, 8 aa, Severe acute respiratory syndrome-related coronavirus
  REGION 1..8: note = Table A: HLA-B*08:01H
  source 1..8: note = Severe acute respiratory syndrome coronavirus 2
FVKHKHAF

SEQ ID NO: 750 - protein, 8 aa, Severe acute respiratory syndrome-related coronavirus
  REGION 1..8: note = Table A: HLA-A*02:07H
  source 1..8: note = Severe acute respiratory syndrome coronavirus 2
LLPSLATV

SEQ ID NO: 751 - protein, 8 aa, Severe acute respiratory syndrome-related coronavirus
  REGION 1..8: note = Table A: HLA-B*55:02H HLA-B*54:01H
  source 1..8: note = Severe acute respiratory syndrome coronavirus 2
LPSLATVA

SEQ ID NO: 752 - protein, 8 aa, Severe acute respiratory syndrome-related coronavirus
  REGION 1..8: note = Table A: HLA-B*38:02H
  source 1..8: note = Severe acute respiratory syndrome coronavirus 2
VAYFNMVY

SEQ ID NO: 753 - protein, 8 aa, Severe acute respiratory syndrome-related coronavirus
  REGION 1..8: note = Table A: HLA-C*14:03H
  source 1..8: note = Severe acute respiratory syndrome coronavirus 2
AYFNMVYM

SEQ ID NO: 754 - protein, 8 aa, Severe acute respiratory syndrome-related coronavirus
  REGION 1..8: note = Table A: HLA-B*58:01H HLA-B*57:01H HLA-A*25:01H HLA-B*53:01H HLA-B*38:02H HLA-A*32:01H HLA-B*57:03H
  source 1..8: note = Severe acute respiratory syndrome coronavirus 2
MVYMPASW

SEQ ID NO: 755 - protein, 8 aa, Severe acute respiratory syndrome-related coronavirus
  REGION 1..8: note = Table A: HLA-C*14:03H
  source 1..8: note = Severe acute respiratory syndrome coronavirus 2
VYMPASWV

SEQ ID NO: 756 - protein, 8 aa, Severe acute respiratory syndrome-related coronavirus
  REGION 1..8: note = Table A: HLA-A*34:01H
  source 1..8: note = Severe acute respiratory syndrome coronavirus 2
MPASWVMR

SEQ ID NO: 757 - protein, 8 aa, Severe acute respiratory syndrome-related coronavirus
  REGION 1..8: note = Table A: HLA-C*15:05H
  source 1..8: note = Severe acute respiratory syndrome coronavirus 2
PASWVMRI

SEQ ID NO: 758 - protein, 8 aa, Severe acute respiratory syndrome-related coronavirus
  REGION 1..8: note = Table A: HLA-B*35:02H HLA-B*37:01H HLA-B*40:02H HLA-B*41:02H
  source 1..8: note = Severe acute respiratory syndrome coronavirus 2
LDMVDTSL

SEQ ID NO: 759 - protein, 8 aa, Severe acute respiratory syndrome-related coronavirus
  REGION 1..8: note = Table A: HLA-B*37:01H
  source 1..8: note = Severe acute respiratory syndrome coronavirus 2
VDTSLSGF

SEQ ID NO: 760 - protein, 8 aa, Severe acute respiratory syndrome-related coronavirus
  REGION 1..8: note = Table A: HLA-B*58:02H HLA-C*15:05H HLA-C*08:01H HLA-B*57:03H
  source 1..8: note = Severe acute respiratory syndrome coronavirus 2
TSLSGFKL

SEQ ID NO: 761 - protein, 8 aa, Severe acute respiratory syndrome-related coronavirus
  REGION 1..8: note = Table A: HLA-B*52:01M
  source 1..8: note = Severe acute respiratory syndrome coronavirus 2
VMYASAVV

SEQ ID NO: 762 - protein, 8 aa, Severe acute respiratory syndrome-related coronavirus
  REGION 1..8: note = Table A: HLA-C*17:01M
  source 1..8: note = Severe acute respiratory syndrome coronavirus 2
YASAVVLL

SEQ ID NO: 763 - protein, 8 aa, Severe acute respiratory syndrome-related coronavirus
  REGION 1..8: note = Table A: HLA-C*15:05H HLA-C*15:02H HLA-B*52:01H HLA-B*13:02H
  source 1..8: note = Severe acute respiratory syndrome coronavirus 2
ASAVVLLI

SEQ ID NO: 764 - protein, 8 aa, Severe acute respiratory syndrome-related coronavirus
  REGION 1..8: note = Table A: HLA-C*03:02H HLA-C*15:05H
  source 1..8: note = Severe acute respiratory syndrome coronavirus 2
SAVVLLIL

SEQ ID NO: 765 - protein, 8 aa, Severe acute respiratory syndrome-related coronavirus
  REGION 1..8: note = Table A: HLA-B*14:01H HLA-B*52:01H HLA-B*38:02H
  source 1..8: note = Severe acute respiratory syndrome coronavirus 2
ILMTARTV

SEQ ID NO: 766 - protein, 8 aa, Severe acute respiratory syndrome-related coronavirus
  REGION 1..8: note = Table A: HLA-A*34:01H
  source 1..8: note = Severe acute respiratory syndrome coronavirus 2
TVYDDGAR

SEQ ID NO: 767 - protein, 8 aa, Severe acute respiratory syndrome-related coronavirus
  REGION 1..8: note = Table A: HLA-A*02:11H
  source 1..8: note = Severe acute respiratory syndrome coronavirus 2
RVWTLMNV

SEQ ID NO: 768 - protein, 8 aa, Severe acute respiratory syndrome-related coronavirus
  REGION 1..8: note = Table A: HLA-C*15:05H HLA-A*02:04H HLA-A*02:01H HLA-B*38:02H
  source 1..8: note = Severe acute respiratory syndrome coronavirus 2
TLMNVLTL

SEQ ID NO: 769 - protein, 8 aa, Severe acute respiratory syndrome-related coronavirus
  REGION 1..8: note = Table A: HLA-B*15:02H HLA-B*07:05H
  source 1..8: note = Severe acute respiratory syndrome coronavirus 2
MNVLTLVY

SEQ ID NO: 770 - protein, 8 aa, Severe acute respiratory syndrome-related coronavirus
  REGION 1..8: note = Table A: HLA-A*11:02H HLA-A*34:02H
  source 1..8: note = Severe acute respiratory syndrome coronavirus 2
NVLTLVYK

SEQ ID NO: 771 - protein, 8 aa, Severe acute respiratory syndrome-related coronavirus
  REGION 1..8: note = Table A: HLA-A*02:11H HLA-A*02:04H HLA-A*02:02H HLA-B*13:02H
  source 1..8: note = Severe acute respiratory syndrome coronavirus 2
VLTLVYKV

SEQ ID NO: 772 - protein, 8 aa, Severe acute respiratory syndrome-related coronavirus
  REGION 1..8: note = Table A: HLA-C*03:04H HLA-C*15:05H
  source 1..8: note = Severe acute respiratory syndrome coronavirus 2
KVYYGNAL

SEQ ID NO: 773 - protein, 8 aa, Severe acute respiratory syndrome-related coronavirus
  REGION 1..8: note = Table A: HLA-B*46:01H HLA-A*30:02H HLA-B*38:02H HLA-B*15:01M
  source 1..8: note = Severe acute respiratory syndrome coronavirus 2
IISVTSNY

SEQ ID NO: 774 - protein, 8 aa, Severe acute respiratory syndrome-related coronavirus
  REGION 1..8: note = Table A: HLA-A*02:11H HLA-A*68:02H HLA-C*15:05M HLA-C*12:03H HLA-C*15:02M HLA-A*02:06H HLA-B*14:01H HLA-A*02:01H HLA-A*02:03M HLA-B*51:01M HLA-B*52:01H HLA-C*08:01H HLA-B*38:02H HLA-B*39:06H HLA-B*39:01H HLA-B*07:05H
  REGION 1..8: note = CONT. FROM ABOVE: HLA-B*13:02H HLA-B*49:01M
  source 1..8: note = Severe acute respiratory syndrome coronavirus 2
YSGVVTTV

SEQ ID NO: 775 - protein, 8 aa, Severe acute respiratory syndrome-related coronavirus
  REGION 1..8: note = Table A: HLA-B*18:01H HLA-C*15:05H HLA-B*15:02H HLA-B*07:05H HLA-B*41:02H
  source 1..8: note = Severe acute respiratory syndrome coronavirus 2
SGVVTTVM

SEQ ID NO: 776 - protein, 8 aa, Severe acute respiratory syndrome-related coronavirus
  REGION 1..8: note = Table A: HLA-C*15:05M HLA-C*15:02H HLA-C*17:01H HLA-C*07:04H
  source 1..8: note = Severe acute respiratory syndrome coronavirus 2
VVTTVMFL

SEQ ID NO: 777 - protein, 8 aa, Severe acute respiratory syndrome-related coronavirus
  REGION 1..8: note = Table A: HLA-A*66:01H
  source 1..8: note = Severe acute respiratory syndrome coronavirus 2
TTVMFLAR

SEQ ID NO: 778 - protein, 8 aa, Severe acute respiratory syndrome-related coronavirus
  REGION 1..8: note = Table A: HLA-B*58:02H HLA-B*52:01M
  source 1..8: note = Severe acute respiratory syndrome coronavirus 2
VMFLARGI

SEQ ID NO: 779 - protein, 8 aa, Severe acute respiratory syndrome-related coronavirus
  REGION 1..8: note = Table A: HLA-B*15:02H
  source 1..8: note = Severe acute respiratory syndrome coronavirus 2
FLARGIVF

SEQ ID NO: 780 - protein, 8 aa, Severe acute respiratory syndrome-related coronavirus
  REGION 1..8: note = Table A: HLA-B*15:02H
  source 1..8: note = Severe acute respiratory syndrome coronavirus 2
IVFMCVEY

SEQ ID NO: 781 - protein, 8 aa, Severe acute respiratory syndrome-related coronavirus
  REGION 1..8: note = Table A: HLA-C*14:02H HLA-C*14:03H HLA-C*03:03H HLA-C*03:04H HLA-C*01:02M
  source 1..8: note = Severe acute respiratory syndrome coronavirus 2
FFITGNTL

SEQ ID NO: 782 - protein, 8 aa, Severe acute respiratory syndrome-related coronavirus
  REGION 1..8: note = Table A: HLA-B*14:02M HLA-B*14:01H
  source 1..8: note = Severe acute respiratory syndrome coronavirus 2
NRYFRLTL

SEQ ID NO: 783 - protein, 8 aa, Severe acute respiratory syndrome-related coronavirus
  REGION 1..8: note = Table A: HLA-A*02:02H
  source 1..8: note = Severe acute respiratory syndrome coronavirus 2
TLGVYDYL

SEQ ID NO: 784 - protein, 8 aa, Severe acute respiratory syndrome-related coronavirus
  REGION 1..8: note = Table A: HLA-B*46:01M HLA-B*38:02H HLA-B*15:01H HLA-B*15:02H
  source 1..8: note = Severe acute respiratory syndrome coronavirus 2
YLVSTQEF

SEQ ID NO: 785 - protein, 8 aa, Severe acute respiratory syndrome-related coronavirus
  REGION 1..8: note = Table A: HLA-B*58:01M HLA-A*36:01H HLA-A*30:02H
  source 1..8: note = Severe acute respiratory syndrome coronavirus 2
VSTQEFRY

SEQ ID NO: 786 - protein, 8 aa, Severe acute respiratory syndrome-related coronavirus
  REGION 1..8: note = Table A: HLA-C*14:02H
  source 1..8: note = Severe acute respiratory syndrome coronavirus 2
RYMNSQGL

SEQ ID NO: 787 - protein, 8 aa, Severe acute respiratory syndrome-related coronavirus
  REGION 1..8: note = Table A: HLA-A*03:01H HLA-A*03:02H HLA-A*11:01M HLA-A*11:02M
  source 1..8: note = Severe acute respiratory syndrome coronavirus 2
SQGLLPPK

SEQ ID NO: 788 - protein, 8 aa, Severe acute respiratory syndrome-related coronavirus
  REGION 1..8: note = Table A: HLA-C*08:01H
  source 1..8: note = Severe acute respiratory syndrome coronavirus 2
NSIDAFKL

SEQ ID NO: 789 - protein, 8 aa, Severe acute respiratory syndrome-related coronavirus
  REGION 1..8: note = Table A: HLA-A*34:02H HLA-B*51:01H
  source 1..8: note = Severe acute respiratory syndrome coronavirus 2
DAFKLNIK

SEQ ID NO: 790 - protein, 8 aa, Severe acute respiratory syndrome-related coronavirus
  REGION 1..8: note = Table A: HLA-C*15:05H
  source 1..8: note = Severe acute respiratory syndrome coronavirus 2
PCIKVATV

SEQ ID NO: 791 - protein, 8 aa, Severe acute respiratory syndrome-related coronavirus
  REGION 1..8: note = Table A: HLA-A*03:02H
  source 1..8: note = Severe acute respiratory syndrome coronavirus 2
KVATVQSK

SEQ ID NO: 792 - protein, 8 aa, Severe acute respiratory syndrome-related coronavirus
  REGION 1..8: note = Table A: HLA-C*16:01H HLA-C*15:05H HLA-B*51:01H
  source 1..8: note = Severe acute respiratory syndrome coronavirus 2
VATVQSKM

SEQ ID NO: 793 - protein, 8 aa, Severe acute respiratory syndrome-related coronavirus
  REGION 1..8: note = Table A: HLA-B*52:01M HLA-B*13:02H
  source 1..8: note = Severe acute respiratory syndrome coronavirus 2
VQSKMSDV

SEQ ID NO: 794 - protein, 8 aa, Severe acute respiratory syndrome-related coronavirus
  REGION 1..8: note = Table A: HLA-B*40:02H
  source 1..8: note = Severe acute respiratory syndrome coronavirus 2
SDVKCTSV

SEQ ID NO: 795 - protein, 8 aa, Severe acute respiratory syndrome-related coronavirus
  REGION 1..8: note = Table A: HLA-C*15:05H HLA-B*51:01H HLA-B*52:01H
  source 1..8: note = Severe acute respiratory syndrome coronavirus 2
TSVVLLSV

SEQ ID NO: 796 - protein, 8 aa, Severe acute respiratory syndrome-related coronavirus
  REGION 1..8: note = Table A: HLA-C*15:05H
  source 1..8: note = Severe acute respiratory syndrome coronavirus 2
SVVLLSVL

SEQ ID NO: 797 - protein, 8 aa, Severe acute respiratory syndrome-related coronavirus
  REGION 1..8: note = Table A: HLA-A*02:04M HLA-B*14:01H HLA-A*02:02H HLA-A*02:03H
  source 1..8: note = Severe acute respiratory syndrome coronavirus 2
LLSVLQQL

SEQ ID NO: 798 - protein, 8 aa, Severe acute respiratory syndrome-related coronavirus
  REGION 1..8: note = Table A: HLA-B*13:02H
  source 1..8: note = Severe acute respiratory syndrome coronavirus 2
SVLQQLRV

SEQ ID NO: 799 - protein, 8 aa, Severe acute respiratory syndrome-related coronavirus
  REGION 1..8: note = Table A: HLA-B*44:02H HLA-B*44:03M
  source 1..8: note = Severe acute respiratory syndrome coronavirus 2
VESSSKLW

SEQ ID NO: 800 - protein, 8 aa, Severe acute respiratory syndrome-related coronavirus
  REGION 1..8: note = Table A: HLA-B*39:06H
  source 1..8: note = Severe acute respiratory syndrome coronavirus 2
LHNDILLA

SEQ ID NO: 801 - protein, 8 aa, Severe acute respiratory syndrome-related coronavirus
  REGION 1..8: note = Table A: HLA-A*36:01H
  source 1..8: note = Severe acute respiratory syndrome coronavirus 2
HNDILLAK

SEQ ID NO: 802 - protein, 8 aa, Severe acute respiratory syndrome-related coronavirus
  REGION 1..8: note = Table A: HLA-A*34:02H
  source 1..8: note = Severe acute respiratory syndrome coronavirus 2
DTTEAFEK

SEQ ID NO: 803 - protein, 8 aa, Severe acute respiratory syndrome-related coronavirus
  REGION 1..8: note = Table A: HLA-B*49:01H
  source 1..8: note = Severe acute respiratory syndrome coronavirus 2
TEAFEKMV

SEQ ID NO: 804 - protein, 8 aa, Severe acute respiratory syndrome-related coronavirus
  REGION 1..8: note = Table A: HLA-B*40:02H HLA-B*41:02M
  source 1..8: note = Severe acute respiratory syndrome coronavirus 2
FEKMVSLL

SEQ ID NO: 805 - protein, 8 aa, Severe acute respiratory syndrome-related coronavirus
  REGION 1..8: note = Table A: HLA-B*52:01H
  source 1..8: note = Severe acute respiratory syndrome coronavirus 2
KMVSLLSV

SEQ ID NO: 806 - protein, 8 aa, Severe acute respiratory syndrome-related coronavirus
  REGION 1..8: note = Table A: HLA-C*15:05H HLA-C*17:01H HLA-B*40:02H
  source 1..8: note = Severe acute respiratory syndrome coronavirus 2
GAVDINKL

SEQ ID NO: 807 - protein, 8 aa, Severe acute respiratory syndrome-related coronavirus
  REGION 1..8: note = Table A: HLA-B*45:01H
  source 1..8: note = Severe acute respiratory syndrome coronavirus 2
EEMLDNRA

SEQ ID NO: 808 - protein, 8 aa, Severe acute respiratory syndrome-related coronavirus
  REGION 1..8: note = Table A: HLA-B*08:01H HLA-A*02:11H HLA-B*14:01H HLA-C*08:02H HLA-B*07:02H
  source 1..8: note = Severe acute respiratory syndrome coronavirus 2
MLDNRATL

SEQ ID NO: 809 - protein, 8 aa, Severe acute respiratory syndrome-related coronavirus
  REGION 1..8: note = Table A: HLA-B*14:02H HLA-B*14:01M
  source 1..8: note = Severe acute respiratory syndrome coronavirus 2
NRATLQAI

SEQ ID NO: 810 - protein, 8 aa, Severe acute respiratory syndrome-related coronavirus
  REGION 1..8: note = Table A: HLA-B*46:01H HLA-B*38:02H HLA-B*15:01M HLA-B*15:02M HLA-B*15:03H HLA-B*39:01H
  source 1..8: note = Severe acute respiratory syndrome coronavirus 2
LQAIASEF

SEQ ID NO: 811 - protein, 8 aa, Severe acute respiratory syndrome-related coronavirus
  REGION 1..8: note = Table A: HLA-C*03:03H HLA-C*03:02H HLA-C*03:04H HLA-C*15:05H HLA-C*08:01H HLA-B*38:02H HLA-B*07:05H
  source 1..8: note = Severe acute respiratory syndrome coronavirus 2
IASEFSSL

SEQ ID NO: 812 - protein, 8 aa, Severe acute respiratory syndrome-related coronavirus
  REGION 1..8: note = Table A: HLA-B*39:06H HLA-B*54:01H
  source 1..8: note = Severe acute respiratory syndrome coronavirus 2
SSLPSYAA

SEQ ID NO: 813 - protein, 8 aa, Severe acute respiratory syndrome-related coronavirus
  REGION 1..8: note = Table A: HLA-B*46:01H HLA-B*35:01M HLA-B*35:07H HLA-B*38:02H HLA-B*39:01H
  source 1..8: note = Severe acute respiratory syndrome coronavirus 2
FATAQEAY

SEQ ID NO: 814 - protein, 8 aa, Severe acute respiratory syndrome-related coronavirus
  REGION 1..8: note = Table A: HLA-B*49:01H
  source 1..8: note = Severe acute respiratory syndrome coronavirus 2
QEAYEQAV

SEQ ID NO: 815 - protein, 8 aa, Severe acute respiratory syndrome-related coronavirus
  REGION 1..8: note = Table A: HLA-B*39:06H HLA-B*54:01H
  source 1..8: note = Severe acute respiratory syndrome coronavirus 2
EAYEQAVA

SEQ ID NO: 816 - protein, 8 aa, Severe acute respiratory syndrome-related coronavirus
  REGION 1..8: note = Table A: HLA-C*04:03H HLA-B*35:02M HLA-C*08:01H HLA-C*08:02M HLA-B*35:12M HLA-B*39:01H HLA-C*05:01M
  source 1..8: note = Severe acute respiratory syndrome coronavirus 2
NGDSEVVL

SEQ ID NO: 817 - protein, 8 aa, Severe acute respiratory syndrome-related coronavirus
  REGION 1..8: note = Table A: HLA-A*03:02H HLA-A*11:01H HLA-A*11:02H HLA-A*36:01H HLA-B*27:02H HLA-B*37:01M
  source 1..8: note = Severe acute respiratory syndrome coronavirus 2
GDSEVVLK

SEQ ID NO: 818 - protein, 8 aa, Severe acute respiratory syndrome-related coronavirus
  REGION 1..8: note = Table A: HLA-A*36:01H
  source 1..8: note = Severe acute respiratory syndrome coronavirus 2
DSEVVLKK

SEQ ID NO: 819 - protein, 8 aa, Severe acute respiratory syndrome-related coronavirus
  REGION 1..8: note = Table A: HLA-B*44:05H HLA-B*44:03H HLA-B*18:01H HLA-B*40:01H HLA-B*40:02H HLA-B*40:06H HLA-B*07:05H HLA-B*41:02M HLA-B*49:01M
  source 1..8: note = Severe acute respiratory syndrome coronavirus 2
SEVVLKKL

SEQ ID NO: 820 - protein, 8 aa, Severe acute respiratory syndrome-related coronavirus
  REGION 1..8: note = Table A: HLA-B*45:01H HLA-B*50:01H
  source 1..8: note = Severe acute respiratory syndrome coronavirus 2
SEFDRDAA

SEQ ID NO: 821 - protein, 8 aa, Severe acute respiratory syndrome-related coronavirus
  REGION 1..8: note = Table A: HLA-C*04:01H HLA-B*35:02H
  source 1..8: note = Severe acute respiratory syndrome coronavirus 2
EFDRDAAM

SEQ ID NO: 822 - protein, 8 aa, Severe acute respiratory syndrome-related coronavirus
  REGION 1..8: note = Table A: HLA-B*51:01H
  source 1..8: note = Severe acute respiratory syndrome coronavirus 2
DAAMQRKL

SEQ ID NO: 823 - protein, 8 aa, Severe acute respiratory syndrome-related coronavirus
  REGION 1..8: note = Table A: HLA-B*52:01M HLA-B*38:02H HLA-B*15:01H HLA-B*15:02H
  source 1..8: note = Severe acute respiratory syndrome coronavirus 2
MQRKLEKM

SEQ ID NO: 824 - protein, 8 aa, Severe acute respiratory syndrome-related coronavirus
  REGION 1..8: note = Table A: HLA-B*45:01H HLA-B*18:01H HLA-B*50:01H
  source 1..8: note = Severe acute respiratory syndrome coronavirus 2
LEKMADQA

SEQ ID NO: 825 - protein, 8 aa, Severe acute respiratory syndrome-related coronavirus
  REGION 1..8: note = Table A: HLA-B*37:01M HLA-B*41:02H
  source 1..8: note = Severe acute respiratory syndrome coronavirus 2
ADQAMTQM

SEQ ID NO: 826 - protein, 8 aa, Severe acute respiratory syndrome-related coronavirus
  REGION 1..8: note = Table A: HLA-B*18:01H HLA-B*35:01H HLA-B*38:02H HLA-B*15:01M HLA-B*15:02H HLA-B*15:03H HLA-B*39:01H HLA-B*07:05H HLA-B*15:11H
  source 1..8: note = Severe acute respiratory syndrome coronavirus 2
DQAMTQMY

SEQ ID NO: 827 - protein, 8 aa, Severe acute respiratory syndrome-related coronavirus
  REGION 1..8: note = Table A: HLA-A*03:01H HLA-A*03:02H HLA-A*11:01H HLA-A*11:02H HLA-A*36:01H HLA-A*34:02H
  source 1..8: note = Severe acute respiratory syndrome coronavirus 2
QAMTQMYK

SEQ ID NO: 828 - protein, 8 aa, Severe acute respiratory syndrome-related coronavirus
  REGION 1..8: note = Table A: HLA-B*49:01H
  source 1..8: note = Severe acute respiratory syndrome coronavirus 2
SEDKRAKV

SEQ ID NO: 829 - protein, 8 aa, Severe acute respiratory syndrome-related coronavirus
  REGION 1..8: note = Table A: HLA-B*08:01H HLA-B*07:04H HLA-B*15:01H
  source 1..8: note = Severe acute respiratory syndrome coronavirus 2
RAKVTSAM

SEQ ID NO: 830 - protein, 8 aa, Severe acute respiratory syndrome-related coronavirus
  REGION 1..8: note = Table A: HLA-C*15:05H
  source 1..8: note = Severe acute respiratory syndrome coronavirus 2
VTSAMQTM

SEQ ID NO: 831 - protein, 8 aa, Severe acute respiratory syndrome-related coronavirus
  REGION 1..8: note = Table A: HLA-C*15:05H
  source 1..8: note = Severe acute respiratory syndrome coronavirus 2
SAMQTMLF

SEQ ID NO: 832 - protein, 8 aa, Severe acute respiratory syndrome-related coronavirus
  REGION 1..8: note = Table A: HLA-B*52:01H
  source 1..8: note = Severe acute respiratory syndrome coronavirus 2
MQTMLFTM

SEQ ID NO: 833 - protein, 8 aa, Severe acute respiratory syndrome-related coronavirus
  REGION 1..8: note = Table A: HLA-C*15:05H
  source 1..8: note = Severe acute respiratory syndrome coronavirus 2
QTMLFTML

SEQ ID NO: 834 - protein, 8 aa, Severe acute respiratory syndrome-related coronavirus
  REGION 1..8: note = Table A: HLA-B*51:01M
  source 1..8: note = Severe acute respiratory syndrome coronavirus 2
DGCVPLNI

SEQ ID NO: 835 - protein, 8 aa, Severe acute respiratory syndrome-related coronavirus
  REGION 1..8: note = Table A: HLA-C*15:05H
  source 1..8: note = Severe acute respiratory syndrome coronavirus 2
VPLNIIPL

SEQ ID NO: 836 - protein, 8 aa, Severe acute respiratory syndrome-related coronavirus
  REGION 1..8: note = Table A: HLA-B*39:06H HLA-B*54:01H
  source 1..8: note = Severe acute respiratory syndrome coronavirus 2
NIIPLTTA

SEQ ID NO: 837 - protein, 8 aa, Severe acute respiratory syndrome-related coronavirus
  REGION 1..8: note = Table A: HLA-C*15:05H HLA-B*51:01M HLA-B*52:01H
  source 1..8: note = Severe acute respiratory syndrome coronavirus 2
TAAKLMVV

SEQ ID NO: 838 - protein, 8 aa, Severe acute respiratory syndrome-related coronavirus
  REGION 1..8: note = Table A: HLA-B*08:01H HLA-B*52:01H
  source 1..8: note = Severe acute respiratory syndrome coronavirus 2
AAKLMVVI

SEQ ID NO: 839 - protein, 8 aa, Severe acute respiratory syndrome-related coronavirus
  REGION 1..8: note = Table A: HLA-B*46:01H HLA-B*15:02H HLA-B*07:05H
  source 1..8: note = Severe acute respiratory syndrome coronavirus 2
LMVVIPDY

SEQ ID NO: 840 - protein, 8 aa, Severe acute respiratory syndrome-related coronavirus
  REGION 1..8: note = Table A: HLA-C*14:02H HLA-C*14:03H
  source 1..8: note = Severe acute respiratory syndrome coronavirus 2
TFTYASAL

SEQ ID NO: 841 - protein, 8 aa, Severe acute respiratory syndrome-related coronavirus
  REGION 1..8: note = Table A: HLA-B*38:02H
  source 1..8: note = Severe acute respiratory syndrome coronavirus 2
YASALWEI

SEQ ID NO: 842 - protein, 8 aa, Severe acute respiratory syndrome-related coronavirus
  REGION 1..8: note = Table A: HLA-A*02:11M HLA-A*02:04M HLA-A*02:07H HLA-B*14:01H HLA-A*02:01H HLA-A*02:03H HLA-B*52:01H HLA-B*38:02H HLA-B*40:06H HLA-B*13:02H
  source 1..8: note = Severe acute respiratory syndrome coronavirus 2
ALWEIQQV

SEQ ID NO: 843 - protein, 8 aa, Severe acute respiratory syndrome-related coronavirus
  REGION 1..8: note = Table A: HLA-C*08:02H HLA-C*05:01H
  source 1..8: note = Severe acute respiratory syndrome coronavirus 2
VVDADSKI

SEQ ID NO: 844 - protein, 8 aa, Severe acute respiratory syndrome-related coronavirus
  REGION 1..8: note = Table A: HLA-B*48:01H HLA-B*44:05M HLA-B*45:01H HLA-C*15:05H HLA-A*02:02H HLA-B*37:01H HLA-B*40:01H HLA-B*40:02M HLA-B*07:05H HLA-B*41:02M HLA-C*07:04M
  source 1..8: note = Severe acute respiratory syndrome coronavirus 2
ADSKIVQL

SEQ ID NO: 845 - protein, 8 aa, Severe acute respiratory syndrome-related coronavirus
  REGION 1..8: note = Table A: HLA-C*15:05H
  source 1..8: note = Severe acute respiratory syndrome coronavirus 2
KIVQLSEI

SEQ ID NO: 846 - protein, 8 aa, Severe acute respiratory syndrome-related coronavirus
  REGION 1..8: note = Table A: HLA-C*04:03H HLA-C*08:02H
  source 1..8: note = Severe acute respiratory syndrome coronavirus 2
SMDNSPNL

SEQ ID NO: 847 - protein, 8 aa, Severe acute respiratory syndrome-related coronavirus
  REGION 1..8: note = Table A: HLA-B*08:01H HLA-B*35:03H HLA-C*15:05M HLA-B*51:01H HLA-B*35:07H HLA-B*38:02H HLA-B*15:02H HLA-B*07:05M
  source 1..8: note = Severe acute respiratory syndrome coronavirus 2
WPLIVTAL

SEQ ID NO: 848 - protein, 8 aa, Severe acute respiratory syndrome-related coronavirus
  REGION 1..8: note = Table A: HLA-A*34:01H HLA-A*66:01H
  source 1..8: note = Severe acute respiratory syndrome coronavirus 2
PLIVTALR

SEQ ID NO: 849 - protein, 8 aa, Severe acute respiratory syndrome-related coronavirus
  REGION 1..8: note = Table A: HLA-B*58:01H HLA-B*58:02M HLA-C*15:05M HLA-C*15:02H HLA-C*17:01H HLA-B*57:03H HLA-C*07:04H
  source 1..8: note = Severe acute respiratory syndrome coronavirus 2
RANSAVKL

SEQ ID NO: 850 - protein, 8 aa, Severe acute respiratory syndrome-related coronavirus
  REGION 1..8: note = Table A: HLA-B*44:05H HLA-B*18:01M HLA-B*14:01H HLA-B*40:01M HLA-B*40:02M HLA-B*39:01H HLA-B*07:05M HLA-B*41:02M
  source 1..8: note = Severe acute respiratory syndrome coronavirus 2
NELSPVAL

SEQ ID NO: 851 - protein, 8 aa, Severe acute respiratory syndrome-related coronavirus
  REGION 1..8: note = Table A: HLA-A*33:03H HLA-A*26:03H HLA-A*68:01H HLA-A*34:01M HLA-A*34:02H HLA-A*66:01H
  source 1..8: note = Severe acute respiratory syndrome coronavirus 2
ELSPVALR

SEQ ID NO: 852 - protein, 8 aa, Severe acute respiratory syndrome-related coronavirus
  REGION 1..8: note = Table A: HLA-C*15:05M HLA-B*55:01H HLA-B*07:02H HLA-B*07:04M HLA-B*07:05M
  source 1..8: note = Severe acute respiratory syndrome coronavirus 2
SPVALRQM

SEQ ID NO: 853 - protein, 8 aa, Severe acute respiratory syndrome-related coronavirus
  REGION 1..8: note = Table A: HLA-A*36:01M HLA-A*01:01H HLA-B*18:01H HLA-B*35:01H HLA-B*39:01H HLA-B*07:05H
  source 1..8: note = Severe acute respiratory syndrome coronavirus 2
TDDNALAY

SEQ ID NO: 854 - protein, 8 aa, Severe acute respiratory syndrome-related coronavirus
  REGION 1..8: note = Table A: HLA-B*07:05H
  source 1..8: note = Severe acute respiratory syndrome coronavirus 2
DDNALAYY

SEQ ID NO: 855 - protein, 8 aa, Severe acute respiratory syndrome-related coronavirus
  REGION 1..8: note = Table A: HLA-A*34:02H
  source 1..8: note = Severe acute respiratory syndrome coronavirus 2
LAYYNTTK

SEQ ID NO: 856 - protein, 8 aa, Severe acute respiratory syndrome-related coronavirus
  REGION 1..8: note = Table A: HLA-A*36:01H
  source 1..8: note = Severe acute respiratory syndrome coronavirus 2
LSDLQDLK

SEQ ID NO: 857 - protein, 8 aa, Severe acute respiratory syndrome-related coronavirus
  REGION 1..8: note = Table A: HLA-B*44:05H HLA-B*44:03H
  source 1..8: note = Severe acute respiratory syndrome coronavirus 2
SDLQDLKW

SEQ ID NO: 858 - protein, 8 aa, Severe acute respiratory syndrome-related coronavirus
  REGION 1..8: note = Table A: HLA-B*37:01H
  source 1..8: note = Severe acute respiratory syndrome coronavirus 2
QDLKWARF

SEQ ID NO: 859 - protein, 8 aa, Severe acute respiratory syndrome-related coronavirus
  REGION 1..8: note = Table A: HLA-B*51:01H
  source 1..8: note = Severe acute respiratory syndrome coronavirus 2
DTPKGPKV

SEQ ID NO: 860 - protein, 8 aa, Severe acute respiratory syndrome-related coronavirus
  REGION 1..8: note = Table A: HLA-B*08:01H
  source 1..8: note = Severe acute respiratory syndrome coronavirus 2
FIKGLNNL

SEQ ID NO: 861 - protein, 8 aa, Severe acute respiratory syndrome-related coronavirus
  REGION 1..8: note = Table A: HLA-B*08:01H
  source 1..8: note = Severe acute respiratory syndrome coronavirus 2
NLNRGMVL

SEQ ID NO: 862 - protein, 8 aa, Severe acute respiratory syndrome-related coronavirus
  REGION 1..8: note = Table A: HLA-C*15:05M HLA-B*07:05H
  source 1..8: note = Severe acute respiratory syndrome coronavirus 2
RGMVLGSL

SEQ ID NO: 863 - protein, 8 aa, Severe acute respiratory syndrome-related coronavirus
  REGION 1..8: note = Table A: HLA-B*54:01H
  source 1..8: note = Severe acute respiratory syndrome coronavirus 2
MVLGSLAA

SEQ ID NO: 864 - protein, 8 aa, Severe acute respiratory syndrome-related coronavirus
  REGION 1..8: note = Table A: HLA-A*02:02H HLA-C*17:01H
  source 1..8: note = Severe acute respiratory syndrome coronavirus 2
SLAATVRL

SEQ ID NO: 865 - protein, 8 aa, Severe acute respiratory syndrome-related coronavirus
  REGION 1..8: note = Table A: HLA-C*16:01H HLA-B*55:01H HLA-B*54:01H
  source 1..8: note = Severe acute respiratory syndrome coronavirus 2
AATVRLQA

SEQ ID NO: 866 - protein, 8 aa, Severe acute respiratory syndrome-related coronavirus
  REGION 1..8: note = Table A: HLA-C*15:05H
  source 1..8: note = Severe acute respiratory syndrome coronavirus 2
QAGNATEV

SEQ ID NO: 867 - protein, 8 aa, Severe acute respiratory syndrome-related coronavirus
  REGION 1..8: note = Table A: HLA-B*35:03M HLA-C*15:05M HLA-B*35:01H HLA-B*35:02H HLA-B*35:12H HLA-B*07:02H HLA-B*39:01H HLA-B*07:05M
  source 1..8: note = Severe acute respiratory syndrome coronavirus 2
VPANSTVL

SEQ ID NO: 868 - protein, 8 aa, Severe acute respiratory syndrome-related coronavirus
  REGION 1..8: note = Table A: HLA-B*54:01H
  source 1..8: note = Severe acute respiratory syndrome coronavirus 2
CAFAVDAA

SEQ ID NO: 869 - protein, 8 aa, Severe acute respiratory syndrome-related coronavirus
  REGION 1..8: note = Table A: HLA-B*54:01H
  source 1..8: note = Severe acute respiratory syndrome coronavirus 2
FAVDAAKA

SEQ ID NO: 870 - protein, 8 aa, Severe acute respiratory syndrome-related coronavirus
  REGION 1..8: note = Table A: HLA-B*15:01H HLA-B*07:05H
  source 1..8: note = Severe acute respiratory syndrome coronavirus 2
AVDAAKAY

SEQ ID NO: 871 - protein, 8 aa, Severe acute respiratory syndrome-related coronavirus
  REGION 1..8: note = Table A: HLA-A*02:11H
  source 1..8: note = Severe acute respiratory syndrome coronavirus 2
KAYKDYLA

SEQ ID NO: 872 - protein, 8 aa, Severe acute respiratory syndrome-related coronavirus
  REGION 1..8: note = Table A: HLA-B*52:01M HLA-B*13:02H
  source 1..8: note = Severe acute respiratory syndrome coronavirus 2
GQPITNCV

SEQ ID NO: 873 - protein, 8 aa, Severe acute respiratory syndrome-related coronavirus
  REGION 1..8: note = Table A: HLA-B*39:06H
  source 1..8: note = Severe acute respiratory syndrome coronavirus 2
THTGTGQA

SEQ ID NO: 874 - protein, 8 aa, Severe acute respiratory syndrome-related coronavirus
  REGION 1..8: note = Table A: HLA-C*15:05H HLA-B*38:02H
  source 1..8: note = Severe acute respiratory syndrome coronavirus 2
HTGTGQAI

SEQ ID NO: 875 - protein, 8 aa, Severe acute respiratory syndrome-related coronavirus
  REGION 1..8: note = Table A: HLA-B*45:01H HLA-B*55:01H HLA-B*39:06H HLA-B*54:01H
  source 1..8: note = Severe acute respiratory syndrome coronavirus 2
AITVTPEA

SEQ ID NO: 876 - protein, 8 aa, Severe acute respiratory syndrome-related coronavirus
  REGION 1..8: note = Table A: HLA-B*35:02H HLA-B*35:12H
  source 1..8: note = Severe acute respiratory syndrome coronavirus 2
TVTPEANM

SEQ ID NO: 877 - protein, 8 aa, Severe acute respiratory syndrome-related coronavirus
  REGION 1..8: note = Table A: HLA-A*03:02H HLA-A*36:01H
  source 1..8: note = Severe acute respiratory syndrome coronavirus 2
HIDHPNPK

SEQ ID NO: 878 - protein, 8 aa, Severe acute respiratory syndrome-related coronavirus
  REGION 1..8: note = Table A: HLA-B*39:06M
  source 1..8: note = Severe acute respiratory syndrome coronavirus 2
VQIPTTCA

SEQ ID NO: 879 - protein, 8 aa, Severe acute respiratory syndrome-related coronavirus
  REGION 1..8: note = Table A: HLA-B*44:05H HLA-C*15:05H HLA-C*01:02H HLA-C*08:01H HLA-C*08:03H HLA-B*37:01H HLA-B*40:02H HLA-B*39:01H HLA-B*07:05H HLA-B*41:02H HLA-C*07:04H
  source 1..8: note = Severe acute respiratory syndrome coronavirus 2
NDPVGFTL

SEQ ID NO: 880 - protein, 8 aa, Severe acute respiratory syndrome-related coronavirus
  REGION 1..8: note = Table A: HLA-A*34:01H HLA-A*34:02H
  source 1..8: note = Severe acute respiratory syndrome coronavirus 2
DPVGFTLK

SEQ ID NO: 881 - protein, 8 aa, Severe acute respiratory syndrome-related coronavirus
  REGION 1..8: note = Table A: HLA-A*02:11H
  source 1..8: note = Severe acute respiratory syndrome coronavirus 2
GMWKGYGC

SEQ ID NO: 882 - protein, 8 aa, Severe acute respiratory syndrome-related coronavirus
  REGION 1..8: note = Table A: HLA-B*14:01H HLA-B*35:02H HLA-B*52:01H HLA-B*38:01H HLA-B*38:02M HLA-B*39:06H HLA-B*15:02H
  source 1..8: note = Severe acute respiratory syndrome coronavirus 2
DQLREPML

SEQ ID NO: 883 - protein, 8 aa, Severe acute respiratory syndrome-related coronavirus
  REGION 1..8: note = Table A: HLA-B*50:01H
  source 1..8: note = Severe acute respiratory syndrome coronavirus 2
REPMLQSA

SEQ ID NO: 884 - protein, 8 aa, Severe acute respiratory syndrome-related coronavirus
  REGION 1..8: note = Table A: HLA-C*04:03M HLA-C*08:02M HLA-C*05:01M
  source 1..8: note = Severe acute respiratory syndrome coronavirus 2
SADAQSFL

SEQ ID NO: 885 - protein, 8 aa, Severe acute respiratory syndrome-related coronavirus
  REGION 1..8: note = Table A: HLA-A*33:01H HLA-A*33:03H HLA-A*68:01H HLA-A*34:01H HLA-A*34:02M HLA-A*66:01M
  source 1..8: note = Severe acute respiratory syndrome coronavirus 2
DAQSFLNR

SEQ ID NO: 886 - protein, 8 aa, Severe acute respiratory syndrome-related coronavirus
  REGION 1..8: note = Table A: HLA-B*52:01M HLA-B*13:02H
  source 1..8: note = Severe acute respiratory syndrome coronavirus 2
AQSFLNRV

SEQ ID NO: 887 - protein, 8 aa, Severe acute respiratory syndrome-related coronavirus
  REGION 1..8: note = Table A: HLA-A*02:11H HLA-A*02:03H
  source 1..8: note = Severe acute respiratory syndrome coronavirus 2
FLNRVCGV

SEQ ID NO: 888 - protein, 8 aa, Severe acute respiratory syndrome-related coronavirus
  REGION 1..8: note = Table A: HLA-B*39:06H
  source 1..8: note = Severe acute respiratory syndrome coronavirus 2
NRVCGVSA

SEQ ID NO: 889 - protein, 8 aa, Severe acute respiratory syndrome-related coronavirus
  REGION 1..8: note = Table A: HLA-A*33:01H HLA-A*33:03M HLA-A*68:01M HLA-A*34:01H HLA-A*34:02H HLA-A*66:01H
  source 1..8: note = Severe acute respiratory syndrome coronavirus 2
TSTDVVYR

SEQ ID NO: 890 - protein, 8 aa, Severe acute respiratory syndrome-related coronavirus
  REGION 1..8: note = Table A: HLA-B*37:01H
  source 1..8: note = Severe acute respiratory syndrome coronavirus 2
TDVVYRAF

SEQ ID NO: 891 - protein, 8 aa, Severe acute respiratory syndrome-related coronavirus
  REGION 1..8: note = Table A: HLA-A*68:02H HLA-B*38:02H HLA-B*40:02H HLA-B*39:01H HLA-B*13:02H HLA-B*49:01H
  source 1..8: note = Severe acute respiratory syndrome coronavirus 2
FDIYNDKV

SEQ ID NO: 892 - protein, 8 aa, Severe acute respiratory syndrome-related coronavirus
  REGION 1..8: note = Table A: HLA-C*04:03H HLA-C*05:01H
  source 1..8: note = Severe acute respiratory syndrome coronavirus 2
YNDKVAGF

SEQ ID NO: 893 - protein, 8 aa, Severe acute respiratory syndrome-related coronavirus
  REGION 1..8: note = Table A: HLA-B*58:02H HLA-C*03:04H HLA-C*15:02H HLA-C*17:01H
  source 1..8: note = Severe acute respiratory syndrome coronavirus 2
VAGFAKFL

SEQ ID NO: 894 - protein, 8 aa, Severe acute respiratory syndrome-related coronavirus
  REGION 1..8: note = Table A: HLA-A*11:02H
  source 1..8: note = Severe acute respiratory syndrome coronavirus 2
AGFAKFLK

SEQ ID NO: 895 - protein, 8 aa, Severe acute respiratory syndrome-related coronavirus
  REGION 1..8: note = Table A: HLA-B*18:01H HLA-B*35:01H HLA-B*07:05H
  source 1..8: note = Severe acute respiratory syndrome coronavirus 2
DDNLIDSY

SEQ ID NO: 896 - protein, 8 aa, Severe acute respiratory syndrome-related coronavirus
  REGION 1..8: note = Table A: HLA-A*11:01H HLA-A*11:02H HLA-A*36:01H
  source 1..8: note = Severe acute respiratory syndrome coronavirus 2
IDSYFVVK

SEQ ID NO: 897 - protein, 8 aa, Severe acute respiratory syndrome-related coronavirus
  REGION 1..8: note = Table A: HLA-A*33:01M HLA-A*33:03M HLA-A*68:01M HLA-A*34:01M HLA-A*34:02H HLA-B*51:01H HLA-A*66:01M
  source 1..8: note = Severe acute respiratory syndrome coronavirus 2
DSYFVVKR

SEQ ID NO: 898 - protein, 8 aa, Severe acute respiratory syndrome-related coronavirus
  REGION 1..8: note = Table A: HLA-B*08:01H HLA-B*57:03H
  source 1..8: note = Severe acute respiratory syndrome coronavirus 2
FVVKRHTF

SEQ ID NO: 899 - protein, 8 aa, Severe acute respiratory syndrome-related coronavirus
  REGION 1..8: note = Table A: HLA-B*35:08H HLA-B*38:02H HLA-B*15:01H HLA-B*15:02H HLA-B*15:03H
  source 1..8: note = Severe acute respiratory syndrome coronavirus 2
YQHEETIY

SEQ ID NO: 900 - protein, 8 aa, Severe acute respiratory syndrome-related coronavirus
  REGION 1..8: note = Table A: HLA-B*18:01H HLA-B*37:01H HLA-B*40:01H HLA-B*40:02H HLA-B*41:02H
  source 1..8: note = Severe acute respiratory syndrome coronavirus 2
HEETIYNL

SEQ ID NO: 901 - protein, 8 aa, Severe acute respiratory syndrome-related coronavirus
  REGION 1..8: note = Table A: HLA-B*44:05H
  source 1..8: note = Severe acute respiratory syndrome coronavirus 2
EETIYNLL

SEQ ID NO: 902 - protein, 8 aa, Severe acute respiratory syndrome-related coronavirus
  REGION 1..8: note = Table A: HLA-A*34:02H
  source 1..8: note = Severe acute respiratory syndrome coronavirus 2
ETIYNLLK

SEQ ID NO: 903 - protein, 8 aa, Severe acute respiratory syndrome-related coronavirus
  REGION 1..8: note = Table A: HLA-A*03:02H HLA-B*37:01H
  source 1..8: note = Severe acute respiratory syndrome coronavirus 2
KDCPAVAK

SEQ ID NO: 904 - protein, 8 aa, Severe acute respiratory syndrome-related coronavirus
  REGION 1..8: note = Table A: HLA-C*15:05H HLA-B*51:01M
  source 1..8: note = Severe acute respiratory syndrome coronavirus 2
DGDMVPHI

SEQ ID NO: 905 - protein, 8 aa, Severe acute respiratory syndrome-related coronavirus
  REGION 1..8: note = Table A: HLA-A*33:01M HLA-A*33:03H HLA-A*68:01H HLA-A*34:01H HLA-A*66:01H
  source 1..8: note = Severe acute respiratory syndrome coronavirus 2
DMVPHISR

SEQ ID NO: 906 - protein, 8 aa, Severe acute respiratory syndrome-related coronavirus
  REGION 1..8: note = Table A: HLA-B*08:01H HLA-B*14:02H HLA-B*14:01H
  source 1..8: note = Severe acute respiratory syndrome coronavirus 2
QRLTKYTM

SEQ ID NO: 907 - protein, 8 aa, Severe acute respiratory syndrome-related coronavirus
  REGION 1..8: note = Table A: HLA-B*38:02H
  source 1..8: note = Severe acute respiratory syndrome coronavirus 2
YTMADLVY

SEQ ID NO: 908 - protein, 8 aa, Severe acute respiratory syndrome-related coronavirus
  REGION 1..8: note = Table A: HLA-C*04:03M HLA-B*35:03M HLA-C*15:05H HLA-B*35:01H HLA-B*35:02M HLA-B*35:08H HLA-B*35:07H HLA-C*08:01H HLA-C*08:02M HLA-B*35:12H HLA-B*38:02M HLA-B*15:02H HLA-B*39:01H HLA-B*07:05H HLA-C*05:01H
  source 1..8: note = Severe acute respiratory syndrome coronavirus 2
MADLVYAL

SEQ ID NO: 909 - protein, 8 aa, Severe acute respiratory syndrome-related coronavirus
  REGION 1..8: note = Table A: HLA-C*04:03M
  source 1..8: note = Severe acute respiratory syndrome coronavirus 2
FVENPDIL

SEQ ID NO: 910 - protein, 8 aa, Severe acute respiratory syndrome-related coronavirus
  REGION 1..8: note = Table A: HLA-B*35:01H HLA-B*35:07H HLA-B*15:02H
  source 1..8: note = Severe acute respiratory syndrome coronavirus 2
NPDILRVY

SEQ ID NO: 911 - protein, 8 aa, Severe acute respiratory syndrome-related coronavirus
  REGION 1..8: note = Table A: HLA-B*51:01H
  source 1..8: note = Severe acute respiratory syndrome coronavirus 2
YANLGERV

SEQ ID NO: 912 - protein, 8 aa, Severe acute respiratory syndrome-related coronavirus
  REGION 1..8: note = Table A: HLA-B*40:02H HLA-B*41:02H
  source 1..8: note = Severe acute respiratory syndrome coronavirus 2
GERVRQAL

SEQ ID NO: 913 - protein, 8 aa, Severe acute respiratory syndrome-related coronavirus
  REGION 1..8: note = Table A: HLA-B*52:01H HLA-B*13:02H
  source 1..8: note = Severe acute respiratory syndrome coronavirus 2
RQALLKTV

SEQ ID NO: 914 - protein, 8 aa, Severe acute respiratory syndrome-related coronavirus
  REGION 1..8: note = Table A: HLA-A*02:03H
  source 1..8: note = Severe acute respiratory syndrome coronavirus 2
LLKTVQFC

SEQ ID NO: 915 - protein, 8 aa, Severe acute respiratory syndrome-related coronavirus
  REGION 1..8: note = Table A: HLA-C*15:05H HLA-B*51:01M
  source 1..8: note = Severe acute respiratory syndrome coronavirus 2
DAMRNAGI

SEQ ID NO: 916 - protein, 8 aa, Severe acute respiratory syndrome-related coronavirus
  REGION 1..8: note = Table A: HLA-B*35:03H HLA-C*15:05M HLA-B*14:02H HLA-C*12:03H HLA-B*35:01H HLA-B*35:02H HLA-B*51:01H HLA-C*17:01H HLA-C*08:01H HLA-C*08:03H HLA-B*39:01H
  source 1..8: note = Severe acute respiratory syndrome coronavirus 2
NAGIVGVL

SEQ ID NO: 917 - protein, 8 aa, Severe acute respiratory syndrome-related coronavirus
  REGION 1..8: note = Table A: HLA-C*08:02H
  source 1..8: note = Severe acute respiratory syndrome coronavirus 2
NQDLNGNW

SEQ ID NO: 918 - protein, 8 aa, Severe acute respiratory syndrome-related coronavirus
  REGION 1..8: note = Table A: HLA-B*40:06H HLA-B*50:01H
  source 1..8: note = Severe acute respiratory syndrome coronavirus 2
GDFIQTTP

SEQ ID NO: 919 - protein, 8 aa, Severe acute respiratory syndrome-related coronavirus
  REGION 1..8: note = Table A: HLA-C*15:05H
  source 1..8: note = Severe acute respiratory syndrome coronavirus 2
TPGSGVPV

SEQ ID NO: 920 - protein, 8 aa, Severe acute respiratory syndrome-related coronavirus
  REGION 1..8: note = Table A: HLA-B*35:01H HLA-B*38:02H
  source 1..8: note = Severe acute respiratory syndrome coronavirus 2
VPVVDSYY

SEQ ID NO: 921 - protein, 8 aa, Severe acute respiratory syndrome-related coronavirus
  REGION 1..8: note = Table A: HLA-C*04:03H
  source 1..8: note = Severe acute respiratory syndrome coronavirus 2
VVDSYYSL

SEQ ID NO: 922 - protein, 8 aa, Severe acute respiratory syndrome-related coronavirus
  REGION 1..8: note = Table A: HLA-C*03:02H HLA-B*52:01H
  source 1..8: note = Severe acute respiratory syndrome coronavirus 2
YSLLMPIL

SEQ ID NO: 923 - protein, 8 aa, Severe acute respiratory syndrome-related coronavirus
  REGION 1..8: note = Table A: HLA-A*02:11H HLA-A*02:04M HLA-A*02:01H HLA-A*02:02H HLA-A*02:03H HLA-B*38:02H
  source 1..8: note = Severe acute respiratory syndrome coronavirus 2
LLMPILTL

SEQ ID NO: 924 - protein, 8 aa, Severe acute respiratory syndrome-related coronavirus
  REGION 1..8: note = Table A: HLA-A*34:01M HLA-A*34:02H HLA-B*51:01H HLA-B*54:01H HLA-A*66:01H
  source 1..8: note = Severe acute respiratory syndrome coronavirus 2
MPILTLTR

SEQ ID NO: 925 - protein, 8 aa, Severe acute respiratory syndrome-related coronavirus
  REGION 1..8: note = Table A: HLA-B*35:02H
  source 1..8: note = Severe acute respiratory syndrome coronavirus 2
ESHVDTDL

SEQ ID NO: 926 - protein, 8 aa, Severe acute respiratory syndrome-related coronavirus
  REGION 1..8: note = Table A: HLA-B*39:01H
  source 1..8: note = Severe acute respiratory syndrome coronavirus 2
SHVDTDLT

SEQ ID NO: 927 - protein, 8 aa, Severe acute respiratory syndrome-related coronavirus
  REGION 1..8: note = Table A: HLA-A*36:01H
  source 1..8: note = Severe acute respiratory syndrome coronavirus 2
HVDTDLTK

SEQ ID NO: 928 - protein, 8 aa, Severe acute respiratory syndrome-related coronavirus
  REGION 1..8: note = Table A: HLA-B*58:02H HLA-B*57:01H HLA-B*57:03M
  source 1..8: note = Severe acute respiratory syndrome coronavirus 2
LTKPYIKW

SEQ ID NO: 929 - protein, 8 aa, Severe acute respiratory syndrome-related coronavirus
  REGION 1..8: note = Table A: HLA-B*08:01M
  source 1..8: note = Severe acute respiratory syndrome coronavirus 2
KPYIKWDL

SEQ ID NO: 930 - protein, 8 aa, Severe acute respiratory syndrome-related coronavirus
  REGION 1..8: note = Table A: HLA-A*24:07H
  source 1..8: note = Severe acute respiratory syndrome coronavirus 2
PYIKWDLL

SEQ ID NO: 931 - protein, 8 aa, Severe acute respiratory syndrome-related coronavirus
  REGION 1..8: note = Table A: HLA-A*36:01H
  source 1..8: note = Severe acute respiratory syndrome coronavirus 2
KYDFTEER

SEQ ID NO: 932 - protein, 8 aa, Severe acute respiratory syndrome-related coronavirus
  REGION 1..8: note = Table A: HLA-A*02:11H HLA-A*68:02H HLA-A*02:05H HLA-A*02:02H HLA-C*08:01H HLA-B*38:02H HLA-B*40:01H HLA-B*40:02H
  source 1..8: note = Severe acute respiratory syndrome coronavirus 2
YDFTEERL

SEQ ID NO: 933 - protein, 8 aa, Severe acute respiratory syndrome-related coronavirus
  REGION 1..8: note = Table A: HLA-A*30:02H
  source 1..8: note = Severe acute respiratory syndrome coronavirus 2
RLKLFDRY

SEQ ID NO: 934 - protein, 8 aa, Severe acute respiratory syndrome-related coronavirus
  REGION 1..8: note = Table A: HLA-A*36:01H
  source 1..8: note = Severe acute respiratory syndrome coronavirus 2
LFDRYFKY

SEQ ID NO: 935 - protein, 8 aa, Severe acute respiratory syndrome-related coronavirus
  REGION 1..8: note = Table A: HLA-B*15:03M
  source 1..8: note = Severe acute respiratory syndrome coronavirus 2
FKYWDQTY

SEQ ID NO: 936 - protein, 8 aa, Severe acute respiratory syndrome-related coronavirus
  REGION 1..8: note = Table A: HLA-B*14:02H
  source 1..8: note = Severe acute respiratory syndrome coronavirus 2
DQTYHPNC

SEQ ID NO: 937 - protein, 8 aa, Severe acute respiratory syndrome-related coronavirus
  REGION 1..8: note = Table A: HLA-B*39:06H
  source 1..8: note = Severe acute respiratory syndrome coronavirus 2
DRCILHCA

SEQ ID NO: 938 - protein, 8 aa, Severe acute respiratory syndrome-related coronavirus
  REGION 1..8: note = Table A: HLA-B*15:02H
  source 1..8: note = Severe acute respiratory syndrome coronavirus 2
NVLFSTVF

SEQ ID NO: 939 - protein, 8 aa, Severe acute respiratory syndrome-related coronavirus
  REGION 1..8: note = Table A: HLA-B*58:01H HLA-B*57:01H HLA-B*46:01H HLA-C*03:02H HLA-C*15:05H HLA-C*12:02H HLA-B*35:01H HLA-B*35:07H HLA-B*38:02M HLA-B*15:01H HLA-B*15:02M HLA-B*39:01H HLA-B*07:05H HLA-B*57:03H
  source 1..8: note = Severe acute respiratory syndrome coronavirus 2
TVFPPTSF

SEQ ID NO: 940 - protein, 8 aa, Severe acute respiratory syndrome-related coronavirus
  REGION 1..8: note = Table A: HLA-A*33:03H HLA-A*68:01H HLA-A*34:01H HLA-A*34:02H HLA-A*66:01H
  source 1..8: note = Severe acute respiratory syndrome coronavirus 2
TSFGPLVR

SEQ ID NO: 941 - protein, 8 aa, Severe acute respiratory syndrome-related coronavirus
  REGION 1..8: note = Table A: HLA-A*11:02H
  source 1..8: note = Severe acute respiratory syndrome coronavirus 2
SFGPLVRK

SEQ ID NO: 942 - protein, 8 aa, Severe acute respiratory syndrome-related coronavirus
  REGION 1..8: note = Table A: HLA-B*58:02H HLA-B*51:01H HLA-B*52:01H
  source 1..8: note = Severe acute respiratory syndrome coronavirus 2
FGPLVRKI

SEQ ID NO: 943 - protein, 8 aa, Severe acute respiratory syndrome-related coronavirus
  REGION 1..8: note = Table A: HLA-B*07:04H
  source 1..8: note = Severe acute respiratory syndrome coronavirus 2
GPLVRKIF

SEQ ID NO: 944 - protein, 8 aa, Severe acute respiratory syndrome-related coronavirus
  REGION 1..8: note = Table A: HLA-C*14:02H HLA-C*14:03H
  source 1..8: note = Severe acute respiratory syndrome coronavirus 2
IFVDGVPF

SEQ ID NO: 945 - protein, 8 aa, Severe acute respiratory syndrome-related coronavirus
  REGION 1..8: note = Table A: HLA-C*04:03H HLA-A*02:11H HLA-A*02:07H HLA-C*05:01H
  source 1..8: note = Severe acute respiratory syndrome coronavirus 2
FVDGVPFV

SEQ ID NO: 946 - protein, 8 aa, Severe acute respiratory syndrome-related coronavirus
  REGION 1..8: note = Table A: HLA-C*08:03H
  source 1..8: note = Severe acute respiratory syndrome coronavirus 2
VDGVPFVV

SEQ ID NO: 947 - protein, 8 aa, Severe acute respiratory syndrome-related coronavirus
  REGION 1..8: note = Table A: HLA-C*15:05H
  source 1..8: note = Severe acute respiratory syndrome coronavirus 2
VPFVVSTG

SEQ ID NO: 948 - protein, 8 aa, Severe acute respiratory syndrome-related coronavirus
  REGION 1..8: note = Table A: HLA-B*58:01H HLA-A*24:07H
  source 1..8: note = Severe acute respiratory syndrome coronavirus 2
VVSTGYHF

SEQ ID NO: 949 - protein, 8 aa, Severe acute respiratory syndrome-related coronavirus
  REGION 1..8: note = Table A: HLA-C*03:02H
  source 1..8: note = Severe acute respiratory syndrome coronavirus 2
TGYHFREL

SEQ ID NO: 950 - protein, 8 aa, Severe acute respiratory syndrome-related coronavirus
  REGION 1..8: note = Table A: HLA-B*38:02H HLA-B*39:06H
  source 1..8: note = Severe acute respiratory syndrome coronavirus 2
YHFRELGV

SEQ ID NO: 951 - protein, 8 aa, Severe acute respiratory syndrome-related coronavirus
  REGION 1..8: note = Table A: HLA-B*52:01H
  source 1..8: note = Severe acute respiratory syndrome coronavirus 2
HFRELGVV

SEQ ID NO: 952 - protein, 8 aa, Severe acute respiratory syndrome-related coronavirus
  REGION 1..8: note = Table A: HLA-B*38:01M HLA-B*38:02H HLA-B*39:01H
  source 1..8: note = Severe acute respiratory syndrome coronavirus 2
VHNQDVNL

SEQ ID NO: 953 - protein, 8 aa, Severe acute respiratory syndrome-related coronavirus
  REGION 1..8: note = Table A: HLA-A*33:01M HLA-A*33:03H HLA-A*34:01H HLA-A*66:01H
  source 1..8: note = Severe acute respiratory syndrome coronavirus 2
DVNLHSSR

SEQ ID NO: 954 - protein, 8 aa, Severe acute respiratory syndrome-related coronavirus
  REGION 1..8: note = Table A: HLA-C*15:02H HLA-B*13:02H
  source 1..8: note = Severe acute respiratory syndrome coronavirus 2
LSFKELLV

SEQ ID NO: 955 - protein, 8 aa, Severe acute respiratory syndrome-related coronavirus
  REGION 1..8: note = Table A: HLA-B*46:01H HLA-B*38:02H HLA-B*15:02H
  source 1..8: note = Severe acute respiratory syndrome coronavirus 2
SFKELLVY

SEQ ID NO: 956 - protein, 8 aa, Severe acute respiratory syndrome-related coronavirus
  REGION 1..8: note = Table A: HLA-B*45:01H HLA-B*18:01H HLA-B*39:06H HLA-B*40:06M HLA-B*50:01H
  source 1..8: note = Severe acute respiratory syndrome coronavirus 2
KELLVYAA

SEQ ID NO: 957 - protein, 8 aa, Severe acute respiratory syndrome-related coronavirus
  REGION 1..8: note = Table A: HLA-B*39:01H
  source 1..8: note = Severe acute respiratory syndrome coronavirus 2
VYAADPAM

SEQ ID NO: 958 - protein, 8 aa, Severe acute respiratory syndrome-related coronavirus
  REGION 1..8: note = Table A: HLA-C*15:05H HLA-C*08:01H HLA-C*08:02H
  source 1..8: note = Severe acute respiratory syndrome coronavirus 2
AADPAMHA

SEQ ID NO: 959 - protein, 8 aa, Severe acute respiratory syndrome-related coronavirus
  REGION 1..8: note = Table A: HLA-B*45:01H HLA-B*39:06H HLA-B*40:06H HLA-B*50:01H
  source 1..8: note = Severe acute respiratory syndrome coronavirus 2
ADPAMHAA

SEQ ID NO: 960 - protein, 8 aa, Severe acute respiratory syndrome-related coronavirus
  REGION 1..8: note = Table A: HLA-B*38:02H HLA-B*39:01M HLA-B*15:10H
  source 1..8: note = Severe acute respiratory syndrome coronavirus 2
MHAASGNL

SEQ ID NO: 961 - protein, 8 aa, Severe acute respiratory syndrome-related coronavirus
  REGION 1..8: note = Table A: HLA-C*03:04H HLA-B*35:03H HLA-C*15:05H HLA-C*17:01H HLA-B*38:02H
  source 1..8: note = Severe acute respiratory syndrome coronavirus 2
HAASGNLL

SEQ ID NO: 962 - protein, 8 aa, Severe acute respiratory syndrome-related coronavirus
  REGION 1..8: note = Table A: HLA-C*15:05H
  source 1..8: note = Severe acute respiratory syndrome coronavirus 2
AASGNLLL

SEQ ID NO: 963 - protein, 8 aa, Severe acute respiratory syndrome-related coronavirus
  REGION 1..8: note = Table A: HLA-B*51:01H
  source 1..8: note = Severe acute respiratory syndrome coronavirus 2
VAALTNNV

SEQ ID NO: 964 - protein, 8 aa, Severe acute respiratory syndrome-related coronavirus
  REGION 1..8: note = Table A: HLA-B*57:03H
  source 1..8: note = Severe acute respiratory syndrome coronavirus 2
QTVKPGNF

SEQ ID NO: 965 - protein, 8 aa, Severe acute respiratory syndrome-related coronavirus
  REGION 1..8: note = Table A: HLA-B*37:01H HLA-B*40:02H HLA-B*40:06H
  source 1..8: note = Severe acute respiratory syndrome coronavirus 2
KDFYDFAV

SEQ ID NO: 966 - protein, 8 aa, Severe acute respiratory syndrome-related coronavirus
  REGION 1..8: note = Table A: HLA-A*11:01H HLA-A*11:02H HLA-A*36:01M
  source 1..8: note = Severe acute respiratory syndrome coronavirus 2
FYDFAVSK

SEQ ID NO: 967 - protein, 8 aa, Severe acute respiratory syndrome-related coronavirus
  REGION 1..8: note = Table A: HLA-A*03:02H HLA-A*11:01H HLA-A*11:02M HLA-A*36:01H HLA-A*34:02H HLA-C*07:27H
  source 1..8: note = Severe acute respiratory syndrome coronavirus 2
AVSKGFFK

SEQ ID NO: 968 - protein, 8 aa, Severe acute respiratory syndrome-related coronavirus
  REGION 1..8: note = Table A: HLA-C*14:02H HLA-C*14:03H HLA-C*12:03H
  source 1..8: note = Severe acute respiratory syndrome coronavirus 2
FFKEGSSV

SEQ ID NO: 969 - protein, 8 aa, Severe acute respiratory syndrome-related coronavirus
  REGION 1..8: note = Table A: HLA-B*40:01M HLA-B*40:02H HLA-B*41:02H
  source 1..8: note = Severe acute respiratory syndrome coronavirus 2
KEGSSVEL

SEQ ID NO: 970 - protein, 8 aa, Severe acute respiratory syndrome-related coronavirus
  REGION 1..8: note = Table A: HLA-B*37:01H
  source 1..8: note = Severe acute respiratory syndrome coronavirus 2
VELKHFFF

SEQ ID NO: 971 - protein, 8 aa, Severe acute respiratory syndrome-related coronavirus
  REGION 1..8: note = Table A: HLA-C*08:02H
  source 1..8: note = Severe acute respiratory syndrome coronavirus 2
AQDGNAAI

SEQ ID NO: 972 - protein, 8 aa, Severe acute respiratory syndrome-related coronavirus
  REGION 1..8: note = Table A: HLA-A*36:01H
  source 1..8: note = Severe acute respiratory syndrome coronavirus 2
ISDYDYYR

SEQ ID NO: 973 - protein, 8 aa, Severe acute respiratory syndrome-related coronavirus
  REGION 1..8: note = Table A: HLA-B*37:01H
  source 1..8: note = Severe acute respiratory syndrome coronavirus 2
YDYYRYNL

SEQ ID NO: 974 - protein, 8 aa, Severe acute respiratory syndrome-related coronavirus
  REGION 1..8: note = Table A: HLA-B*14:01H
  source 1..8: note = Severe acute respiratory syndrome coronavirus 2
YRYNLPTM

SEQ ID NO: 975 - protein, 8 aa, Severe acute respiratory syndrome-related coronavirus
  REGION 1..8: note = Table A: HLA-A*02:11H HLA-B*38:02H
  source 1..8: note = Severe acute respiratory syndrome coronavirus 2
LLFVVEVV

SEQ ID NO: 976 - protein, 8 aa, Severe acute respiratory syndrome-related coronavirus
  REGION 1..8: note = Table A: HLA-A*34:02H
  source 1..8: note = Severe acute respiratory syndrome coronavirus 2
FVVEVVDK

SEQ ID NO: 977 - protein, 8 aa, Severe acute respiratory syndrome-related coronavirus
  REGION 1..8: note = Table A: HLA-A*36:01H HLA-A*01:01H HLA-B*39:01H
  source 1..8: note = Severe acute respiratory syndrome coronavirus 2
VVEVVDKY

SEQ ID NO: 978 - protein, 8 aa, Severe acute respiratory syndrome-related coronavirus
  REGION 1..8: note = Table A: HLA-B*14:02H HLA-A*02:05H HLA-B*14:01M HLA-B*52:01M HLA-B*38:02H HLA-B*39:01H
  source 1..8: note = Severe acute respiratory syndrome coronavirus 2
NQVIVNNL

SEQ ID NO: 979 - protein, 8 aa, Severe acute respiratory syndrome-related coronavirus
  REGION 1..8: note = Table A: HLA-A*36:01H
  source 1..8: note = Severe acute respiratory syndrome coronavirus 2
VIVNNLDK

SEQ ID NO: 980 - protein, 8 aa, Severe acute respiratory syndrome-related coronavirus
  REGION 1..8: note = Table A: HLA-C*05:01H
  source 1..8: note = Severe acute respiratory syndrome coronavirus 2
NLDKSAGF

SEQ ID NO: 981 - protein, 8 aa, Severe acute respiratory syndrome-related coronavirus
  REGION 1..8: note = Table A: HLA-A*11:303H HLA-A*03:02M HLA-A*11:01M HLA-A*11:02M HLA-A*36:01H HLA-A*33:03H HLA-A*68:01H HLA-A*34:02H HLA-C*07:27H
  source 1..8: note = Severe acute respiratory syndrome coronavirus 2
SAGFPFNK

SEQ ID NO: 982 - protein, 8 aa, Severe acute respiratory syndrome-related coronavirus
  REGION 1..8: note = Table A: HLA-B*58:01H HLA-B*57:03H
  source 1..8: note = Severe acute respiratory syndrome coronavirus 2
AGFPFNKW

SEQ ID NO: 983 - protein, 8 aa, Severe acute respiratory syndrome-related coronavirus
  REGION 1..8: note = Table A: HLA-C*14:02H HLA-C*14:03M HLA-A*30:02H
  source 1..8: note = Severe acute respiratory syndrome coronavirus 2
LYYDSMSY

SEQ ID NO: 984 - protein, 8 aa, Severe acute respiratory syndrome-related coronavirus
  REGION 1..8: note = Table A: HLA-B*38:02H HLA-B*15:02H
  source 1..8: note = Severe acute respiratory syndrome coronavirus 2
DQDALFAY

SEQ ID NO: 985 - protein, 8 aa, Severe acute respiratory syndrome-related coronavirus
  REGION 1..8: note = Table A: HLA-B*27:02H HLA-A*34:02H
  source 1..8: note = Severe acute respiratory syndrome coronavirus 2
DALFAYTK

SEQ ID NO: 986 - protein, 8 aa, Severe acute respiratory syndrome-related coronavirus
  REGION 1..8: note = Table A: HLA-A*74:01H
  source 1..8: note = Severe acute respiratory syndrome coronavirus 2
ALFAYTKR

SEQ ID NO: 987 - protein, 8 aa, Severe acute respiratory syndrome-related coronavirus
  REGION 1..8: note = Table A: HLA-B*08:01H HLA-B*51:01H
  source 1..8: note = Severe acute respiratory syndrome coronavirus 2
FAYTKRNV

SEQ ID NO: 988 - protein, 8 aa, Severe acute respiratory syndrome-related coronavirus
  REGION 1..8: note = Table A: HLA-C*15:05H
  source 1..8: note = Severe acute respiratory syndrome coronavirus 2
VIPTITQM

SEQ ID NO: 989 - protein, 8 aa, Severe acute respiratory syndrome-related coronavirus
  REGION 1..8: note = Table A: HLA-C*15:05H
  source 1..8: note = Severe acute respiratory syndrome coronavirus 2
PTITQMNL

SEQ ID NO: 990 - protein, 8 aa, Severe acute respiratory syndrome-related coronavirus
  REGION 1..8: note = Table A: HLA-B*58:01H HLA-A*36:01H HLA-A*30:02H
  source 1..8: note = Severe acute respiratory syndrome coronavirus 2
ITQMNLKY

SEQ ID NO: 991 - protein, 8 aa, Severe acute respiratory syndrome-related coronavirus
  REGION 1..8: note = Table A: HLA-B*08:01H
  source 1..8: note = Severe acute respiratory syndrome coronavirus 2
QMNLKYAI

SEQ ID NO: 992 - protein, 8 aa, Severe acute respiratory syndrome-related coronavirus
  REGION 1..8: note = Table A: HLA-A*33:01H HLA-A*33:03M HLA-A*26:03H HLA-A*68:01M HLA-A*34:01M HLA-A*34:02H HLA-A*66:01M
  source 1..8: note = Severe acute respiratory syndrome coronavirus 2
YAISAKNR

SEQ ID NO: 993 - protein, 8 aa, Severe acute respiratory syndrome-related coronavirus
  REGION 1..8: note = Table A: HLA-B*58:01H HLA-B*58:02H HLA-B*57:03H
  source 1..8: note = Severe acute respiratory syndrome coronavirus 2
RTVAGVSI

SEQ ID NO: 994 - protein, 8 aa, Severe acute respiratory syndrome-related coronavirus
  REGION 1..8: note = Table A: HLA-B*58:02M HLA-C*16:01H
  source 1..8: note = Severe acute respiratory syndrome coronavirus 2
STMTNRQF

SEQ ID NO: 995 - protein, 8 aa, Severe acute respiratory syndrome-related coronavirus
  REGION 1..8: note = Table A: HLA-B*14:02H HLA-B*14:01H
  source 1..8: note = Severe acute respiratory syndrome coronavirus 2
NRQFHQKL

SEQ ID NO: 996 - protein, 8 aa, Severe acute respiratory syndrome-related coronavirus
  REGION 1..8: note = Table A: HLA-B*58:02M HLA-B*52:01H
  source 1..8: note = Severe acute respiratory syndrome coronavirus 2
RQFHQKLL

SEQ ID NO: 997 - protein, 8 aa, Severe acute respiratory syndrome-related coronavirus
  REGION 1..8: note = Table A: HLA-B*52:01H HLA-B*15:01H HLA-B*13:02H
  source 1..8: note = Severe acute respiratory syndrome coronavirus 2
HQKLLKSI

SEQ ID NO: 998 - protein, 8 aa, Severe acute respiratory syndrome-related coronavirus
  REGION 1..8: note = Table A: HLA-C*03:03H
  source 1..8: note = Severe acute respiratory syndrome coronavirus 2
TVVIGTSK

SEQ ID NO: 999 - protein, 8 aa, Severe acute respiratory syndrome-related coronavirus
  REGION 1..8: note = Table A: HLA-B*15:01H
  source 1..8: note = Severe acute respiratory syndrome coronavirus 2
VVIGTSKF

SEQ ID NO: 1000 - protein, 8 aa, Severe acute respiratory syndrome-related coronavirus
  REGION 1..8: note = Table A: HLA-C*14:02H
  source 1..8: note = Severe acute respiratory syndrome coronavirus 2
FYGGWHNM

SEQ ID NO: 1001 - protein, 8 aa, Severe acute respiratory syndrome-related coronavirus
  REGION 1..8: note = Table A: HLA-C*06:02H HLA-B*08:01H HLA-C*03:04M HLA-B*14:02H HLA-C*15:02H HLA-A*02:02H HLA-C*17:01H HLA-C*08:01H
  source 1..8: note = Severe acute respiratory syndrome coronavirus 2
YGGWHNML

SEQ ID NO: 1002 - protein, 8 aa, Severe acute respiratory syndrome-related coronavirus
  REGION 1..8: note = Table A: HLA-B*39:06H
  source 1..8: note = Severe acute respiratory syndrome coronavirus 2
WHNMLKTV

SEQ ID NO: 1003 - protein, 8 aa, Severe acute respiratory syndrome-related coronavirus
  REGION 1..8: note = Table A: HLA-B*08:01H HLA-B*15:02M
  source 1..8: note = Severe acute respiratory syndrome coronavirus 2
HNMLKTVY

SEQ ID NO: 1004 - protein, 8 aa, Severe acute respiratory syndrome-related coronavirus
  REGION 1..8: note = Table A: HLA-B*44:05M HLA-B*37:01H HLA-B*40:01H HLA-B*40:02H HLA-B*41:02M
  source 1..8: note = Severe acute respiratory syndrome coronavirus 2
SDVENPHL

SEQ ID NO: 1005 - protein, 8 aa, Severe acute respiratory syndrome-related coronavirus
  REGION 1..8: note = Table A: HLA-B*35:02H HLA-B*35:12H
  source 1..8: note = Severe acute respiratory syndrome coronavirus 2
DVENPHLM

SEQ ID NO: 1006 - protein, 8 aa, Severe acute respiratory syndrome-related coronavirus
  REGION 1..8: note = Table A: HLA-B*14:02H HLA-B*14:01M HLA-B*39:01H
  source 1..8: note = Severe acute respiratory syndrome coronavirus 2
DRAMPNML

SEQ ID NO: 1007 - protein, 8 aa, Severe acute respiratory syndrome-related coronavirus
  REGION 1..8: note = Table A: HLA-A*74:01H
  source 1..8: note = Severe acute respiratory syndrome coronavirus 2
RAMPNMLR

SEQ ID NO: 1008 - protein, 8 aa, Severe acute respiratory syndrome-related coronavirus
  REGION 1..8: note = Table A: HLA-B*52:01H
  source 1..8: note = Severe acute respiratory syndrome coronavirus 2
AMPNMLRI

SEQ ID NO: 1009 - protein, 8 aa, Severe acute respiratory syndrome-related coronavirus
  REGION 1..8: note = Table A: HLA-B*08:01H HLA-B*35:03H HLA-C*15:05H HLA-B*35:07H HLA-B*07:04H
  source 1..8: note = Severe acute respiratory syndrome coronavirus 2
MPNMLRIM

SEQ ID NO: 1010 - protein, 8 aa, Severe acute respiratory syndrome-related coronavirus
  REGION 1..8: note = Table A: HLA-B*08:01H
  source 1..8: note = Severe acute respiratory syndrome coronavirus 2
MLRIMASL

SEQ ID NO: 1011 - protein, 8 aa, Severe acute respiratory syndrome-related coronavirus
  REGION 1..8: note = Table A: HLA-A*36:01H HLA-A*33:03H HLA-A*68:01H HLA-A*34:01H HLA-A*34:02H HLA-A*66:01H
  source 1..8: note = Severe acute respiratory syndrome coronavirus 2
MASLVLAR

SEQ ID NO: 1012 - protein, 8 aa, Severe acute respiratory syndrome-related coronavirus
  REGION 1..8: note = Table A: HLA-A*11:01H HLA-A*11:02H
  source 1..8: note = Severe acute respiratory syndrome coronavirus 2
ASLVLARK

SEQ ID NO: 1013 - protein, 8 aa, Severe acute respiratory syndrome-related coronavirus
  REGION 1..8: note = Table A: HLA-B*58:02H
  source 1..8: note = Severe acute respiratory syndrome coronavirus 2
CSLSHRFY

SEQ ID NO: 1014 - protein, 8 aa, Severe acute respiratory syndrome-related coronavirus
  REGION 1..8: note = Table A: HLA-A*74:01H
  source 1..8: note = Severe acute respiratory syndrome coronavirus 2
SLSHRFYR

SEQ ID NO: 1015 - protein, 8 aa, Severe acute respiratory syndrome-related coronavirus
  REGION 1..8: note = Table A: HLA-B*58:02H
  source 1..8: note = Severe acute respiratory syndrome coronavirus 2
LSHRFYRL

SEQ ID NO: 1016 - protein, 8 aa, Severe acute respiratory syndrome-related coronavirus
  REGION 1..8: note = Table A: HLA-A*11:303H HLA-B*46:01H HLA-C*03:02H
  source 1..8: note = Severe acute respiratory syndrome coronavirus 2
CAQVLSEM

SEQ ID NO: 1017 - protein, 8 aa, Severe acute respiratory syndrome-related coronavirus
  REGION 1..8: note = Table A: HLA-B*52:01M HLA-B*13:02M
  source 1..8: note = Severe acute respiratory syndrome coronavirus 2
AQVLSEMV

SEQ ID NO: 1018 - protein, 8 aa, Severe acute respiratory syndrome-related coronavirus
  REGION 1..8: note = Table A: HLA-B*35:02H
  source 1..8: note = Severe acute respiratory syndrome coronavirus 2
QVLSEMVM

SEQ ID NO: 1019 - protein, 8 aa, Severe acute respiratory syndrome-related coronavirus
  REGION 1..8: note = Table A: HLA-B*46:01H HLA-C*15:05H HLA-B*35:01H HLA-B*51:01H HLA-B*38:02H HLA-B*15:02M
  source 1..8: note = Severe acute respiratory syndrome coronavirus 2
TAYANSVF

SEQ ID NO: 1020 - protein, 8 aa, Severe acute respiratory syndrome-related coronavirus
  REGION 1..8: note = Table A: HLA-B*58:01H HLA-C*15:05H HLA-B*51:01M HLA-B*38:02H
  source 1..8: note = Severe acute respiratory syndrome coronavirus 2
YANSVFNI

SEQ ID NO: 1021 - protein, 8 aa, Severe acute respiratory syndrome-related coronavirus
  REGION 1..8: note = Table A: HLA-B*52:01M
  source 1..8: note = Severe acute respiratory syndrome coronavirus 2
CQAVTANV

SEQ ID NO: 1022 - protein, 8 aa, Severe acute respiratory syndrome-related coronavirus
  REGION 1..8: note = Table A: HLA-C*15:05H
  source 1..8: note = Severe acute respiratory syndrome coronavirus 2
VTANVNAL

SEQ ID NO: 1023 - protein, 8 aa, Severe acute respiratory syndrome-related coronavirus
  REGION 1..8: note = Table A: HLA-C*03:03H HLA-C*03:04H HLA-C*15:05H HLA-C*08:01H HLA-C*08:02H HLA-C*08:03H HLA-B*38:02H
  source 1..8: note = Severe acute respiratory syndrome coronavirus 2
TANVNALL

SEQ ID NO: 1024 - protein, 8 aa, Severe acute respiratory syndrome-related coronavirus
  REGION 1..8: note = Table A: HLA-A*30:02H
  source 1..8: note = Severe acute respiratory syndrome coronavirus 2
GNKIADKY

SEQ ID NO: 1025 - protein, 8 aa, Severe acute respiratory syndrome-related coronavirus
  REGION 1..8: note = Table A: HLA-A*74:01H
  source 1..8: note = Severe acute respiratory syndrome coronavirus 2
KIADKYVR

SEQ ID NO: 1026 - protein, 8 aa, Severe acute respiratory syndrome-related coronavirus
  REGION 1..8: note = Table A: HLA-B*37:01H HLA-B*40:02H HLA-B*41:02H
  source 1..8: note = Severe acute respiratory syndrome coronavirus 2
ADKYVRNL

SEQ ID NO: 1027 - protein, 8 aa, Severe acute respiratory syndrome-related coronavirus
  REGION 1..8: note = Table A: HLA-A*33:03H
  source 1..8: note = Severe acute respiratory syndrome coronavirus 2
YVRNLQHR

SEQ ID NO: 1028 - protein, 8 aa, Severe acute respiratory syndrome-related coronavirus
  REGION 1..8: note = Table A: HLA-C*03:02H HLA-B*35:07H HLA-B*38:02H
  source 1..8: note = Severe acute respiratory syndrome coronavirus 2
FVNEFYAY

SEQ ID NO: 1029 - protein, 8 aa, Severe acute respiratory syndrome-related coronavirus
  REGION 1..8: note = Table A: HLA-B*08:01H HLA-C*03:02H
  source 1..8: note = Severe acute respiratory syndrome coronavirus 2
YAYLRKHF

SEQ ID NO: 1030 - protein, 8 aa, Severe acute respiratory syndrome-related coronavirus
  REGION 1..8: note = Table A: HLA-B*08:01H
  source 1..8: note = Severe acute respiratory syndrome coronavirus 2
YLRKHFSM

SEQ ID NO: 1031 - protein, 8 aa, Severe acute respiratory syndrome-related coronavirus
  REGION 1..8: note = Table A: HLA-B*44:05H HLA-B*37:01M HLA-B*07:05H
  source 1..8: note = Severe acute respiratory syndrome coronavirus 2
SDDAVVCF

SEQ ID NO: 1032 - protein, 8 aa, Severe acute respiratory syndrome-related coronavirus
  REGION 1..8: note = Table A: HLA-C*15:05H
  source 1..8: note = Severe acute respiratory syndrome coronavirus 2
STYASQGL

SEQ ID NO: 1033 - protein, 8 aa, Severe acute respiratory syndrome-related coronavirus
  REGION 1..8: note = Table A: HLA-C*03:04H HLA-C*15:05H HLA-B*51:01H HLA-B*38:02H HLA-B*54:01H
  source 1..8: note = Severe acute respiratory syndrome coronavirus 2
YASQGLVA

SEQ ID NO: 1034 - protein, 8 aa, Severe acute respiratory syndrome-related coronavirus
  REGION 1..8: note = Table A: HLA-C*15:05H HLA-A*02:05H HLA-A*02:03H HLA-B*52:01H HLA-B*38:02H HLA-B*15:01H HLA-B*39:01H HLA-B*13:01H HLA-B*13:02M HLA-B*49:01H
  source 1..8: note = Severe acute respiratory syndrome coronavirus 2
SQGLVASI

SEQ ID NO: 1035 - protein, 8 aa, Severe acute respiratory syndrome-related coronavirus
  REGION 1..8: note = Table A: HLA-B*08:01H
  source 1..8: note = Severe acute respiratory syndrome coronavirus 2
IKNFKSVL

SEQ ID NO: 1036 - protein, 8 aa, Severe acute respiratory syndrome-related coronavirus
  REGION 1..8: note = Table A: HLA-B*58:01H HLA-B*15:03H
  source 1..8: note = Severe acute respiratory syndrome coronavirus 2
KNFKSVLY

SEQ ID NO: 1037 - protein, 8 aa, Severe acute respiratory syndrome-related coronavirus
  REGION 1..8: note = Table A: HLA-C*14:03H HLA-A*29:02H
  source 1..8: note = Severe acute respiratory syndrome coronavirus 2
NFKSVLYY

SEQ ID NO: 1038 - protein, 8 aa, Severe acute respiratory syndrome-related coronavirus
  REGION 1..8: note = Table A: HLA-C*14:02H
  source 1..8: note = Severe acute respiratory syndrome coronavirus 2
LYYQNNVF

SEQ ID NO: 1039 - protein, 8 aa, Severe acute respiratory syndrome-related coronavirus
  REGION 1..8: note = Table A: HLA-C*14:02M HLA-C*14:03M
  source 1..8: note = Severe acute respiratory syndrome coronavirus 2
YYQNNVFM

SEQ ID NO: 1040 - protein, 8 aa, Severe acute respiratory syndrome-related coronavirus
  REGION 1..8: note = Table A: HLA-C*03:03H
  source 1..8: note = Severe acute respiratory syndrome coronavirus 2
NVFMSEAK

SEQ ID NO: 1041 - protein, 8 aa, Severe acute respiratory syndrome-related coronavirus
  REGION 1..8: note = Table A: HLA-B*58:02M HLA-B*57:01H HLA-B*57:03M
  source 1..8: note = Severe acute respiratory syndrome coronavirus 2
LTKGPHEF

SEQ ID NO: 1042 - protein, 8 aa, Severe acute respiratory syndrome-related coronavirus
  REGION 1..8: note = Table A: HLA-A*03:01H HLA-A*11:01H HLA-A*11:02H HLA-A*30:02H HLA-B*52:01H HLA-B*13:02H
  source 1..8: note = Severe acute respiratory syndrome coronavirus 2
SQHTMLVK

SEQ ID NO: 1043 - protein, 8 aa, Severe acute respiratory syndrome-related coronavirus
  REGION 1..8: note = Table A: HLA-C*05:01H
  source 1..8: note = Severe acute respiratory syndrome coronavirus 2
QGDDYVYL

SEQ ID NO: 1044 - protein, 8 aa, Severe acute respiratory syndrome-related coronavirus
  REGION 1..8: note = Table A: HLA-B*53:01H HLA-C*03:04H HLA-B*35:03H HLA-C*15:05M HLA-B*35:01H HLA-B*35:02H HLA-B*35:08H HLA-B*51:01H HLA-B*35:07H HLA-C*08:02H HLA-B*35:12H HLA-B*07:02H HLA-B*15:10H
  source 1..8: note = Severe acute respiratory syndrome coronavirus 2
YPDPSRIL

SEQ ID NO: 1045 - protein, 8 aa, Severe acute respiratory syndrome-related coronavirus
  REGION 1..8: note = Table A: HLA-B*55:01H HLA-B*54:01H
  source 1..8: note = Severe acute respiratory syndrome coronavirus 2
DPSRILGA

SEQ ID NO: 1046 - protein, 8 aa, Severe acute respiratory syndrome-related coronavirus
  REGION 1..8: note = Table A: HLA-C*04:03M HLA-A*02:07H HLA-C*08:02H HLA-C*05:01H
  source 1..8: note = Severe acute respiratory syndrome coronavirus 2
FVDDIVKT

SEQ ID NO: 1047 - protein, 8 aa, Severe acute respiratory syndrome-related coronavirus
  REGION 1..8: note = Table A: HLA-C*04:03H HLA-C*08:01H
  source 1..8: note = Severe acute respiratory syndrome coronavirus 2
MIERFVSL

SEQ ID NO: 1048 - protein, 8 aa, Severe acute respiratory syndrome-related coronavirus
  REGION 1..8: note = Table A: HLA-B*35:03H
  source 1..8: note = Severe acute respiratory syndrome coronavirus 2
LAIDAYPL

SEQ ID NO: 1049 - protein, 8 aa, Severe acute respiratory syndrome-related coronavirus
  REGION 1..8: note = Table A: HLA-A*03:01H HLA-A*03:02H HLA-A*11:01M HLA-A*11:02H HLA-A*36:01M HLA-C*03:03H HLA-B*27:02H HLA-A*34:02H HLA-A*23:01H
  source 1..8: note = Severe acute respiratory syndrome coronavirus 2
IDAYPLTK

SEQ ID NO: 1050 - protein, 8 aa, Severe acute respiratory syndrome-related coronavirus
  REGION 1..8: note = Table A: HLA-B*51:01H
  source 1..8: note = Severe acute respiratory syndrome coronavirus 2
DAYPLTKH

SEQ ID NO: 1051 - protein, 8 aa, Severe acute respiratory syndrome-related coronavirus
  REGION 1..8: note = Table A: HLA-B*15:03M
  source 1..8: note = Severe acute respiratory syndrome coronavirus 2
TKHPNQEY

SEQ ID NO: 1052 - protein, 8 aa, Severe acute respiratory syndrome-related coronavirus
  REGION 1..8: note = Table A: HLA-B*58:01H HLA-A*36:01M HLA-A*01:01H HLA-C*04:03M HLA-C*03:02H HLA-B*35:01H HLA-B*35:08H HLA-B*35:07H HLA-B*38:02H
  source 1..8: note = Severe acute respiratory syndrome coronavirus 2
YADVFHLY

SEQ ID NO: 1053 - protein, 8 aa, Severe acute respiratory syndrome-related coronavirus
  REGION 1..8: note = Table A: HLA-B*37:01H HLA-B*40:02H
  source 1..8: note = Severe acute respiratory syndrome coronavirus 2
ADVFHLYL

SEQ ID NO: 1054 - protein, 8 aa, Severe acute respiratory syndrome-related coronavirus
  REGION 1..8: note = Table A: HLA-B*38:02H
  source 1..8: note = Severe acute respiratory syndrome coronavirus 2
FHLYLQYI

SEQ ID NO: 1055 - protein, 8 aa, Severe acute respiratory syndrome-related coronavirus
  REGION 1..8: note = Table A: HLA-A*02:04H
  source 1..8: note = Severe acute respiratory syndrome coronavirus 2
YLQYIRKL

SEQ ID NO: 1056 - protein, 8 aa, Severe acute respiratory syndrome-related coronavirus
  REGION 1..8: note = Table A: HLA-B*14:02H HLA-B*14:01H
  source 1..8: note = Severe acute respiratory syndrome coronavirus 2
IRKLHDEL

SEQ ID NO: 1057 - protein, 8 aa, Severe acute respiratory syndrome-related coronavirus
  REGION 1..8: note = Table A: HLA-B*44:05H HLA-B*18:01H HLA-B*14:02M HLA-B*14:01H HLA-B*40:01H HLA-B*40:02H HLA-B*07:05H HLA-B*41:02H
  source 1..8: note = Severe acute respiratory syndrome coronavirus 2
DELTGHML

SEQ ID NO: 1058 - protein, 8 aa, Severe acute respiratory syndrome-related coronavirus
  REGION 1..8: note = Table A: HLA-B*35:01H
  source 1..8: note = Severe acute respiratory syndrome coronavirus 2
TGHMLDMY

SEQ ID NO: 1059 - protein, 8 aa, Severe acute respiratory syndrome-related coronavirus
  REGION 1..8: note = Table A: HLA-A*02:11H HLA-B*52:01M HLA-B*38:02H HLA-B*13:02H
  source 1..8: note = Severe acute respiratory syndrome coronavirus 2
HMLDMYSV

SEQ ID NO: 1060 - protein, 8 aa, Severe acute respiratory syndrome-related coronavirus
  REGION 1..8: note = Table A: HLA-B*39:06H HLA-B*40:06H HLA-B*50:01H
  source 1..8: note = Severe acute respiratory syndrome coronavirus 2
WEPEFYEA

SEQ ID NO: 1061 - protein, 8 aa, Severe acute respiratory syndrome-related coronavirus
  REGION 1..8: note = Table A: HLA-A*02:11H HLA-B*14:01H HLA-A*02:01H HLA-A*02:02H HLA-A*02:03M HLA-B*52:01H HLA-B*38:02H HLA-B*13:02H HLA-B*49:01H
  source 1..8: note = Severe acute respiratory syndrome coronavirus 2
AMYTPHTV

SEQ ID NO: 1062 - protein, 8 aa, Severe acute respiratory syndrome-related coronavirus
  REGION 1..8: note = Table A: HLA-C*14:02H HLA-C*14:03H HLA-B*08:01H HLA-C*07:01H HLA-C*07:02H HLA-B*14:02M HLA-B*14:01H HLA-A*24:02H HLA-A*24:07H HLA-B*39:01H HLA-B*41:02H HLA-B*15:10H
  source 1..8: note = Severe acute respiratory syndrome coronavirus 2
MYTPHTVL

SEQ ID NO: 1063 - protein, 8 aa, Severe acute respiratory syndrome-related coronavirus
  REGION 1..8: note = Table A: HLA-B*56:01H HLA-B*55:02H HLA-C*15:05H HLA-B*55:01M HLA-B*39:06M HLA-B*54:01M
  source 1..8: note = Severe acute respiratory syndrome coronavirus 2
TPHTVLQA

SEQ ID NO: 1064 - protein, 8 aa, Severe acute respiratory syndrome-related coronavirus
  REGION 1..8: note = Table A: HLA-B*39:06M
  source 1..8: note = Severe acute respiratory syndrome coronavirus 2
PHTVLQAV

SEQ ID NO: 1065 - protein, 8 aa, Severe acute respiratory syndrome-related coronavirus
  REGION 1..8: note = Table A: HLA-B*38:02H
  source 1..8: note = Severe acute respiratory syndrome coronavirus 2
QAVGACVL

SEQ ID NO: 1066 - protein, 8 aa, Severe acute respiratory syndrome-related coronavirus
  REGION 1..8: note = Table A: HLA-B*50:01H
  source 1..8: note = Severe acute respiratory syndrome coronavirus 2
YDHVISTS

SEQ ID NO: 1067 - protein, 8 aa, Severe acute respiratory syndrome-related coronavirus
  REGION 1..8: note = Table A: HLA-B*38:02H HLA-B*39:06M HLA-B*15:02H HLA-B*39:01H HLA-B*15:10H
  source 1..8: note = Severe acute respiratory syndrome coronavirus 2
DHVISTSH

SEQ ID NO: 1068 - protein, 8 aa, Severe acute respiratory syndrome-related coronavirus
  REGION 1..8: note = Table A: HLA-A*34:02H
  source 1..8: note = Severe acute respiratory syndrome coronavirus 2
HVISTSHK

SEQ ID NO: 1069 - protein, 8 aa, Severe acute respiratory syndrome-related coronavirus
  REGION 1..8: note = Table A: HLA-A*02:02H
  source 1..8: note = Severe acute respiratory syndrome coronavirus 2
VISTSHKL

SEQ ID NO: 1070 - protein, 8 aa, Severe acute respiratory syndrome-related coronavirus
  REGION 1..8: note = Table A: HLA-C*16:01H HLA-C*15:05H HLA-C*15:02H
  source 1..8: note = Severe acute respiratory syndrome coronavirus 2
STSHKLVL

SEQ ID NO: 1071 - protein, 8 aa, Severe acute respiratory syndrome-related coronavirus
  REGION 1..8: note = Table A: HLA-B*52:01H HLA-B*39:06M
  source 1..8: note = Severe acute respiratory syndrome coronavirus 2
SHKLVLSV

SEQ ID NO: 1072 - protein, 8 aa, Severe acute respiratory syndrome-related coronavirus
  REGION 1..8: note = Table A: HLA-C*15:05H HLA-B*14:01H HLA-B*35:02H HLA-B*38:02H
  source 1..8: note = Severe acute respiratory syndrome coronavirus 2
DVTDVTQL

SEQ ID NO: 1073 - protein, 8 aa, Severe acute respiratory syndrome-related coronavirus
  REGION 1..8: note = Table A: HLA-B*58:01M HLA-A*36:01H HLA-A*01:01H HLA-C*04:03H
  source 1..8: note = Severe acute respiratory syndrome coronavirus 2
VTDVTQLY

SEQ ID NO: 1074 - protein, 8 aa, Severe acute respiratory syndrome-related coronavirus
  REGION 1..8: note = Table A: HLA-B*40:02H
  source 1..8: note = Severe acute respiratory syndrome coronavirus 2
TDVTQLYL

SEQ ID NO: 1075 - protein, 8 aa, Severe acute respiratory syndrome-related coronavirus
  REGION 1..8: note = Table A: HLA-C*14:02H HLA-C*14:03M
  source 1..8: note = Severe acute respiratory syndrome coronavirus 2
LYLGGMSY

SEQ ID NO: 1076 - protein, 8 aa, Severe acute respiratory syndrome-related coronavirus
  REGION 1..8: note = Table A: HLA-A*26:01H HLA-A*29:02H HLA-B*38:02M
  source 1..8: note = Severe acute respiratory syndrome coronavirus 2
YLGGMSYY

SEQ ID NO: 1077 - protein, 8 aa, Severe acute respiratory syndrome-related coronavirus
  REGION 1..8: note = Table A: HLA-B*38:02H HLA-B*15:03H
  source 1..8: note = Severe acute respiratory syndrome coronavirus 2
SHKPPISF

SEQ ID NO: 1078 - protein, 8 aa, Severe acute respiratory syndrome-related coronavirus
  REGION 1..8: note = Table A: HLA-C*15:05H
  source 1..8: note = Severe acute respiratory syndrome coronavirus 2
KPPISFPL

SEQ ID NO: 1079 - protein, 8 aa, Severe acute respiratory syndrome-related coronavirus
  REGION 1..8: note = Table A: HLA-B*56:01H HLA-C*15:05H HLA-B*55:01H
  source 1..8: note = Severe acute respiratory syndrome coronavirus 2
PPISFPLC

SEQ ID NO: 1080 - protein, 8 aa, Severe acute respiratory syndrome-related coronavirus
  REGION 1..8: note = Table A: HLA-A*30:02H HLA-B*39:01H
  source 1..8: note = Severe acute respiratory syndrome coronavirus 2
NGQVFGLY

SEQ ID NO: 1081 - protein, 8 aa, Severe acute respiratory syndrome-related coronavirus
  REGION 1..8: note = Table A: HLA-A*11:01H HLA-A*11:02H HLA-A*36:01H
  source 1..8: note = Severe acute respiratory syndrome coronavirus 2
GQVFGLYK

SEQ ID NO: 1082 - protein, 8 aa, Severe acute respiratory syndrome-related coronavirus
  REGION 1..8: note = Table A: HLA-B*35:03H HLA-B*35:02H HLA-B*35:12H
  source 1..8: note = Severe acute respiratory syndrome coronavirus 2
TNAGDYIL

SEQ ID NO: 1083 - protein, 8 aa, Severe acute respiratory syndrome-related coronavirus
  REGION 1..8: note = Table A: HLA-B*39:06M
  source 1..8: note = Severe acute respiratory syndrome coronavirus 2
ERLKLFAA

SEQ ID NO: 1084 - protein, 8 aa, Severe acute respiratory syndrome-related coronavirus
  REGION 1..8: note = Table A: HLA-A*02:11H HLA-A*02:02H HLA-C*08:03H HLA-B*38:02H HLA-B*13:01H
  source 1..8: note = Severe acute respiratory syndrome coronavirus 2
KLFAAETL

SEQ ID NO: 1085 - protein, 8 aa, Severe acute respiratory syndrome-related coronavirus
  REGION 1..8: note = Table A: HLA-B*51:01H HLA-B*54:01H
  source 1..8: note = Severe acute respiratory syndrome coronavirus 2
FAAETLKA

SEQ ID NO: 1086 - protein, 8 aa, Severe acute respiratory syndrome-related coronavirus
  REGION 1..8: note = Table A: HLA-C*04:03H
  source 1..8: note = Severe acute respiratory syndrome coronavirus 2
ATEETFKL

SEQ ID NO: 1087 - protein, 8 aa, Severe acute respiratory syndrome-related coronavirus
  REGION 1..8: note = Table A: HLA-B*44:03M HLA-B*18:01H HLA-B*07:05H
  source 1..8: note = Severe acute respiratory syndrome coronavirus 2
EETFKLSY

SEQ ID NO: 1088 - protein, 8 aa, Severe acute respiratory syndrome-related coronavirus
  REGION 1..8: note = Table A: HLA-B*51:01H HLA-B*52:01M HLA-B*49:01H
  source 1..8: note = Severe acute respiratory syndrome coronavirus 2
LSYGIATV

SEQ ID NO: 1089 - protein, 8 aa, Severe acute respiratory syndrome-related coronavirus
  REGION 1..8: note = Table A: HLA-A*33:03H
  source 1..8: note = Severe acute respiratory syndrome coronavirus 2
SYGIATVR

SEQ ID NO: 1090 - protein, 8 aa, Severe acute respiratory syndrome-related coronavirus
  REGION 1..8: note = Table A: HLA-B*14:01H HLA-A*02:03M HLA-B*38:02H
  source 1..8: note = Severe acute respiratory syndrome coronavirus 2
GIATVREV

SEQ ID NO: 1091 - protein, 8 aa, Severe acute respiratory syndrome-related coronavirus
  REGION 1..8: note = Table A: HLA-C*16:01H HLA-B*08:01M HLA-C*03:03H HLA-C*03:02H HLA-C*03:04H HLA-C*15:05H HLA-B*14:02M HLA-C*08:01H HLA-B*35:12H HLA-B*07:02H HLA-B*41:02H
  source 1..8: note = Severe acute respiratory syndrome coronavirus 2
IATVREVL

SEQ ID NO: 1092 - protein, 8 aa, Severe acute respiratory syndrome-related coronavirus
  REGION 1..8: note = Table A: HLA-C*04:03H HLA-C*15:02H HLA-C*17:01H HLA-C*08:02H HLA-C*05:01H
  source 1..8: note = Severe acute respiratory syndrome coronavirus 2
LSDRELHL

SEQ ID NO: 1093 - protein, 8 aa, Severe acute respiratory syndrome-related coronavirus
  REGION 1..8: note = Table A: HLA-B*38:02H
  source 1..8: note = Severe acute respiratory syndrome coronavirus 2
ELHLSWEV

SEQ ID NO: 1094 - protein, 8 aa, Severe acute respiratory syndrome-related coronavirus
  REGION 1..8: note = Table A: HLA-B*08:01H HLA-A*30:01H HLA-B*07:04H
  source 1..8: note = Severe acute respiratory syndrome coronavirus 2
VGKPRPPL

SEQ ID NO: 1095 - protein, 8 aa, Severe acute respiratory syndrome-related coronavirus
  REGION 1..8: note = Table A: HLA-A*74:01H
  source 1..8: note = Severe acute respiratory syndrome coronavirus 2
KPRPPLNR

SEQ ID NO: 1096 - protein, 8 aa, Severe acute respiratory syndrome-related coronavirus
  REGION 1..8: note = Table A: HLA-B*15:03H
  source 1..8: note = Severe acute respiratory syndrome coronavirus 2
RNYVFTGY

SEQ ID NO: 1097 - protein, 8 aa, Severe acute respiratory syndrome-related coronavirus
  REGION 1..8: note = Table A: HLA-A*02:11M HLA-A*68:02H HLA-B*38:02H HLA-B*54:01H HLA-B*13:02H HLA-A*66:01H
  source 1..8: note = Severe acute respiratory syndrome coronavirus 2
YVFTGYRV

SEQ ID NO: 1098 - protein, 8 aa, Severe acute respiratory syndrome-related coronavirus
  REGION 1..8: note = Table A: HLA-A*34:02H
  source 1..8: note = Severe acute respiratory syndrome coronavirus 2
FTGYRVTK

SEQ ID NO: 1099 - protein, 8 aa, Severe acute respiratory syndrome-related coronavirus
  REGION 1..8: note = Table A: HLA-B*15:03M HLA-B*39:01H
  source 1..8: note = Severe acute respiratory syndrome coronavirus 2
SKVQIGEY

SEQ ID NO: 1100 - protein, 8 aa, Severe acute respiratory syndrome-related coronavirus
  REGION 1..8: note = Table A: HLA-B*38:02H HLA-B*15:01H HLA-B*13:01H
  source 1..8: note = Severe acute respiratory syndrome coronavirus 2
VQIGEYTF

SEQ ID NO: 1101 - protein, 8 aa, Severe acute respiratory syndrome-related coronavirus
  REGION 1..8: note = Table A: HLA-A*36:01H
  source 1..8: note = Severe acute respiratory syndrome coronavirus 2
IGEYTFEK

SEQ ID NO: 1102 - protein, 8 aa, Severe acute respiratory syndrome-related coronavirus
  REGION 1..8: note = Table A: HLA-C*07:01H HLA-B*35:01H HLA-B*38:02H HLA-B*39:01H
  source 1..8: note = Severe acute respiratory syndrome coronavirus 2
DYGDAVVY

SEQ ID NO: 1103 - protein, 8 aa, Severe acute respiratory syndrome-related coronavirus
  REGION 1..8: note = Table A: HLA-A*33:03H HLA-A*68:01H
  source 1..8: note = Severe acute respiratory syndrome coronavirus 2
YGDAVVYR

SEQ ID NO: 1104 - protein, 8 aa, Severe acute respiratory syndrome-related coronavirus
  REGION 1..8: note = Table A: HLA-A*30:02H HLA-B*15:03H
  source 1..8: note = Severe acute respiratory syndrome coronavirus 2
VYRGTTTY

SEQ ID NO: 1105 - protein, 8 aa, Severe acute respiratory syndrome-related coronavirus
  REGION 1..8: note = Table A: HLA-B*58:01H
  source 1..8: note = Severe acute respiratory syndrome coronavirus 2
RGTTTYKL

SEQ ID NO: 1106 - protein, 8 aa, Severe acute respiratory syndrome-related coronavirus
  REGION 1..8: note = Table A: HLA-B*15:03H
  source 1..8: note = Severe acute respiratory syndrome coronavirus 2
YKLNVGDY

SEQ ID NO: 1107 - protein, 8 aa, Severe acute respiratory syndrome-related coronavirus
  REGION 1..8: note = Table A: HLA-B*35:03H HLA-B*35:02H HLA-C*08:01H
  source 1..8: note = Severe acute respiratory syndrome coronavirus 2
NVGDYFVL

SEQ ID NO: 1108 - protein, 8 aa, Severe acute respiratory syndrome-related coronavirus
  REGION 1..8: note = Table A: HLA-A*02:11M HLA-B*38:02H
  source 1..8: note = Severe acute respiratory syndrome coronavirus 2
FVLTSHTV

SEQ ID NO: 1109 - protein, 8 aa, Severe acute respiratory syndrome-related coronavirus
  REGION 1..8: note = Table A: HLA-B*08:01H HLA-B*14:02H
  source 1..8: note = Severe acute respiratory syndrome coronavirus 2
VLTSHTVM

SEQ ID NO: 1110 - protein, 8 aa, Severe acute respiratory syndrome-related coronavirus
  REGION 1..8: note = Table A: HLA-C*03:04H HLA-C*15:05H HLA-C*08:03H
  source 1..8: note = Severe acute respiratory syndrome coronavirus 2
TSHTVMPL

SEQ ID NO: 1111 - protein, 8 aa, Severe acute respiratory syndrome-related coronavirus
  REGION 1..8: note = Table A: HLA-B*39:06H
  source 1..8: note = Severe acute respiratory syndrome coronavirus 2
SHTVMPLS

SEQ ID NO: 1112 - protein, 8 aa, Severe acute respiratory syndrome-related coronavirus
  REGION 1..8: note = Table A: HLA-B*42:01H HLA-B*53:01H HLA-B*35:03M HLA-C*15:05M HLA-B*55:01H HLA-B*35:01M HLA-B*35:02H HLA-B*51:01M HLA-B*35:07M HLA-B*35:12H HLA-B*38:02H HLA-B*54:01H HLA-B*07:02H HLA-B*15:02H HLA-B*07:05M
  source 1..8: note = Severe acute respiratory syndrome coronavirus 2
MPLSAPTL

SEQ ID NO: 1113 - protein, 8 aa, Severe acute respiratory syndrome-related coronavirus
  REGION 1..8: note = Table A: HLA-B*15:02H
  source 1..8: note = Severe acute respiratory syndrome coronavirus 2
YVRITGLY

SEQ ID NO: 1114 - protein, 8 aa, Severe acute respiratory syndrome-related coronavirus
  REGION 1..8: note = Table A: HLA-B*58:01H HLA-C*15:05H HLA-C*15:02H HLA-B*57:03H
  source 1..8: note = Severe acute respiratory syndrome coronavirus 2
ITGLYPTL

SEQ ID NO: 1115 - protein, 8 aa, Severe acute respiratory syndrome-related coronavirus
  REGION 1..8: note = Table A: HLA-B*52:01H HLA-B*13:02H
  source 1..8: note = Severe acute respiratory syndrome coronavirus 2
GLYPTLNI

SEQ ID NO: 1116 - protein, 8 aa, Severe acute respiratory syndrome-related coronavirus
  REGION 1..8: note = Table A: HLA-B*18:01H HLA-B*07:05H HLA-B*50:01H
  source 1..8: note = Severe acute respiratory syndrome coronavirus 2
DEFSSNVA

SEQ ID NO: 1117 - protein, 8 aa, Severe acute respiratory syndrome-related coronavirus
  REGION 1..8: note = Table A: HLA-A*30:02H HLA-B*15:01H
  source 1..8: note = Severe acute respiratory syndrome coronavirus 2
FSSNVANY

SEQ ID NO: 1118 - protein, 8 aa, Severe acute respiratory syndrome-related coronavirus
  REGION 1..8: note = Table A: HLA-B*08:01H
  source 1..8: note = Severe acute respiratory syndrome coronavirus 2
ANYQKVGM

SEQ ID NO: 1119 - protein, 8 aa, Severe acute respiratory syndrome-related coronavirus
  REGION 1..8: note = Table A: HLA-A*03:01H HLA-A*11:01H HLA-A*11:02H HLA-A*30:01H HLA-A*34:02H
  source 1..8: note = Severe acute respiratory syndrome coronavirus 2
YQKVGMQK

SEQ ID NO: 1120 - protein, 8 aa, Severe acute respiratory syndrome-related coronavirus
  REGION 1..8: note = Table A: HLA-B*15:03H
  source 1..8: note = Severe acute respiratory syndrome coronavirus 2
QKVGMQKY

SEQ ID NO: 1121 - protein, 8 aa, Severe acute respiratory syndrome-related coronavirus
  REGION 1..8: note = Table A: HLA-B*39:01H
  source 1..8: note = Severe acute respiratory syndrome coronavirus 2
LQGPPGTG

SEQ ID NO: 1122 - protein, 8 aa, Severe acute respiratory syndrome-related coronavirus
  REGION 1..8: note = Table A: HLA-B*58:02M HLA-B*57:03H
  source 1..8: note = Severe acute respiratory syndrome coronavirus 2
KSHFAIGL

SEQ ID NO: 1123 - protein, 8 aa, Severe acute respiratory syndrome-related coronavirus
  REGION 1..8: note = Table A: HLA-B*39:06H
  source 1..8: note = Severe acute respiratory syndrome coronavirus 2
SHFAIGLA

SEQ ID NO: 1124 - protein, 8 aa, Severe acute respiratory syndrome-related coronavirus
  REGION 1..8: note = Table A: HLA-C*14:02H HLA-C*14:03H
  source 1..8: note = Severe acute respiratory syndrome coronavirus 2
HFAIGLAL

SEQ ID NO: 1125 - protein, 8 aa, Severe acute respiratory syndrome-related coronavirus
  REGION 1..8: note = Table A: HLA-C*03:02H HLA-B*38:02H
  source 1..8: note = Severe acute respiratory syndrome coronavirus 2
FAIGLALY

SEQ ID NO: 1126 - protein, 8 aa, Severe acute respiratory syndrome-related coronavirus
  REGION 1..8: note = Table A: HLA-B*54:01H
  source 1..8: note = Severe acute respiratory syndrome coronavirus 2
LALYYPSA

SEQ ID NO: 1127 - protein, 8 aa, Severe acute respiratory syndrome-related coronavirus
  REGION 1..8: note = Table A: HLA-A*74:01M HLA-A*03:01H HLA-A*11:02H HLA-A*33:03H HLA-A*34:01H HLA-A*31:01H HLA-A*66:01H
  source 1..8: note = Severe acute respiratory syndrome coronavirus 2
ALYYPSAR

SEQ ID NO: 1128 - protein, 8 aa, Severe acute respiratory syndrome-related coronavirus
  REGION 1..8: note = Table A: HLA-B*53:01H HLA-B*35:01M HLA-B*35:08H HLA-B*35:07H HLA-B*38:02H HLA-B*15:02H
  source 1..8: note = Severe acute respiratory syndrome coronavirus 2
YPSARIVY

SEQ ID NO: 1129 - protein, 8 aa, Severe acute respiratory syndrome-related coronavirus
  REGION 1..8: note = Table A: HLA-B*39:06H HLA-B*54:01H
  source 1..8: note = Severe acute respiratory syndrome coronavirus 2
SARIVYTA

SEQ ID NO: 1130 - protein, 8 aa, Severe acute respiratory syndrome-related coronavirus
  REGION 1..8: note = Table A: HLA-B*39:06H
  source 1..8: note = Severe acute respiratory syndrome coronavirus 2
ARIVYTAC

SEQ ID NO: 1131 - protein, 8 aa, Severe acute respiratory syndrome-related coronavirus
  REGION 1..8: note = Table A: HLA-B*14:01H HLA-B*38:01M HLA-B*38:02M HLA-B*39:06H HLA-B*39:01H HLA-B*15:10M
  source 1..8: note = Severe acute respiratory syndrome coronavirus 2
SHAAVDAL

SEQ ID NO: 1132 - protein, 8 aa, Severe acute respiratory syndrome-related coronavirus
  REGION 1..8: note = Table A: HLA-B*35:02H
  source 1..8: note = Severe acute respiratory syndrome coronavirus 2
HAAVDALC

SEQ ID NO: 1133 - protein, 8 aa, Severe acute respiratory syndrome-related coronavirus
  REGION 1..8: note = Table A: HLA-B*35:02H
  source 1..8: note = Severe acute respiratory syndrome coronavirus 2
DALCEKAL

SEQ ID NO: 1134 - protein, 8 aa, Severe acute respiratory syndrome-related coronavirus
  REGION 1..8: note = Table A: HLA-B*39:06H
  source 1..8: note = Severe acute respiratory syndrome coronavirus 2
SRIIPARA

SEQ ID NO: 1135 - protein, 8 aa, Severe acute respiratory syndrome-related coronavirus
  REGION 1..8: note = Table A: HLA-A*74:01H
  source 1..8: note = Severe acute respiratory syndrome coronavirus 2
RIIPARAR

SEQ ID NO: 1136 - protein, 8 aa, Severe acute respiratory syndrome-related coronavirus
  REGION 1..8: note = Table A: HLA-C*14:02H
  source 1..8: note = Severe acute respiratory syndrome coronavirus 2
KFKVNSTL

SEQ ID NO: 1137 - protein, 8 aa, Severe acute respiratory syndrome-related coronavirus
  REGION 1..8: note = Table A: HLA-B*58:01H HLA-B*57:03H
  source 1..8: note = Severe acute respiratory syndrome coronavirus 2
STLEQYVF

SEQ ID NO: 1138 - protein, 8 aa, Severe acute respiratory syndrome-related coronavirus
  REGION 1..8: note = Table A: HLA-B*51:01H HLA-B*52:01H HLA-B*38:02H HLA-B*39:06M HLA-B*13:02H HLA-B*49:01H
  source 1..8: note = Severe acute respiratory syndrome coronavirus 2
EQYVFCTV

SEQ ID NO: 1139 - protein, 8 aa, Severe acute respiratory syndrome-related coronavirus
  REGION 1..8: note = Table A: HLA-C*14:02H HLA-C*14:03H
  source 1..8: note = Severe acute respiratory syndrome coronavirus 2
VFCTVNAL

SEQ ID NO: 1140 - protein, 8 aa, Severe acute respiratory syndrome-related coronavirus
  REGION 1..8: note = Table A: HLA-A*68:02H HLA-B*51:01H HLA-C*08:01M HLA-B*38:02H
  source 1..8: note = Severe acute respiratory syndrome coronavirus 2
DIVVFDEI

SEQ ID NO: 1141 - protein, 8 aa, Severe acute respiratory syndrome-related coronavirus
  REGION 1..8: note = Table A: HLA-B*14:01H HLA-A*02:02H
  source 1..8: note = Severe acute respiratory syndrome coronavirus 2
SMATNYDL

SEQ ID NO: 1142 - protein, 8 aa, Severe acute respiratory syndrome-related coronavirus
  REGION 1..8: note = Table A: HLA-A*02:01H
  source 1..8: note = Severe acute respiratory syndrome coronavirus 2
YDLSVVNA

SEQ ID NO: 1143 - protein, 8 aa, Severe acute respiratory syndrome-related coronavirus
  REGION 1..8: note = Table A: HLA-A*33:01M HLA-A*33:03H HLA-A*68:01H HLA-A*34:01H
  source 1..8: note = Severe acute respiratory syndrome coronavirus 2
DLSVVNAR

SEQ ID NO: 1144 - protein, 8 aa, Severe acute respiratory syndrome-related coronavirus
  REGION 1..8: note = Table A: HLA-A*34:01M HLA-A*66:01H
  source 1..8: note = Severe acute respiratory syndrome coronavirus 2
SVVNARLR

SEQ ID NO: 1145 - protein, 8 aa, Severe acute respiratory syndrome-related coronavirus
  REGION 1..8: note = Table A: HLA-B*14:02H
  source 1..8: note = Severe acute respiratory syndrome coronavirus 2
LRAKHYVY

SEQ ID NO: 1146 - protein, 8 aa, Severe acute respiratory syndrome-related coronavirus
  REGION 1..8: note = Table A: HLA-B*58:02H
  source 1..8: note = Severe acute respiratory syndrome coronavirus 2
RAKHYVYI

SEQ ID NO: 1147 - protein, 8 aa, Severe acute respiratory syndrome-related coronavirus
  REGION 1..8: note = Table A: HLA-A*29:01H HLA-C*04:03M HLA-C*03:03H HLA-A*02:11H HLA-C*03:04H HLA-C*15:05H HLA-C*15:02H HLA-A*02:04H HLA-A*02:05H HLA-A*02:02H HLA-A*02:03H HLA-C*17:01M HLA-C*08:01H HLA-C*08:03H HLA-B*39:01H HLA-C*05:01H
  REGION 1..8: note = CONT. FROM ABOVE: HLA-C*07:04H
  source 1..8: note = Severe acute respiratory syndrome coronavirus 2
YIGDPAQL

SEQ ID NO: 1148 - protein, 8 aa, Severe acute respiratory syndrome-related coronavirus
  REGION 1..8: note = Table A: HLA-A*33:03H HLA-A*66:01H
  source 1..8: note = Severe acute respiratory syndrome coronavirus 2
PAQLPAPR

SEQ ID NO: 1149 - protein, 8 aa, Severe acute respiratory syndrome-related coronavirus
  REGION 1..8: note = Table A: HLA-B*08:01M HLA-C*15:05H HLA-B*07:02M HLA-B*07:04H
  source 1..8: note = Severe acute respiratory syndrome coronavirus 2
LPAPRTLL

SEQ ID NO: 1150 - protein, 8 aa, Severe acute respiratory syndrome-related coronavirus
  REGION 1..8: note = Table A: HLA-A*33:03M
  source 1..8: note = Severe acute respiratory syndrome coronavirus 2
EYFNSVCR

SEQ ID NO: 1151 - protein, 8 aa, Severe acute respiratory syndrome-related coronavirus
  REGION 1..8: note = Table A: HLA-B*58:01H HLA-B*58:02H HLA-B*57:03M
  source 1..8: note = Severe acute respiratory syndrome coronavirus 2
KTIGPDMF

SEQ ID NO: 1152 - protein, 8 aa, Severe acute respiratory syndrome-related coronavirus
  REGION 1..8: note = Table A: HLA-C*03:04H HLA-B*35:03H HLA-C*15:05H HLA-C*15:02H HLA-A*02:05H HLA-B*35:02H HLA-C*17:01H HLA-C*08:01H HLA-B*35:12H
  source 1..8: note = Severe acute respiratory syndrome coronavirus 2
TIGPDMFL

SEQ ID NO: 1153 - protein, 8 aa, Severe acute respiratory syndrome-related coronavirus
  REGION 1..8: note = Table A: HLA-A*33:01H HLA-A*34:01H
  source 1..8: note = Severe acute respiratory syndrome coronavirus 2
DMFLGTCR

SEQ ID NO: 1154 - protein, 8 aa, Severe acute respiratory syndrome-related coronavirus
  REGION 1..8: note = Table A: HLA-C*04:03M HLA-C*15:05H HLA-C*08:02M HLA-C*05:01H
  source 1..8: note = Severe acute respiratory syndrome coronavirus 2
IVDTVSAL

SEQ ID NO: 1155 - protein, 8 aa, Severe acute respiratory syndrome-related coronavirus
  REGION 1..8: note = Table A: HLA-B*35:01H HLA-B*38:02H HLA-B*15:02H HLA-B*07:05H
  source 1..8: note = Severe acute respiratory syndrome coronavirus 2
DTVSALVY

SEQ ID NO: 1156 - protein, 8 aa, Severe acute respiratory syndrome-related coronavirus
  REGION 1..8: note = Table A: HLA-A*11:02H HLA-A*34:02H
  source 1..8: note = Severe acute respiratory syndrome coronavirus 2
LVYDNKLK

SEQ ID NO: 1157 - protein, 8 aa, Severe acute respiratory syndrome-related coronavirus
  REGION 1..8: note = Table A: HLA-B*37:01H
  source 1..8: note = Severe acute respiratory syndrome coronavirus 2
KDKSAQCF

SEQ ID NO: 1158 - protein, 8 aa, Severe acute respiratory syndrome-related coronavirus
  REGION 1..8: note = Table A: HLA-B*38:01H HLA-B*38:02M HLA-B*39:01M HLA-B*15:10H
  source 1..8: note = Severe acute respiratory syndrome coronavirus 2
THDVSSAI

SEQ ID NO: 1159 - protein, 8 aa, Severe acute respiratory syndrome-related coronavirus
  REGION 1..8: note = Table A: HLA-A*33:01H HLA-A*33:03H HLA-A*68:01M HLA-A*34:01M HLA-A*66:01H
  source 1..8: note = Severe acute respiratory syndrome coronavirus 2
DVSSAINR

SEQ ID NO: 1160 - protein, 8 aa, Severe acute respiratory syndrome-related coronavirus
  REGION 1..8: note = Table A: HLA-B*58:02H HLA-C*16:01H HLA-B*51:01H HLA-B*07:04H
  source 1..8: note = Severe acute respiratory syndrome coronavirus 2
SAINRPQI

SEQ ID NO: 1161 - protein, 8 aa, Severe acute respiratory syndrome-related coronavirus
  REGION 1..8: note = Table A: HLA-A*74:01H
  source 1..8: note = Severe acute respiratory syndrome coronavirus 2
VVREFLTR

SEQ ID NO: 1162 - protein, 8 aa, Severe acute respiratory syndrome-related coronavirus
  REGION 1..8: note = Table A: HLA-B*58:01M HLA-B*57:01H HLA-B*53:01H HLA-B*15:13H HLA-B*38:02H HLA-A*32:01H HLA-B*57:03H HLA-B*13:01H
  source 1..8: note = Severe acute respiratory syndrome coronavirus 2
FLTRNPAW

SEQ ID NO: 1163 - protein, 8 aa, Severe acute respiratory syndrome-related coronavirus
  REGION 1..8: note = Table A: HLA-B*07:04H
  source 1..8: note = Severe acute respiratory syndrome coronavirus 2
NPAWRKAV

SEQ ID NO: 1164 - protein, 8 aa, Severe acute respiratory syndrome-related coronavirus
  REGION 1..8: note = Table A: HLA-B*35:07H HLA-B*07:04H
  source 1..8: note = Severe acute respiratory syndrome coronavirus 2
PAWRKAVF

SEQ ID NO: 1165 - protein, 8 aa, Severe acute respiratory syndrome-related coronavirus
  REGION 1..8: note = Table A: HLA-B*55:02H HLA-B*55:01H
  source 1..8: note = Severe acute respiratory syndrome coronavirus 2
SPYNSQNA

SEQ ID NO: 1166 - protein, 8 aa, Severe acute respiratory syndrome-related coronavirus
  REGION 1..8: note = Table A: HLA-C*03:04H
  source 1..8: note = Severe acute respiratory syndrome coronavirus 2
NAVASKIL

SEQ ID NO: 1167 - protein, 8 aa, Severe acute respiratory syndrome-related coronavirus
  REGION 1..8: note = Table A: HLA-C*15:05M HLA-C*15:02M HLA-C*17:01H HLA-B*07:05H HLA-C*07:04H
  source 1..8: note = Severe acute respiratory syndrome coronavirus 2
VASKILGL

SEQ ID NO: 1168 - protein, 8 aa, Severe acute respiratory syndrome-related coronavirus
  REGION 1..8: note = Table A: HLA-A*02:03H
  source 1..8: note = Severe acute respiratory syndrome coronavirus 2
ILGLPTQT

SEQ ID NO: 1169 - protein, 8 aa, Severe acute respiratory syndrome-related coronavirus
  REGION 1..8: note = Table A: HLA-B*51:01H HLA-B*52:01H
  source 1..8: note = Severe acute respiratory syndrome coronavirus 2
LGLPTQTV

SEQ ID NO: 1170 - protein, 8 aa, Severe acute respiratory syndrome-related coronavirus
  REGION 1..8: note = Table A: HLA-B*08:01H HLA-B*51:01H HLA-B*52:01H
  source 1..8: note = Severe acute respiratory syndrome coronavirus 2
VAITRAKV

SEQ ID NO: 1171 - protein, 8 aa, Severe acute respiratory syndrome-related coronavirus
  REGION 1..8: note = Table A: HLA-B*14:01H
  source 1..8: note = Severe acute respiratory syndrome coronavirus 2
TRAKVGIL

SEQ ID NO: 1172 - protein, 8 aa, Severe acute respiratory syndrome-related coronavirus
  REGION 1..8: note = Table A: HLA-A*36:01H
  source 1..8: note = Severe acute respiratory syndrome coronavirus 2
IMSDRDLY

SEQ ID NO: 1173 - protein, 8 aa, Severe acute respiratory syndrome-related coronavirus
  REGION 1..8: note = Table A: HLA-B*08:01H HLA-B*38:02H HLA-B*15:02H
  source 1..8: note = Severe acute respiratory syndrome coronavirus 2
DLYDKLQF

SEQ ID NO: 1174 - protein, 8 aa, Severe acute respiratory syndrome-related coronavirus
  REGION 1..8: note = Table A: HLA-B*14:02H
  source 1..8: note = Severe acute respiratory syndrome coronavirus 2
DKLQFTSL

SEQ ID NO: 1175 - protein, 8 aa, Severe acute respiratory syndrome-related coronavirus
  REGION 1..8: note = Table A: HLA-B*52:01M HLA-B*38:02H HLA-B*13:02M
  source 1..8: note = Severe acute respiratory syndrome coronavirus 2
LQFTSLEI

SEQ ID NO: 1176 - protein, 8 aa, Severe acute respiratory syndrome-related coronavirus
  REGION 1..8: note = Table A: HLA-B*44:05M HLA-B*37:01M HLA-B*07:05H HLA-B*41:02H
  source 1..8: note = Severe acute respiratory syndrome coronavirus 2
AENVTGLF

SEQ ID NO: 1177 - protein, 8 aa, Severe acute respiratory syndrome-related coronavirus
  REGION 1..8: note = Table A: HLA-A*34:02H
  source 1..8: note = Severe acute respiratory syndrome coronavirus 2
ENVTGLFK

SEQ ID NO: 1178 - protein, 8 aa, Severe acute respiratory syndrome-related coronavirus
  REGION 1..8: note = Table A: HLA-C*15:05H
  source 1..8: note = Severe acute respiratory syndrome coronavirus 2
PTQAPTHL

SEQ ID NO: 1179 - protein, 8 aa, Severe acute respiratory syndrome-related coronavirus
  REGION 1..8: note = Table A: HLA-B*51:01M HLA-B*52:01H
  source 1..8: note = Severe acute respiratory syndrome coronavirus 2
QAPTHLSV

SEQ ID NO: 1180 - protein, 8 aa, Severe acute respiratory syndrome-related coronavirus
  REGION 1..8: note = Table A: HLA-B*38:02H
  source 1..8: note = Severe acute respiratory syndrome coronavirus 2
HLSVDTKF

SEQ ID NO: 1181 - protein, 8 aa, Severe acute respiratory syndrome-related coronavirus
  REGION 1..8: note = Table A: HLA-B*48:01H
  source 1..8: note = Severe acute respiratory syndrome coronavirus 2
TKFKTEGL

SEQ ID NO: 1182 - protein, 8 aa, Severe acute respiratory syndrome-related coronavirus
  REGION 1..8: note = Table A: HLA-A*11:01H HLA-A*11:02H HLA-A*36:01H
  source 1..8: note = Severe acute respiratory syndrome coronavirus 2
VDIPGIPK

SEQ ID NO: 1183 - protein, 8 aa, Severe acute respiratory syndrome-related coronavirus
  REGION 1..8: note = Table A: HLA-C*15:05H
  source 1..8: note = Severe acute respiratory syndrome coronavirus 2
IPGIPKDM

SEQ ID NO: 1184 - protein, 8 aa, Severe acute respiratory syndrome-related coronavirus
  REGION 1..8: note = Table A: HLA-A*33:03H
  source 1..8: note = Severe acute respiratory syndrome coronavirus 2
IPKDMTYR

SEQ ID NO: 1185 - protein, 8 aa, Severe acute respiratory syndrome-related coronavirus
  REGION 1..8: note = Table A: HLA-B*58:01H HLA-B*58:02H HLA-C*15:05H HLA-B*57:03H
  source 1..8: note = Severe acute respiratory syndrome coronavirus 2
ISMMGFKM

SEQ ID NO: 1186 - protein, 8 aa, Severe acute respiratory syndrome-related coronavirus
  REGION 1..8: note = Table A: HLA-B*15:02H
  source 1..8: note = Severe acute respiratory syndrome coronavirus 2
MNYQVNGY

SEQ ID NO: 1187 - protein, 8 aa, Severe acute respiratory syndrome-related coronavirus
  REGION 1..8: note = Table A: HLA-B*51:01H HLA-B*52:01H
  source 1..8: note = Severe acute respiratory syndrome coronavirus 2
NGYPNMFI

SEQ ID NO: 1188 - protein, 8 aa, Severe acute respiratory syndrome-related coronavirus
  REGION 1..8: note = Table A: HLA-A*33:03H HLA-A*34:01H HLA-A*66:01H
  source 1..8: note = Severe acute respiratory syndrome coronavirus 2
YPNMFITR

SEQ ID NO: 1189 - protein, 8 aa, Severe acute respiratory syndrome-related coronavirus
  REGION 1..8: note = Table A: HLA-B*49:01H
  source 1..8: note = Severe acute respiratory syndrome coronavirus 2
REEAIRHV

SEQ ID NO: 1190 - protein, 8 aa, Severe acute respiratory syndrome-related coronavirus
  REGION 1..8: note = Table A: HLA-A*02:11H HLA-B*13:02H
  source 1..8: note = Severe acute respiratory syndrome coronavirus 2
RAWIGFDV

SEQ ID NO: 1191 - protein, 8 aa, Severe acute respiratory syndrome-related coronavirus
  REGION 1..8: note = Table A: HLA-B*37:01H HLA-B*40:01M HLA-B*40:02H HLA-B*41:02H
  source 1..8: note = Severe acute respiratory syndrome coronavirus 2
REAVGTNL

SEQ ID NO: 1192 - protein, 8 aa, Severe acute respiratory syndrome-related coronavirus
  REGION 1..8: note = Table A: HLA-C*15:05H
  source 1..8: note = Severe acute respiratory syndrome coronavirus 2
AVGTNLPL

SEQ ID NO: 1193 - protein, 8 aa, Severe acute respiratory syndrome-related coronavirus
  REGION 1..8: note = Table A: HLA-C*15:05M HLA-C*15:02M HLA-C*07:04H
  source 1..8: note = Severe acute respiratory syndrome coronavirus 2
GTNLPLQL

SEQ ID NO: 1194 - protein, 8 aa, Severe acute respiratory syndrome-related coronavirus
  REGION 1..8: note = Table A: HLA-A*02:01H HLA-A*02:03H
  source 1..8: note = Severe acute respiratory syndrome coronavirus 2
QLGFSTGV

SEQ ID NO: 1195 - protein, 8 aa, Severe acute respiratory syndrome-related coronavirus
  REGION 1..8: note = Table A: HLA-B*39:06H
  source 1..8: note = Severe acute respiratory syndrome coronavirus 2
TGVNLVAV

SEQ ID NO: 1196 - protein, 8 aa, Severe acute respiratory syndrome-related coronavirus
  REGION 1..8: note = Table A: HLA-B*38:02H HLA-B*15:01H HLA-B*15:02H HLA-B*39:01H
  source 1..8: note = Severe acute respiratory syndrome coronavirus 2
LVAVPTGY

SEQ ID NO: 1197 - protein, 8 aa, Severe acute respiratory syndrome-related coronavirus
  REGION 1..8: note = Table A: HLA-B*51:01H
  source 1..8: note = Severe acute respiratory syndrome coronavirus 2
VAVPTGYV

SEQ ID NO: 1198 - protein, 8 aa, Severe acute respiratory syndrome-related coronavirus
  REGION 1..8: note = Table A: HLA-B*39:06H HLA-B*50:01H
  source 1..8: note = Severe acute respiratory syndrome coronavirus 2
TDFSRVSA

SEQ ID NO: 1199 - protein, 8 aa, Severe acute respiratory syndrome-related coronavirus
  REGION 1..8: note = Table A: HLA-C*15:05H HLA-B*07:05H
  source 1..8: note = Severe acute respiratory syndrome coronavirus 2
KPPPGDQF

SEQ ID NO: 1200 - protein, 8 aa, Severe acute respiratory syndrome-related coronavirus
  REGION 1..8: note = Table A: HLA-A*36:01H HLA-B*38:02H HLA-B*15:03M
  source 1..8: note = Severe acute respiratory syndrome coronavirus 2
KHLIPLMY

SEQ ID NO: 1201 - protein, 8 aa, Severe acute respiratory syndrome-related coronavirus
  REGION 1..8: note = Table A: HLA-A*11:02H
  source 1..8: note = Severe acute respiratory syndrome coronavirus 2
HLIPLMYK

SEQ ID NO: 1202 - protein, 8 aa, Severe acute respiratory syndrome-related coronavirus
  REGION 1..8: note = Table A: HLA-A*02:11H HLA-B*53:01M HLA-C*15:05H HLA-B*51:01H HLA-B*35:07H HLA-B*52:01H HLA-C*08:01H HLA-B*54:01M HLA-B*07:05H
  source 1..8: note = Severe acute respiratory syndrome coronavirus 2
LPWNVVRI

SEQ ID NO: 1203 - protein, 8 aa, Severe acute respiratory syndrome-related coronavirus
  REGION 1..8: note = Table A: HLA-B*14:01H
  source 1..8: note = Severe acute respiratory syndrome coronavirus 2
VRIKIVQM

SEQ ID NO: 1204 - protein, 8 aa, Severe acute respiratory syndrome-related coronavirus
  REGION 1..8: note = Table A: HLA-B*08:01H HLA-B*07:04H
  source 1..8: note = Severe acute respiratory syndrome coronavirus 2
RIKIVQML

SEQ ID NO: 1205 - protein, 8 aa, Severe acute respiratory syndrome-related coronavirus
  REGION 1..8: note = Table A: HLA-B*14:01H HLA-B*15:01H HLA-B*39:01H
  source 1..8: note = Severe acute respiratory syndrome coronavirus 2
VQMLSDTL

SEQ ID NO: 1206 - protein, 8 aa, Severe acute respiratory syndrome-related coronavirus
  REGION 1..8: note = Table A: HLA-C*04:03H HLA-C*03:04H HLA-C*08:02H
  source 1..8: note = Severe acute respiratory syndrome coronavirus 2
LSDTLKNL

SEQ ID NO: 1207 - protein, 8 aa, Severe acute respiratory syndrome-related coronavirus
  REGION 1..8: note = Table A: HLA-C*04:03H HLA-C*15:02H HLA-C*05:01M
  source 1..8: note = Severe acute respiratory syndrome coronavirus 2
LSDRVVFV

SEQ ID NO: 1208 - protein, 8 aa, Severe acute respiratory syndrome-related coronavirus
  REGION 1..8: note = Table A: HLA-B*37:01H HLA-B*40:02H HLA-B*41:02M
  source 1..8: note = Severe acute respiratory syndrome coronavirus 2
SDRVVFVL

SEQ ID NO: 1209 - protein, 8 aa, Severe acute respiratory syndrome-related coronavirus
  REGION 1..8: note = Table A: HLA-B*38:02H
  source 1..8: note = Severe acute respiratory syndrome coronavirus 2
DRVVFVLW

SEQ ID NO: 1210 - protein, 8 aa, Severe acute respiratory syndrome-related coronavirus
  REGION 1..8: note = Table A: HLA-B*46:01H
  source 1..8: note = Severe acute respiratory syndrome coronavirus 2
VVFVLWAH

SEQ ID NO: 1211 - protein, 8 aa, Severe acute respiratory syndrome-related coronavirus
  REGION 1..8: note = Table A: HLA-C*03:04H HLA-C*08:01H
  source 1..8: note = Severe acute respiratory syndrome coronavirus 2
LWAHGFEL

SEQ ID NO: 1212 - protein, 8 aa, Severe acute respiratory syndrome-related coronavirus
  REGION 1..8: note = Table A: HLA-B*46:01H HLA-B*18:01H HLA-C*03:02H HLA-C*15:05H HLA-B*51:01H HLA-B*52:01M HLA-B*38:02H HLA-B*39:06H HLA-B*15:02M HLA-B*07:05H
  source 1..8: note = Severe acute respiratory syndrome coronavirus 2
HGFELTSM

SEQ ID NO: 1213 - protein, 8 aa, Severe acute respiratory syndrome-related coronavirus
  REGION 1..8: note = Table A: HLA-B*44:03H HLA-B*18:01M HLA-C*07:01H HLA-B*07:05H
  source 1..8: note = Severe acute respiratory syndrome coronavirus 2
FELTSMKY

SEQ ID NO: 1214 - protein, 8 aa, Severe acute respiratory syndrome-related coronavirus
  REGION 1..8: note = Table A: HLA-A*11:02H
  source 1..8: note = Severe acute respiratory syndrome coronavirus 2
TSMKYFVK

SEQ ID NO: 1215 - protein, 8 aa, Severe acute respiratory syndrome-related coronavirus
  REGION 1..8: note = Table A: HLA-B*52:01H
  source 1..8: note = Severe acute respiratory syndrome coronavirus 2
SMKYFVKI

SEQ ID NO: 1216 - protein, 8 aa, Severe acute respiratory syndrome-related coronavirus
  REGION 1..8: note = Table A: HLA-A*33:03H HLA-A*34:01H HLA-A*66:01H
  source 1..8: note = Severe acute respiratory syndrome coronavirus 2
FVKIGPER

SEQ ID NO: 1217 - protein, 8 aa, Severe acute respiratory syndrome-related coronavirus
  REGION 1..8: note = Table A: HLA-B*58:01H HLA-B*35:01H HLA-B*39:01H
  source 1..8: note = Severe acute respiratory syndrome coronavirus 2
FSTASDTY

SEQ ID NO: 1218 - protein, 8 aa, Severe acute respiratory syndrome-related coronavirus
  REGION 1..8: note = Table A: HLA-B*58:01H
  source 1..8: note = Severe acute respiratory syndrome coronavirus 2
ASDTYACW

SEQ ID NO: 1219 - protein, 8 aa, Severe acute respiratory syndrome-related coronavirus
  REGION 1..8: note = Table A: HLA-B*38:02H
  source 1..8: note = Severe acute respiratory syndrome coronavirus 2
HHSIGFDY

SEQ ID NO: 1220 - protein, 8 aa, Severe acute respiratory syndrome-related coronavirus
  REGION 1..8: note = Table A: HLA-B*37:01H
  source 1..8: note = Severe acute respiratory syndrome coronavirus 2
FDYVYNPF

SEQ ID NO: 1221 - protein, 8 aa, Severe acute respiratory syndrome-related coronavirus
  REGION 1..8: note = Table A: HLA-A*02:11H HLA-B*51:01H
  source 1..8: note = Severe acute respiratory syndrome coronavirus 2
YVYNPFMI

SEQ ID NO: 1222 - protein, 8 aa, Severe acute respiratory syndrome-related coronavirus
  REGION 1..8: note = Table A: HLA-B*38:02H
  source 1..8: note = Severe acute respiratory syndrome coronavirus 2
FMIDVQQW

SEQ ID NO: 1223 - protein, 8 aa, Severe acute respiratory syndrome-related coronavirus
  REGION 1..8: note = Table A: HLA-B*37:01H
  source 1..8: note = Severe acute respiratory syndrome coronavirus 2
IDVQQWGF

SEQ ID NO: 1224 - protein, 8 aa, Severe acute respiratory syndrome-related coronavirus
  REGION 1..8: note = Table A: HLA-A*30:02H HLA-B*15:01H HLA-B*39:01H
  source 1..8: note = Severe acute respiratory syndrome coronavirus 2
LQSNHDLY

SEQ ID NO: 1225 - protein, 8 aa, Severe acute respiratory syndrome-related coronavirus
  REGION 1..8: note = Table A: HLA-B*39:06M
  source 1..8: note = Severe acute respiratory syndrome coronavirus 2
VHGNAHVA

SEQ ID NO: 1226 - protein, 8 aa, Severe acute respiratory syndrome-related coronavirus
  REGION 1..8: note = Table A: HLA-B*39:06H
  source 1..8: note = Severe acute respiratory syndrome coronavirus 2
AHVASCDA

SEQ ID NO: 1227 - protein, 8 aa, Severe acute respiratory syndrome-related coronavirus
  REGION 1..8: note = Table A: HLA-B*08:01H HLA-C*15:05H HLA-B*14:02H HLA-B*14:01H HLA-B*35:02H HLA-B*51:01M HLA-B*35:12H HLA-B*38:02H HLA-B*15:02H HLA-B*07:05H
  source 1..8: note = Severe acute respiratory syndrome coronavirus 2
DAIMTRCL

SEQ ID NO: 1228 - protein, 8 aa, Severe acute respiratory syndrome-related coronavirus
  REGION 1..8: note = Table A: HLA-A*11:02H
  source 1..8: note = Severe acute respiratory syndrome coronavirus 2
AVHECFVK

SEQ ID NO: 1229 - protein, 8 aa, Severe acute respiratory syndrome-related coronavirus
  REGION 1..8: note = Table A: HLA-B*49:01H
  source 1..8: note = Severe acute respiratory syndrome coronavirus 2
HECFVKRV

SEQ ID NO: 1230 - protein, 8 aa, Severe acute respiratory syndrome-related coronavirus
  REGION 1..8: note = Table A: HLA-A*36:01M
  source 1..8: note = Severe acute respiratory syndrome coronavirus 2
RVDWTIEY

SEQ ID NO: 1231 - protein, 8 aa, Severe acute respiratory syndrome-related coronavirus
  REGION 1..8: note = Table A: HLA-B*42:01H HLA-B*08:01H HLA-C*03:03H HLA-B*53:01H HLA-C*03:02H HLA-C*03:04H HLA-B*35:03H HLA-C*15:05H HLA-B*14:02H HLA-B*14:01H HLA-A*34:01H HLA-B*35:01H HLA-B*35:02H HLA-B*35:08M HLA-B*51:01M HLA-B*35:07M
  REGION 1..8: note = CONT. FROM ABOVE: HLA-C*08:01M HLA-B*35:12H HLA-B*38:01H HLA- B*38:02M HLA-B*40:01H HLA-B*54:01H HLA-B*07:02H HLA-B*15:02H HLA-B*39:01M HLA-B*07:05M HLA-B*15:10H
  source 1..8: note = Severe acute respiratory syndrome coronavirus 2
YPIIGDEL

SEQ ID NO: 1232 - protein, 8 aa, Severe acute respiratory syndrome-related coronavirus
  REGION 1..8: note = Table A: HLA-C*15:02H
  source 1..8: note = Severe acute respiratory syndrome coronavirus 2
IIGDELKI

SEQ ID NO: 1233 - protein, 8 aa, Severe acute respiratory syndrome-related coronavirus
  REGION 1..8: note = Table A: HLA-B*45:01H HLA-B*18:01H HLA-B*39:06M HLA-B*40:06H HLA-B*54:01H HLA-B*07:05M HLA-B*50:01H
  source 1..8: note = Severe acute respiratory syndrome coronavirus 2
DELKINAA

SEQ ID NO: 1234 - protein, 8 aa, Severe acute respiratory syndrome-related coronavirus
  REGION 1..8: note = Table A: HLA-B*15:03H
  source 1..8: note = Severe acute respiratory syndrome coronavirus 2
RKVQHMVV

SEQ ID NO: 1235 - protein, 8 aa, Severe acute respiratory syndrome-related coronavirus
  REGION 1..8: note = Table A: HLA-A*03:02H HLA-A*11:01H HLA-A*11:02H HLA-A*30:02H
  source 1..8: note = Severe acute respiratory syndrome coronavirus 2
KVQHMVVK

SEQ ID NO: 1236 - protein, 8 aa, Severe acute respiratory syndrome-related coronavirus
  REGION 1..8: note = Table A: HLA-A*02:05H HLA-B*52:01M HLA-B*38:02H HLA-B*39:06H HLA-B*15:01M HLA-B*13:02H
  source 1..8: note = Severe acute respiratory syndrome coronavirus 2
VQHMVVKA

SEQ ID NO: 1237 - protein, 8 aa, Severe acute respiratory syndrome-related coronavirus
  REGION 1..8: note = Table A: HLA-B*45:01H HLA-B*39:06H HLA-B*15:10H HLA-B*50:01H
  source 1..8: note = Severe acute respiratory syndrome coronavirus 2
QHMVVKAA

SEQ ID NO: 1238 - protein, 8 aa, Severe acute respiratory syndrome-related coronavirus
  REGION 1..8: note = Table A: HLA-B*08:01M HLA-B*14:02H HLA-B*14:01H
  source 1..8: note = Severe acute respiratory syndrome coronavirus 2
HMVVKAAL

SEQ ID NO: 1239 - protein, 8 aa, Severe acute respiratory syndrome-related coronavirus
  REGION 1..8: note = Table A: HLA-A*68:02H HLA-C*15:05H HLA-B*38:02H
  source 1..8: note = Severe acute respiratory syndrome coronavirus 2
MVVKAALL

SEQ ID NO: 1240 - protein, 8 aa, Severe acute respiratory syndrome-related coronavirus
  REGION 1..8: note = Table A: HLA-C*04:03M HLA-C*03:02H HLA-C*15:05H HLA-C*08:01H HLA-C*08:02H HLA-B*35:12H HLA-C*05:01H
  source 1..8: note = Severe acute respiratory syndrome coronavirus 2
LADKFPVL

SEQ ID NO: 1241 - protein, 8 aa, Severe acute respiratory syndrome-related coronavirus
  REGION 1..8: note = Table A: HLA-B*45:01H HLA-B*40:02H HLA-B*40:06H
  source 1..8: note = Severe acute respiratory syndrome coronavirus 2
HDIGNPKA

SEQ ID NO: 1242 - protein, 8 aa, Severe acute respiratory syndrome-related coronavirus
  REGION 1..8: note = Table A: HLA-B*53:01H
  source 1..8: note = Severe acute respiratory syndrome coronavirus 2
VPQADVEW

SEQ ID NO: 1243 - protein, 8 aa, Severe acute respiratory syndrome-related coronavirus
  REGION 1..8: note = Table A: HLA-C*04:03M HLA-B*35:02H HLA-B*35:08H HLA-B*35:12H HLA-C*05:01H
  source 1..8: note = Severe acute respiratory syndrome coronavirus 2
QADVEWKF

SEQ ID NO: 1244 - protein, 8 aa, Severe acute respiratory syndrome-related coronavirus
  REGION 1..8: note = Table A: HLA-B*40:06M HLA-B*50:01H
  source 1..8: note = Severe acute respiratory syndrome coronavirus 2
VEWKFYDA

SEQ ID NO: 1245 - protein, 8 aa, Severe acute respiratory syndrome-related coronavirus
  REGION 1..8: note = Table A: HLA-A*02:11H HLA-C*15:05H HLA-B*57:03H
  source 1..8: note = Severe acute respiratory syndrome coronavirus 2
KAYKIEEL

SEQ ID NO: 1246 - protein, 8 aa, Severe acute respiratory syndrome-related coronavirus
  REGION 1..8: note = Table A: HLA-B*15:03H
  source 1..8: note = Severe acute respiratory syndrome coronavirus 2
YKIEELFY

SEQ ID NO: 1247 - protein, 8 aa, Severe acute respiratory syndrome-related coronavirus
  REGION 1..8: note = Table A: HLA-B*18:01M HLA-B*07:05M
  source 1..8: note = Severe acute respiratory syndrome coronavirus 2
IEELFYSY

SEQ ID NO: 1248 - protein, 8 aa, Severe acute respiratory syndrome-related coronavirus
  REGION 1..8: note = Table A: HLA-B*58:01H HLA-B*53:01H HLA-B*35:01H HLA-B*35:02H HLA-B*35:08H HLA-B*39:01H
  source 1..8: note = Severe acute respiratory syndrome coronavirus 2
YATHSDKF

SEQ ID NO: 1249 - protein, 8 aa, Severe acute respiratory syndrome-related coronavirus
  REGION 1..8: note = Table A: HLA-C*04:03M
  source 1..8: note = Severe acute respiratory syndrome coronavirus 2
FTDGVCLF

SEQ ID NO: 1250 - protein, 8 aa, Severe acute respiratory syndrome-related coronavirus
  REGION 1..8: note = Table A: HLA-B*14:02M HLA-B*14:01M HLA-B*51:01H HLA-B*38:02H HLA-B*39:01H
  source 1..8: note = Severe acute respiratory syndrome coronavirus 2
DRYPANSI

SEQ ID NO: 1251 - protein, 8 aa, Severe acute respiratory syndrome-related coronavirus
  REGION 1..8: note = Table A: HLA-B*56:01H HLA-B*55:02H HLA-B*35:03H HLA-C*15:05H HLA-B*35:01H HLA-B*35:02H HLA-B*51:01H HLA-B*54:01M
  source 1..8: note = Severe acute respiratory syndrome coronavirus 2
YPANSIVC

SEQ ID NO: 1252 - protein, 8 aa, Severe acute respiratory syndrome-related coronavirus
  REGION 1..8: note = Table A: HLA-A*11:01H HLA-A*11:02H HLA-A*33:01H HLA-A*33:03M HLA-A*68:01H
  source 1..8: note = Severe acute respiratory syndrome coronavirus 2
PANSIVCR

SEQ ID NO: 1253 - protein, 8 aa, Severe acute respiratory syndrome-related coronavirus
  REGION 1..8: note = Table A: HLA-C*15:05H
  source 1..8: note = Severe acute respiratory syndrome coronavirus 2
DTRVLSNL

SEQ ID NO: 1254 - protein, 8 aa, Severe acute respiratory syndrome-related coronavirus
  REGION 1..8: note = Table A: HLA-C*14:02H
  source 1..8: note = Severe acute respiratory syndrome coronavirus 2
LYVNKHAF

SEQ ID NO: 1255 - protein, 8 aa, Severe acute respiratory syndrome-related coronavirus
  REGION 1..8: note = Table A: HLA-B*58:02H HLA-B*46:01H HLA-B*53:01H HLA-C*03:02H HLA-B*35:01H HLA-B*51:01H HLA-B*35:07M HLA-B*38:02H HLA-B*54:01H HLA-B*15:02M HLA-B*57:03H
  source 1..8: note = Severe acute respiratory syndrome coronavirus 2
HAFHTPAF

SEQ ID NO: 1256 - protein, 8 aa, Severe acute respiratory syndrome-related coronavirus
  REGION 1..8: note = Table A: HLA-C*04:01H HLA-C*04:03H
  source 1..8: note = Severe acute respiratory syndrome coronavirus 2
AFDKSAFV

SEQ ID NO: 1257 - protein, 8 aa, Severe acute respiratory syndrome-related coronavirus
  REGION 1..8: note = Table A: HLA-B*58:02H HLA-A*36:01H HLA-A*30:02M HLA-B*15:01H HLA-B*15:03M
  source 1..8: note = Severe acute respiratory syndrome coronavirus 2
KQLPFFYY

SEQ ID NO: 1258 - protein, 8 aa, Severe acute respiratory syndrome-related coronavirus
  REGION 1..8: note = Table A: HLA-A*36:01H HLA-A*34:02H
  source 1..8: note = Severe acute respiratory syndrome coronavirus 2
DIDYVPLK

SEQ ID NO: 1259 - protein, 8 aa, Severe acute respiratory syndrome-related coronavirus
  REGION 1..8: note = Table A: HLA-B*39:06H HLA-B*54:01H
  source 1..8: note = Severe acute respiratory syndrome coronavirus 2
DYVPLKSA

SEQ ID NO: 1260 - protein, 8 aa, Severe acute respiratory syndrome-related coronavirus
  REGION 1..8: note = Table A: HLA-C*15:05H HLA-B*51:01H
  source 1..8: note = Severe acute respiratory syndrome coronavirus 2
VPLKSATC

SEQ ID NO: 1261 - protein, 8 aa, Severe acute respiratory syndrome-related coronavirus
  REGION 1..8: note = Table A: HLA-B*38:01M HLA-B*38:02M HLA-B*39:01H HLA-B*13:01H HLA-B*15:10H
  source 1..8: note = Severe acute respiratory syndrome coronavirus 2
HHANEYRL

SEQ ID NO: 1262 - protein, 8 aa, Severe acute respiratory syndrome-related coronavirus
  REGION 1..8: note = Table A: HLA-B*58:02H HLA-C*16:01H
  source 1..8: note = Severe acute respiratory syndrome coronavirus 2
HANEYRLY

SEQ ID NO: 1263 - protein, 8 aa, Severe acute respiratory syndrome-related coronavirus
  REGION 1..8: note = Table A: HLA-C*14:03H
  source 1..8: note = Severe acute respiratory syndrome coronavirus 2
LYLDAYNM

SEQ ID NO: 1264 - protein, 8 aa, Severe acute respiratory syndrome-related coronavirus
  REGION 1..8: note = Table A: HLA-B*18:01H HLA-B*38:02H HLA-B*15:02H HLA-B*07:05H
  source 1..8: note = Severe acute respiratory syndrome coronavirus 2
NMMISAGF

SEQ ID NO: 1265 - protein, 8 aa, Severe acute respiratory syndrome-related coronavirus
  REGION 1..8: note = Table A: HLA-B*58:01H HLA-B*57:01H HLA-B*57:03H
  source 1..8: note = Severe acute respiratory syndrome coronavirus 2
ISAGFSLW

SEQ ID NO: 1266 - protein, 8 aa, Severe acute respiratory syndrome-related coronavirus
  REGION 1..8: note = Table A: HLA-A*30:02M
  source 1..8: note = Severe acute respiratory syndrome coronavirus 2
VYKQFDTY

SEQ ID NO: 1267 - protein, 8 aa, Severe acute respiratory syndrome-related coronavirus
  REGION 1..8: note = Table A: HLA-B*48:01H HLA-A*02:11M HLA-A*02:05H HLA-A*02:02H HLA-B*13:02H
  source 1..8: note = Severe acute respiratory syndrome coronavirus 2
KQFDTYNL

SEQ ID NO: 1268 - protein, 8 aa, Severe acute respiratory syndrome-related coronavirus
  REGION 1..8: note = Table A: HLA-A*24:02H
  source 1..8: note = Severe acute respiratory syndrome coronavirus 2
TYNLWNTF

SEQ ID NO: 1269 - protein, 8 aa, Severe acute respiratory syndrome-related coronavirus
  REGION 1..8: note = Table A: HLA-B*18:01H HLA-B*49:01H
  source 1..8: note = Severe acute respiratory syndrome coronavirus 2
LENVAFNV

SEQ ID NO: 1270 - protein, 8 aa, Severe acute respiratory syndrome-related coronavirus
  REGION 1..8: note = Table A: HLA-A*03:01H HLA-A*03:02M HLA-A*11:01M HLA-A*11:02M HLA-A*68:01H HLA-A*34:02H HLA-C*07:27H
  source 1..8: note = Severe acute respiratory syndrome coronavirus 2
VAFNVVNK

SEQ ID NO: 1271 - protein, 8 aa, Severe acute respiratory syndrome-related coronavirus
  REGION 1..8: note = Table A: HLA-B*40:01H HLA-B*40:02M HLA-B*41:02H HLA-B*49:01M
  source 1..8: note = Severe acute respiratory syndrome coronavirus 2
GEVPVSII

SEQ ID NO: 1272 - protein, 8 aa, Severe acute respiratory syndrome-related coronavirus
  REGION 1..8: note = Table A: HLA-B*52:01H
  source 1..8: note = Severe acute respiratory syndrome coronavirus 2
VSIINNTV

SEQ ID NO: 1273 - protein, 8 aa, Severe acute respiratory syndrome-related coronavirus
  REGION 1..8: note = Table A: HLA-B*46:01H HLA-B*38:02H HLA-B*15:01H HLA-B*15:02H
  source 1..8: note = Severe acute respiratory syndrome coronavirus 2
SIINNTVY

SEQ ID NO: 1274 - protein, 8 aa, Severe acute respiratory syndrome-related coronavirus
  REGION 1..8: note = Table A: HLA-A*03:02H
  source 1..8: note = Severe acute respiratory syndrome coronavirus 2
INNTVYTK

SEQ ID NO: 1275 - protein, 8 aa, Severe acute respiratory syndrome-related coronavirus
  REGION 1..8: note = Table A: HLA-B*50:01H
  source 1..8: note = Severe acute respiratory syndrome coronavirus 2
FENKTTLP

SEQ ID NO: 1276 - protein, 8 aa, Severe acute respiratory syndrome-related coronavirus
  REGION 1..8: note = Table A: HLA-C*15:05H HLA-C*15:02H
  source 1..8: note = Severe acute respiratory syndrome coronavirus 2
KTTLPVNV

SEQ ID NO: 1277 - protein, 8 aa, Severe acute respiratory syndrome-related coronavirus
  REGION 1..8: note = Table A: HLA-B*38:02H
  source 1..8: note = Severe acute respiratory syndrome coronavirus 2
TLPVNVAF

SEQ ID NO: 1278 - protein, 8 aa, Severe acute respiratory syndrome-related coronavirus
  REGION 1..8: note = Table A: HLA-B*35:03H
  source 1..8: note = Severe acute respiratory syndrome coronavirus 2
PVNVAFEL

SEQ ID NO: 1279 - protein, 8 aa, Severe acute respiratory syndrome-related coronavirus
  REGION 1..8: note = Table A: HLA-A*11:02H
  source 1..8: note = Severe acute respiratory syndrome coronavirus 2
VAFELWAK

SEQ ID NO: 1280 - protein, 8 aa, Severe acute respiratory syndrome-related coronavirus
  REGION 1..8: note = Table A: HLA-B*08:01H HLA-B*55:01H HLA-A*02:03H HLA-B*51:01H HLA-B*52:01H HLA-B*38:02H HLA-B*54:01H
  source 1..8: note = Severe acute respiratory syndrome coronavirus 2
NIKPVPEV

SEQ ID NO: 1281 - protein, 8 aa, Severe acute respiratory syndrome-related coronavirus
  REGION 1..8: note = Table A: HLA-C*15:05H
  source 1..8: note = Severe acute respiratory syndrome coronavirus 2
KPVPEVKI

SEQ ID NO: 1282 - protein, 8 aa, Severe acute respiratory syndrome-related coronavirus
  REGION 1..8: note = Table A: HLA-B*40:02H HLA-B*41:02H HLA-B*49:01H
  source 1..8: note = Severe acute respiratory syndrome coronavirus 2
VDIAANTV

SEQ ID NO: 1283 - protein, 8 aa, Severe acute respiratory syndrome-related coronavirus
  REGION 1..8: note = Table A: HLA-B*58:01H
  source 1..8: note = Severe acute respiratory syndrome coronavirus 2
IAANTVIW

SEQ ID NO: 1284 - protein, 8 aa, Severe acute respiratory syndrome-related coronavirus
  REGION 1..8: note = Table A: HLA-B*51:01H
  source 1..8: note = Severe acute respiratory syndrome coronavirus 2
DAPAHIST

SEQ ID NO: 1285 - protein, 8 aa, Severe acute respiratory syndrome-related coronavirus
  REGION 1..8: note = Table A: HLA-B*56:01H HLA-B*55:02H HLA-C*15:05H HLA-B*55:01M HLA-B*51:01M HLA-B*07:02H HLA-B*07:04H HLA-B*07:05H
  source 1..8: note = Severe acute respiratory syndrome coronavirus 2
APAHISTI

SEQ ID NO: 1286 - protein, 8 aa, Severe acute respiratory syndrome-related coronavirus
  REGION 1..8: note = Table A: HLA-B*39:06M HLA-B*15:10H
  source 1..8: note = Severe acute respiratory syndrome coronavirus 2
AHISTIGV

SEQ ID NO: 1287 - protein, 8 aa, Severe acute respiratory syndrome-related coronavirus
  REGION 1..8: note = Table A: HLA-A*03:02H
  source 1..8: note = Severe acute respiratory syndrome coronavirus 2
SMTDIAKK

SEQ ID NO: 1288 - protein, 8 aa, Severe acute respiratory syndrome-related coronavirus
  REGION 1..8: note = Table A: HLA-B*56:01H HLA-B*55:02H HLA-B*55:01H
  source 1..8: note = Severe acute respiratory syndrome coronavirus 2
KPTETICA

SEQ ID NO: 1289 - protein, 8 aa, Severe acute respiratory syndrome-related coronavirus
  REGION 1..8: note = Table A: HLA-B*51:01H
  source 1..8: note = Severe acute respiratory syndrome coronavirus 2
DGRVDGQV

SEQ ID NO: 1290 - protein, 8 aa, Severe acute respiratory syndrome-related coronavirus
  REGION 1..8: note = Table A: HLA-C*04:03H HLA-C*08:02H HLA-C*05:01H
  source 1..8: note = Severe acute respiratory syndrome coronavirus 2
RVDGQVDL

SEQ ID NO: 1291 - protein, 8 aa, Severe acute respiratory syndrome-related coronavirus
  REGION 1..8: note = Table A: HLA-B*37:01H
  source 1..8: note = Severe acute respiratory syndrome coronavirus 2
VDGQVDLF

SEQ ID NO: 1292 - protein, 8 aa, Severe acute respiratory syndrome-related coronavirus
  REGION 1..8: note = Table A: HLA-B*51:01H
  source 1..8: note = Severe acute respiratory syndrome coronavirus 2
NARNGVLI

SEQ ID NO: 1293 - protein, 8 aa, Severe acute respiratory syndrome-related coronavirus
  REGION 1..8: note = Table A: HLA-C*03:03H
  source 1..8: note = Severe acute respiratory syndrome coronavirus 2
LITEGSVK

SEQ ID NO: 1294 - protein, 8 aa, Severe acute respiratory syndrome-related coronavirus
  REGION 1..8: note = Table A: HLA-B*44:05H HLA-B*40:02H HLA-B*41:02H
  source 1..8: note = Severe acute respiratory syndrome coronavirus 2
TEGSVKGL

SEQ ID NO: 1295 - protein, 8 aa, Severe acute respiratory syndrome-related coronavirus
  REGION 1..8: note = Table A: HLA-C*15:05H HLA-C*01:02H
  source 1..8: note = Severe acute respiratory syndrome coronavirus 2
VGPKQASL

SEQ ID NO: 1296 - protein, 8 aa, Severe acute respiratory syndrome-related coronavirus
  REGION 1..8: note = Table A: HLA-A*02:03H
  source 1..8: note = Severe acute respiratory syndrome coronavirus 2
SLNGVTLI

SEQ ID NO: 1297 - protein, 8 aa, Severe acute respiratory syndrome-related coronavirus
  REGION 1..8: note = Table A: HLA-B*44:05M HLA-B*44:03H HLA-B*18:01H HLA-B*37:01M HLA-B*40:02H HLA-B*07:05H HLA-B*41:02H
  source 1..8: note = Severe acute respiratory syndrome coronavirus 2
GEAVKTQF

SEQ ID NO: 1298 - protein, 8 aa, Severe acute respiratory syndrome-related coronavirus
  REGION 1..8: note = Table A: HLA-A*30:02H HLA-B*15:01H
  source 1..8: note = Severe acute respiratory syndrome coronavirus 2
AVKTQFNY

SEQ ID NO: 1299 - protein, 8 aa, Severe acute respiratory syndrome-related coronavirus
  REGION 1..8: note = Table A: HLA-B*15:03H
  source 1..8: note = Severe acute respiratory syndrome coronavirus 2
VKTQFNYY

SEQ ID NO: 1300 - protein, 8 aa, Severe acute respiratory syndrome-related coronavirus
  REGION 1..8: note = Table A: HLA-A*36:01H
  source 1..8: note = Severe acute respiratory syndrome coronavirus 2
KTQFNYYK

SEQ ID NO: 1301 - protein, 8 aa, Severe acute respiratory syndrome-related coronavirus
  REGION 1..8: note = Table A: HLA-A*11:02H
  source 1..8: note = Severe acute respiratory syndrome coronavirus 2
TQFNYYKK

SEQ ID NO: 1302 - protein, 8 aa, Severe acute respiratory syndrome-related coronavirus
  REGION 1..8: note = Table A: HLA-B*44:05H HLA-C*08:03H HLA-B*37:01M HLA-B*40:02H HLA-B*41:02H
  source 1..8: note = Severe acute respiratory syndrome coronavirus 2
VDGVVQQL

SEQ ID NO: 1303 - protein, 8 aa, Severe acute respiratory syndrome-related coronavirus
  REGION 1..8: note = Table A: HLA-B*15:01M HLA-B*15:03H
  source 1..8: note = Severe acute respiratory syndrome coronavirus 2
VQQLPETY

SEQ ID NO: 1304 - protein, 8 aa, Severe acute respiratory syndrome-related coronavirus
  REGION 1..8: note = Table A: HLA-A*33:03H HLA-A*34:01M HLA-A*34:02H HLA-A*66:01M
  source 1..8: note = Severe acute respiratory syndrome coronavirus 2
ETYFTQSR

SEQ ID NO: 1305 - protein, 8 aa, Severe acute respiratory syndrome-related coronavirus
  REGION 1..8: note = Table A: HLA-C*14:02H HLA-C*14:03H
  source 1..8: note = Severe acute respiratory syndrome coronavirus 2
YFTQSRNL

SEQ ID NO: 1306 - protein, 8 aa, Severe acute respiratory syndrome-related coronavirus
  REGION 1..8: note = Table A: HLA-B*46:01H
  source 1..8: note = Severe acute respiratory syndrome coronavirus 2
QSRNLQEF

SEQ ID NO: 1307 - protein, 8 aa, Severe acute respiratory syndrome-related coronavirus
  REGION 1..8: note = Table A: HLA-B*08:01H
  source 1..8: note = Severe acute respiratory syndrome coronavirus 2
EFKPRSQM

SEQ ID NO: 1308 - protein, 8 aa, Severe acute respiratory syndrome-related coronavirus
  REGION 1..8: note = Table A: HLA-B*18:01H HLA-B*38:02H HLA-B*40:01H HLA-B*40:02H HLA-B*07:05H HLA-B*41:02H HLA-B*49:01M HLA-B*50:01H
  source 1..8: note = Severe acute respiratory syndrome coronavirus 2
MEIDFLEL

SEQ ID NO: 1309 - protein, 8 aa, Severe acute respiratory syndrome-related coronavirus
  REGION 1..8: note = Table A: HLA-B*18:01H HLA-B*07:05H
  source 1..8: note = Severe acute respiratory syndrome coronavirus 2
LELAMDEF

SEQ ID NO: 1310 - protein, 8 aa, Severe acute respiratory syndrome-related coronavirus
  REGION 1..8: note = Table A: HLA-A*36:01H
  source 1..8: note = Severe acute respiratory syndrome coronavirus 2
AMDEFIER

SEQ ID NO: 1311 - protein, 8 aa, Severe acute respiratory syndrome-related coronavirus
  REGION 1..8: note = Table A: HLA-A*36:01H HLA-B*18:01H
  source 1..8: note = Severe acute respiratory syndrome coronavirus 2
MDEFIERY

SEQ ID NO: 1312 - protein, 8 aa, Severe acute respiratory syndrome-related coronavirus
  REGION 1..8: note = Table A: HLA-B*08:01H
  source 1..8: note = Severe acute respiratory syndrome coronavirus 2
EFIERYKL

SEQ ID NO: 1313 - protein, 8 aa, Severe acute respiratory syndrome-related coronavirus
  REGION 1..8: note = Table A: HLA-B*15:03H
  source 1..8: note = Severe acute respiratory syndrome coronavirus 2
YKLEGYAF

SEQ ID NO: 1314 - protein, 8 aa, Severe acute respiratory syndrome-related coronavirus
  REGION 1..8: note = Table A: HLA-B*18:01H
  source 1..8: note = Severe acute respiratory syndrome coronavirus 2
LEGYAFEH

SEQ ID NO: 1315 - protein, 8 aa, Severe acute respiratory syndrome-related coronavirus
  REGION 1..8: note = Table A: HLA-B*51:01H HLA-B*52:01H
  source 1..8: note = Severe acute respiratory syndrome coronavirus 2
EGYAFEHI

SEQ ID NO: 1316 - protein, 8 aa, Severe acute respiratory syndrome-related coronavirus
  REGION 1..8: note = Table A: HLA-C*14:02H HLA-C*14:03H HLA-C*16:01M HLA-C*16:04H HLA-B*46:01M HLA-C*06:02H HLA-B*08:01H HLA-C*07:01H HLA-C*03:02H HLA-C*03:04H HLA-C*12:02M HLA-C*12:03M HLA-B*35:01M HLA-B*35:08H HLA-B*35:07H HLA-B*38:02M
  REGION 1..8: note = CONT. FROM ABOVE: HLA-B*15:01H HLA-B*15:02H HLA-B*15:03H HLA- C*02:02H HLA-B*15:11H
  source 1..8: note = Severe acute respiratory syndrome coronavirus 2
YAFEHIVY

SEQ ID NO: 1317 - protein, 8 aa, Severe acute respiratory syndrome-related coronavirus
  REGION 1..8: note = Table A: HLA-B*38:02H HLA-B*39:01H
  source 1..8: note = Severe acute respiratory syndrome coronavirus 2
EHIVYGDF

SEQ ID NO: 1318 - protein, 8 aa, Severe acute respiratory syndrome-related coronavirus
  REGION 1..8: note = Table A: HLA-B*14:02H HLA-C*08:03H HLA-B*37:01M HLA-B*40:01H HLA-B*40:02M HLA-B*41:02M
  source 1..8: note = Severe acute respiratory syndrome coronavirus 2
GDFSHSQL

SEQ ID NO: 1319 - protein, 8 aa, Severe acute respiratory syndrome-related coronavirus
  REGION 1..8: note = Table A: HLA-A*02:04H HLA-A*02:02M
  source 1..8: note = Severe acute respiratory syndrome coronavirus 2
QLGGLHLL

SEQ ID NO: 1320 - protein, 8 aa, Severe acute respiratory syndrome-related coronavirus
  REGION 1..8: note = Table A: HLA-C*15:02H
  source 1..8: note = Severe acute respiratory syndrome coronavirus 2
LGGLHLLI

SEQ ID NO: 1321 - protein, 8 aa, Severe acute respiratory syndrome-related coronavirus
  REGION 1..8: note = Table A: HLA-A*36:01H HLA-A*34:02H
  source 1..8: note = Severe acute respiratory syndrome coronavirus 2
HLLIGLAK

SEQ ID NO: 1322 - protein, 8 aa, Severe acute respiratory syndrome-related coronavirus
  REGION 1..8: note = Table A: HLA-B*37:01H
  source 1..8: note = Severe acute respiratory syndrome coronavirus 2
MDSTVKNY

SEQ ID NO: 1323 - protein, 8 aa, Severe acute respiratory syndrome-related coronavirus
  REGION 1..8: note = Table A: HLA-B*58:01H HLA-B*58:02H HLA-B*57:03H
  source 1..8: note = Severe acute respiratory syndrome coronavirus 2
STVKNYFI

SEQ ID NO: 1324 - protein, 8 aa, Severe acute respiratory syndrome-related coronavirus
  REGION 1..8: note = Table A: HLA-C*04:03H HLA-A*02:07H HLA-C*08:02H HLA-C*05:01H
  source 1..8: note = Severe acute respiratory syndrome coronavirus 2
LLDDFVEI

SEQ ID NO: 1325 - protein, 8 aa, Severe acute respiratory syndrome-related coronavirus
  REGION 1..8: note = Table A: HLA-A*03:02H HLA-A*11:01M HLA-A*11:02H HLA-B*37:01H
  source 1..8: note = Severe acute respiratory syndrome coronavirus 2
QDLSVVSK

SEQ ID NO: 1326 - protein, 8 aa, Severe acute respiratory syndrome-related coronavirus
  REGION 1..8: note = Table A: HLA-B*14:01H HLA-A*02:03H HLA-B*51:01H HLA-B*38:02H HLA-B*07:05H
  source 1..8: note = Severe acute respiratory syndrome coronavirus 2
DLSVVSKV

SEQ ID NO: 1327 - protein, 8 aa, Severe acute respiratory syndrome-related coronavirus
  REGION 1..8: note = Table A: HLA-B*52:01H
  source 1..8: note = Severe acute respiratory syndrome coronavirus 2
LSVVSKVV

SEQ ID NO: 1328 - protein, 8 aa, Severe acute respiratory syndrome-related coronavirus
  REGION 1..8: note = Table A: HLA-A*02:11H HLA-C*15:05M HLA-C*15:02H HLA-A*02:05H HLA-A*02:06H HLA-A*02:08H HLA-A*02:01H HLA-A*02:02H HLA-A*02:03H HLA-B*52:01H HLA-B*37:01H HLA-B*38:02H HLA-B*07:05H HLA-B*13:02H HLA-C*07:04H
  source 1..8: note = Severe acute respiratory syndrome coronavirus 2
VVSKVVKV

SEQ ID NO: 1329 - protein, 8 aa, Severe acute respiratory syndrome-related coronavirus
  REGION 1..8: note = Table A: HLA-B*46:01M HLA-A*30:02H HLA-C*12:02H HLA-B*38:02H HLA-B*15:01M HLA-B*15:02H
  source 1..8: note = Severe acute respiratory syndrome coronavirus 2
VVKVTIDY

SEQ ID NO: 1330 - protein, 8 aa, Severe acute respiratory syndrome-related coronavirus
  REGION 1..8: note = Table A: HLA-B*37:01H
  source 1..8: note = Severe acute respiratory syndrome coronavirus 2
IDYTEISF

SEQ ID NO: 1331 - protein, 8 aa, Severe acute respiratory syndrome-related coronavirus
  REGION 1..8: note = Table A: HLA-B*44:03H
  source 1..8: note = Severe acute respiratory syndrome coronavirus 2
TEISFMLW

SEQ ID NO: 1332 - protein, 8 aa, Severe acute respiratory syndrome-related coronavirus
  REGION 1..8: note = Table A: HLA-B*37:01H
  source 1..8: note = Severe acute respiratory syndrome coronavirus 2
KDGHVETF

SEQ ID NO: 1333 - protein, 8 aa, Severe acute respiratory syndrome-related coronavirus
  REGION 1..8: note = Table A: HLA-B*38:02H
  source 1..8: note = Severe acute respiratory syndrome coronavirus 2
DGHVETFY

SEQ ID NO: 1334 - protein, 8 aa, Severe acute respiratory syndrome-related coronavirus
  REGION 1..8: note = Table A: HLA-A*36:01H
  source 1..8: note = Severe acute respiratory syndrome coronavirus 2
HVETFYPK

SEQ ID NO: 1335 - protein, 8 aa, Severe acute respiratory syndrome-related coronavirus
  REGION 1..8: note = Table A: HLA-B*18:01H HLA-B*40:02M HLA-B*07:05H HLA-B*49:01H
  source 1..8: note = Severe acute respiratory syndrome coronavirus 2
VETFYPKL

SEQ ID NO: 1336 - protein, 8 aa, Severe acute respiratory syndrome-related coronavirus
  REGION 1..8: note = Table A: HLA-B*52:01M HLA-B*13:02M
  source 1..8: note = Severe acute respiratory syndrome coronavirus 2
SQAWQPGV

SEQ ID NO: 1337 - protein, 8 aa, Severe acute respiratory syndrome-related coronavirus
  REGION 1..8: note = Table A: HLA-C*14:02H HLA-C*14:03H
  source 1..8: note = Severe acute respiratory syndrome coronavirus 2
AWQPGVAM

SEQ ID NO: 1338 - protein, 8 aa, Severe acute respiratory syndrome-related coronavirus
  REGION 1..8: note = Table A: HLA-A*11:01H HLA-A*11:02H HLA-A*36:01H HLA-A*34:02H
  source 1..8: note = Severe acute respiratory syndrome coronavirus 2
VAMPNLYK

SEQ ID NO: 1339 - protein, 8 aa, Severe acute respiratory syndrome-related coronavirus
  REGION 1..8: note = Table A: HLA-C*14:02H HLA-A*24:02H HLA-B*39:01H
  source 1..8: note = Severe acute respiratory syndrome coronavirus 2
NYGDSATL

SEQ ID NO: 1340 - protein, 8 aa, Severe acute respiratory syndrome-related coronavirus
  REGION 1..8: note = Table A: HLA-A*11:01H
  source 1..8: note = Severe acute respiratory syndrome coronavirus 2
GDSATLPK

SEQ ID NO: 1341 - protein, 8 aa, Severe acute respiratory syndrome-related coronavirus
  REGION 1..8: note = Table A: HLA-B*46:01H HLA-A*30:02H HLA-B*38:02M HLA-B*15:01M HLA-B*15:02H HLA-B*07:05H
  source 1..8: note = Severe acute respiratory syndrome coronavirus 2
IMMNVAKY

SEQ ID NO: 1342 - protein, 8 aa, Severe acute respiratory syndrome-related coronavirus
  REGION 1..8: note = Table A: HLA-C*15:05H
  source 1..8: note = Severe acute respiratory syndrome coronavirus 2
NVAKYTQL

SEQ ID NO: 1343 - protein, 8 aa, Severe acute respiratory syndrome-related coronavirus
  REGION 1..8: note = Table A: HLA-C*14:02H HLA-C*14:03H
  source 1..8: note = Severe acute respiratory syndrome coronavirus 2
QYLNTLTL

SEQ ID NO: 1344 - protein, 8 aa, Severe acute respiratory syndrome-related coronavirus
  REGION 1..8: note = Table A: HLA-B*38:02H
  source 1..8: note = Severe acute respiratory syndrome coronavirus 2
TLAVPYNM

SEQ ID NO: 1345 - protein, 8 aa, Severe acute respiratory syndrome-related coronavirus
  REGION 1..8: note = Table A: HLA-C*15:05M HLA-B*55:01M HLA-B*51:01H HLA-B*52:01H HLA-C*08:01H HLA-B*54:01H HLA-B*07:04H HLA-B*07:05H
  source 1..8: note = Severe acute respiratory syndrome coronavirus 2
VPYNMRVI

SEQ ID NO: 1346 - protein, 8 aa, Severe acute respiratory syndrome-related coronavirus
  REGION 1..8: note = Table A: HLA-B*14:02H HLA-B*39:06H
  source 1..8: note = Severe acute respiratory syndrome coronavirus 2
MRVIHFGA

SEQ ID NO: 1347 - protein, 8 aa, Severe acute respiratory syndrome-related coronavirus
  REGION 1..8: note = Table A: HLA-C*15:05H HLA-C*01:02H HLA-B*51:01H
  source 1..8: note = Severe acute respiratory syndrome coronavirus 2
VAPGTAVL

SEQ ID NO: 1348 - protein, 8 aa, Severe acute respiratory syndrome-related coronavirus
  REGION 1..8: note = Table A: HLA-A*68:01H HLA-A*34:01H
  source 1..8: note = Severe acute respiratory syndrome coronavirus 2
APGTAVLR

SEQ ID NO: 1349 - protein, 8 aa, Severe acute respiratory syndrome-related coronavirus
  REGION 1..8: note = Table A: HLA-B*58:02H HLA-B*57:01H HLA-B*57:03H
  source 1..8: note = Severe acute respiratory syndrome coronavirus 2
GTAVLRQW

SEQ ID NO: 1350 - protein, 8 aa, Severe acute respiratory syndrome-related coronavirus
  REGION 1..8: note = Table A: HLA-C*15:05H HLA-B*51:01M
  source 1..8: note = Severe acute respiratory syndrome coronavirus 2
LPTGTLLV

SEQ ID NO: 1351 - protein, 8 aa, Severe acute respiratory syndrome-related coronavirus
  REGION 1..8: note = Table A: HLA-C*08:02H HLA-C*05:01H
  source 1..8: note = Severe acute respiratory syndrome coronavirus 2
VSDADSTL

SEQ ID NO: 1352 - protein, 8 aa, Severe acute respiratory syndrome-related coronavirus
  REGION 1..8: note = Table A: HLA-B*58:01M HLA-B*57:01H HLA-B*53:01M HLA-B*15:13H HLA-B*57:03H
  source 1..8: note = Severe acute respiratory syndrome coronavirus 2
TVHTANKW

SEQ ID NO: 1353 - protein, 8 aa, Severe acute respiratory syndrome-related coronavirus
  REGION 1..8: note = Table A: HLA-B*35:01H HLA-B*38:02H HLA-B*15:02M
  source 1..8: note = Severe acute respiratory syndrome coronavirus 2
DLIISDMY

SEQ ID NO: 1354 - protein, 8 aa, Severe acute respiratory syndrome-related coronavirus
  REGION 1..8: note = Table A: HLA-A*36:01H
  source 1..8: note = Severe acute respiratory syndrome coronavirus 2
ISDMYDPK

SEQ ID NO: 1355 - protein, 8 aa, Severe acute respiratory syndrome-related coronavirus
  REGION 1..8: note = Table A: HLA-A*33:01H HLA-A*33:03H HLA-A*34:02H
  source 1..8: note = Severe acute respiratory syndrome coronavirus 2
DMYDPKTK

SEQ ID NO: 1356 - protein, 8 aa, Severe acute respiratory syndrome-related coronavirus
  REGION 1..8: note = Table A: HLA-A*02:11H HLA-B*37:01H
  source 1..8: note = Severe acute respiratory syndrome coronavirus 2
YDPKTKNV

SEQ ID NO: 1357 - protein, 8 aa, Severe acute respiratory syndrome-related coronavirus
  REGION 1..8: note = Table A: HLA-B*08:01H
  source 1..8: note = Severe acute respiratory syndrome coronavirus 2
DPKTKNVT

SEQ ID NO: 1358 - protein, 8 aa, Severe acute respiratory syndrome-related coronavirus
  REGION 1..8: note = Table A: HLA-B*49:01M
  source 1..8: note = Severe acute respiratory syndrome coronavirus 2
KEGFFTYI

SEQ ID NO: 1359 - protein, 8 aa, Severe acute respiratory syndrome-related coronavirus
  REGION 1..8: note = Table A: HLA-B*08:01M
  source 1..8: note = Severe acute respiratory syndrome coronavirus 2
FIQQKLAL

SEQ ID NO: 1360 - protein, 8 aa, Severe acute respiratory syndrome-related coronavirus
  REGION 1..8: note = Table A: HLA-B*38:02H
  source 1..8: note = Severe acute respiratory syndrome coronavirus 2
ALGGSVAI

SEQ ID NO: 1361 - protein, 8 aa, Severe acute respiratory syndrome-related coronavirus
  REGION 1..8: note = Table A: HLA-A*11:303H HLA-B*46:01M HLA-C*03:02H HLA-C*12:02H HLA-B*15:01H
  source 1..8: note = Severe acute respiratory syndrome coronavirus 2
VAIKITEH

SEQ ID NO: 1362 - protein, 8 aa, Severe acute respiratory syndrome-related coronavirus
  REGION 1..8: note = Table A: HLA-B*39:01H
  source 1..8: note = Severe acute respiratory syndrome coronavirus 2
EHSWNADL

SEQ ID NO: 1363 - protein, 8 aa, Severe acute respiratory syndrome-related coronavirus
  REGION 1..8: note = Table A: HLA-B*58:01H HLA-A*36:01H HLA-B*35:07H
  source 1..8: note = Severe acute respiratory syndrome coronavirus 2
HSWNADLY

SEQ ID NO: 1364 - protein, 8 aa, Severe acute respiratory syndrome-related coronavirus
  REGION 1..8: note = Table A: HLA-C*04:03H
  source 1..8: note = Severe acute respiratory syndrome coronavirus 2
NADLYKLM

SEQ ID NO: 1365 - protein, 8 aa, Severe acute respiratory syndrome-related coronavirus
  REGION 1..8: note = Table A: HLA-A*32:01H
  source 1..8: note = Severe acute respiratory syndrome coronavirus 2
KLMGHFAW

SEQ ID NO: 1366 - protein, 8 aa, Severe acute respiratory syndrome-related coronavirus
  REGION 1..8: note = Table A: HLA-B*39:06H
  source 1..8: note = Severe acute respiratory syndrome coronavirus 2
GHFAWWTA

SEQ ID NO: 1367 - protein, 8 aa, Severe acute respiratory syndrome-related coronavirus
  REGION 1..8: note = Table A: HLA-B*35:01H
  source 1..8: note = Severe acute respiratory syndrome coronavirus 2
NASSSEAF

SEQ ID NO: 1368 - protein, 8 aa, Severe acute respiratory syndrome-related coronavirus
  REGION 1..8: note = Table A: HLA-B*58:01H
  source 1..8: note = Severe acute respiratory syndrome coronavirus 2
SSSEAFLI

SEQ ID NO: 1369 - protein, 8 aa, Severe acute respiratory syndrome-related coronavirus
  REGION 1..8: note = Table A: HLA-B*45:01H HLA-B*50:01H
  source 1..8: note = Severe acute respiratory syndrome coronavirus 2
SEAFLIGC

SEQ ID NO: 1370 - protein, 8 aa, Severe acute respiratory syndrome-related coronavirus
  REGION 1..8: note = Table A: HLA-C*14:02H HLA-C*14:03M
  source 1..8: note = Severe acute respiratory syndrome coronavirus 2
AFLIGCNY

SEQ ID NO: 1371 - protein, 8 aa, Severe acute respiratory syndrome-related coronavirus
  REGION 1..8: note = Table A: HLA-B*38:02H HLA-B*15:02H HLA-B*39:01H
  source 1..8: note = Severe acute respiratory syndrome coronavirus 2
EQIDGYVM

SEQ ID NO: 1372 - protein, 8 aa, Severe acute respiratory syndrome-related coronavirus
  REGION 1..8: note = Table A: HLA-B*38:02H
  source 1..8: note = Severe acute respiratory syndrome coronavirus 2
MHANYIFW

SEQ ID NO: 1373 - protein, 8 aa, Severe acute respiratory syndrome-related coronavirus
  REGION 1..8: note = Table A: HLA-A*33:01H HLA-A*33:03H
  source 1..8: note = Severe acute respiratory syndrome coronavirus 2
HANYIFWR

SEQ ID NO: 1374 - protein, 8 aa, Severe acute respiratory syndrome-related coronavirus
  REGION 1..8: note = Table A: HLA-C*15:05H HLA-C*15:02H
  source 1..8: note = Severe acute respiratory syndrome coronavirus 2
RNTNPIQL

SEQ ID NO: 1375 - protein, 8 aa, Severe acute respiratory syndrome-related coronavirus
  REGION 1..8: note = Table A: HLA-B*18:01H HLA-C*15:05H HLA-B*35:01M HLA-B*35:08H HLA-B*35:07H HLA-B*38:02H HLA-B*15:02M HLA-B*07:05M HLA-B*15:11M
  source 1..8: note = Severe acute respiratory syndrome coronavirus 2
NPIQLSSY

SEQ ID NO: 1376 - protein, 8 aa, Severe acute respiratory syndrome-related coronavirus
  REGION 1..8: note = Table A: HLA-C*15:05H
  source 1..8: note = Severe acute respiratory syndrome coronavirus 2
SSYSLFDM

SEQ ID NO: 1377 - protein, 8 aa, Severe acute respiratory syndrome-related coronavirus
  REGION 1..8: note = Table A: HLA-A*34:02H
  source 1..8: note = Severe acute respiratory syndrome coronavirus 2
DMSKFPLK

SEQ ID NO: 1378 - protein, 8 aa, Severe acute respiratory syndrome-related coronavirus
  REGION 1..8: note = Table A: HLA-B*58:02M HLA-C*16:01H HLA-B*57:01H HLA-B*08:01H HLA-C*07:01H HLA-C*15:05H HLA-C*15:02H HLA-C*17:01H HLA-C*08:03H HLA-B*07:04H HLA-B*57:03H
  source 1..8: note = Severe acute respiratory syndrome coronavirus 2
MSKFPLKL

SEQ ID NO: 1379 - protein, 8 aa, Severe acute respiratory syndrome-related coronavirus
  REGION 1..8: note = Table A: HLA-C*15:05H
  source 1..8: note = Severe acute respiratory syndrome coronavirus 2
RGTAVMSL

SEQ ID NO: 1380 - protein, 8 aa, Severe acute respiratory syndrome-related coronavirus
  REGION 1..8: note = Table A: HLA-A*03:01H HLA-A*03:02H HLA-A*11:01H HLA-A*11:02H
  source 1..8: note = Severe acute respiratory syndrome coronavirus 2
GTAVMSLK

SEQ ID NO: 1381 - protein, 8 aa, Severe acute respiratory syndrome-related coronavirus
  REGION 1..8: note = Table A: HLA-A*11:02H HLA-A*34:02H
  source 1..8: note = Severe acute respiratory syndrome coronavirus 2
MILSLLSK

SEQ ID NO: 1382 - protein, 8 aa, Severe acute respiratory syndrome-related coronavirus
  REGION 1..8: note = Table A: HLA-B*58:02H
  source 1..8: note = Severe acute respiratory syndrome coronavirus 2
LLSKGRLI

SEQ ID NO: 1383 - protein, 8 aa, Severe acute respiratory syndrome-related coronavirus
  REGION 1..8: note = Table A: HLA-B*41:02H
  source 1..8: note = Severe acute respiratory syndrome coronavirus 2
RENNRVVI

SEQ ID NO: 1384 - protein, 8 aa, Severe acute respiratory syndrome-related coronavirus
  REGION 1..8: note = Table A: HLA-B*35:02H HLA-C*08:01H HLA-B*35:12H HLA-B*38:02H HLA-B*39:01H
  source 1..8: note = Severe acute respiratory syndrome coronavirus 2
VVISSDVL

SEQ ID NO: 1385 - protein, 9 aa, Severe acute respiratory syndrome-related coronavirus
  REGION 1..9: note = Table A: HLA-A*11:303H HLA-A*03:02H HLA-A*11:01H HLA-A*11:02H HLA-A*34:02H
  source 1..9: note = Severe acute respiratory syndrome coronavirus 2
SLVPGFNEK

SEQ ID NO: 1386 - protein, 9 aa, Severe acute respiratory syndrome-related coronavirus
  REGION 1..9: note = Table A: HLA-C*04:03H
  source 1..9: note = Severe acute respiratory syndrome coronavirus 2
FNEKTHVQL

SEQ ID NO: 1387 - protein, 9 aa, Severe acute respiratory syndrome-related coronavirus
  REGION 1..9: note = Table A: HLA-B*38:02H HLA-B*15:10H
  source 1..9: note = Severe acute respiratory syndrome coronavirus 2
THVQLSLPV

SEQ ID NO: 1388 - protein, 9 aa, Severe acute respiratory syndrome-related coronavirus
  REGION 1..9: note = Table A: HLA-B*35:03H HLA-C*15:05H HLA-A*02:04H HLA-B*38:02H HLA-B*15:02H
  source 1..9: note = Severe acute respiratory syndrome coronavirus 2
HVQLSLPVL

SEQ ID NO: 1389 - protein, 9 aa, Severe acute respiratory syndrome-related coronavirus
  REGION 1..9: note = Table A: HLA-A*02:04H HLA-A*02:03H HLA-B*38:02M HLA-B*13:02M
  source 1..9: note = Severe acute respiratory syndrome coronavirus 2
QLSLPVLQV

SEQ ID NO: 1390 - protein, 9 aa, Severe acute respiratory syndrome-related coronavirus
  REGION 1..9: note = Table A: HLA-A*74:01H HLA-A*31:01H
  source 1..9: note = Severe acute respiratory syndrome coronavirus 2
LSLPVLQVR

SEQ ID NO: 1391 - protein, 9 aa, Severe acute respiratory syndrome-related coronavirus
  REGION 1..9: note = Table A: HLA-B*56:01H HLA-B*55:02H HLA-C*15:05H HLA-B*51:01H HLA-B*54:01M
  source 1..9: note = Severe acute respiratory syndrome coronavirus 2
LPVLQVRDV

SEQ ID NO: 1392 - protein, 9 aa, Severe acute respiratory syndrome-related coronavirus
  REGION 1..9: note = Table A: HLA-B*27:05H
  source 1..9: note = Severe acute respiratory syndrome coronavirus 2
VRDVLVRGF

SEQ ID NO: 1393 - protein, 9 aa, Severe acute respiratory syndrome-related coronavirus
  REGION 1..9: note = Table A: HLA-B*38:02H
  source 1..9: note = Severe acute respiratory syndrome coronavirus 2
LVRGFGDSV

SEQ ID NO: 1394 - protein, 9 aa, Severe acute respiratory syndrome-related coronavirus
  REGION 1..9: note = Table A: HLA-C*04:03M HLA-B*35:03M HLA-A*02:07H HLA-B*35:02M HLA-B*35:08H HLA-C*08:01M HLA-C*08:02M HLA-B*35:12M HLA-B*38:02H HLA-B*39:01H HLA-C*05:01H
  source 1..9: note = Severe acute respiratory syndrome coronavirus 2
FGDSVEEVL

SEQ ID NO: 1395 - protein, 9 aa, Severe acute respiratory syndrome-related coronavirus
  REGION 1..9: note = Table A: HLA-A*02:05H
  source 1..9: note = Severe acute respiratory syndrome coronavirus 2
SVEEVLSEA

SEQ ID NO: 1396 - protein, 9 aa, Severe acute respiratory syndrome-related coronavirus
  REGION 1..9: note = Table A: HLA-A*34:02H
  source 1..9: note = Severe acute respiratory syndrome coronavirus 2
EVLSEARQH

SEQ ID NO: 1397 - protein, 9 aa, Severe acute respiratory syndrome-related coronavirus
  REGION 1..9: note = Table A: HLA-A*02:11M HLA-A*02:04H HLA-A*02:05H HLA-B*14:01H HLA-A*02:01H HLA-A*02:02H HLA-A*02:03M HLA-B*38:02M HLA-B*13:01H HLA-B*13:02H
  source 1..9: note = Severe acute respiratory syndrome coronavirus 2
VLSEARQHL

SEQ ID NO: 1398 - protein, 9 aa, Severe acute respiratory syndrome-related coronavirus
  REGION 1..9: note = Table A: HLA-A*26:03H HLA-B*08:01H HLA-A*02:02M HLA-A*02:03M HLA-B*38:02M
  source 1..9: note = Severe acute respiratory syndrome coronavirus 2
HLKDGTCGL

SEQ ID NO: 1399 - protein, 9 aa, Severe acute respiratory syndrome-related coronavirus
  REGION 1..9: note = Table A: HLA-A*02:02H HLA-B*13:02H
  source 1..9: note = Severe acute respiratory syndrome coronavirus 2
GLVEVEKGV

SEQ ID NO: 1400 - protein, 9 aa, Severe acute respiratory syndrome-related coronavirus
  REGION 1..9: note = Table A: HLA-B*45:01M HLA-B*40:02H HLA-B*40:06H HLA-B*41:02H HLA-B*49:01H HLA-B*50:01H
  source 1..9: note = Severe acute respiratory syndrome coronavirus 2
VEVEKGVLP

SEQ ID NO: 1401 - protein, 9 aa, Severe acute respiratory syndrome-related coronavirus
  REGION 1..9: note = Table A: HLA-B*44:05H HLA-B*45:01H HLA-B*40:01H HLA-B*40:02M HLA-B*40:06H HLA-B*41:02H HLA-B*49:01H HLA-B*50:01H
  source 1..9: note = Severe acute respiratory syndrome coronavirus 2
VEKGVLPQL

SEQ ID NO: 1402 - protein, 9 aa, Severe acute respiratory syndrome-related coronavirus
  REGION 1..9: note = Table A: HLA-B*56:01H HLA-B*55:02H HLA-C*15:05H HLA-B*51:01M HLA-B*54:01H
  source 1..9: note = Severe acute respiratory syndrome coronavirus 2
LPQLEQPYV

SEQ ID NO: 1403 - protein, 9 aa, Severe acute respiratory syndrome-related coronavirus
  REGION 1..9: note = Table A: HLA-A*24:02H HLA-A*24:07M HLA-A*23:01H
  source 1..9: note = Severe acute respiratory syndrome coronavirus 2
PQLEQPYVF

SEQ ID NO: 1404 - protein, 9 aa, Severe acute respiratory syndrome-related coronavirus
  REGION 1..9: note = Table A: HLA-A*33:01H HLA-A*33:03M HLA-A*26:03H HLA-A*68:01M HLA-A*34:01M HLA-A*34:02H HLA-A*66:01M
  source 1..9: note = Severe acute respiratory syndrome coronavirus 2
EQPYVFIKR

SEQ ID NO: 1405 - protein, 9 aa, Severe acute respiratory syndrome-related coronavirus
  REGION 1..9: note = Table A: HLA-B*58:01H HLA-B*58:02M HLA-C*16:01H HLA-C*03:04H HLA-A*30:02H HLA-C*15:05H HLA-C*15:02M HLA-A*02:08H HLA-A*02:02H HLA-B*07:04M HLA-B*15:01H HLA-B*57:03H HLA-C*07:04M
  source 1..9: note = Severe acute respiratory syndrome coronavirus 2
RTAPHGHVM

SEQ ID NO: 1406 - protein, 9 aa, Severe acute respiratory syndrome-related coronavirus
  REGION 1..9: note = Table A: HLA-B*51:01H
  source 1..9: note = Severe acute respiratory syndrome coronavirus 2
TAPHGHVMV

SEQ ID NO: 1407 - protein, 9 aa, Severe acute respiratory syndrome-related coronavirus
  REGION 1..9: note = Table A: HLA-B*38:02H
  source 1..9: note = Severe acute respiratory syndrome coronavirus 2
PHGHVMVEL

SEQ ID NO: 1408 - protein, 9 aa, Severe acute respiratory syndrome-related coronavirus
  REGION 1..9: note = Table A: HLA-B*39:06H
  source 1..9: note = Severe acute respiratory syndrome coronavirus 2
GHVMVELVA

SEQ ID NO: 1409 - protein, 9 aa, Severe acute respiratory syndrome-related coronavirus
  REGION 1..9: note = Table A: HLA-B*48:01H HLA-C*14:03H HLA-A*11:303M HLA-B*46:01H HLA-A*02:11H HLA-A*68:02H HLA-C*15:05H HLA-A*02:04M HLA-A*02:05M HLA-A*02:06M HLA-A*02:07M HLA-B*14:01M HLA-A*02:01H HLA-A*02:02H HLA-A*02:03M
  REGION 1..9: note = CONT. FROM ABOVE: HLA-A*24:02H HLA-C*08:01H HLA-B*38:02M HLA- B*15:01H HLA-B*39:01H HLA-B*07:05H
  source 1..9: note = Severe acute respiratory syndrome coronavirus 2
VMVELVAEL

SEQ ID NO: 1410 - protein, 9 aa, Severe acute respiratory syndrome-related coronavirus
  REGION 1..9: note = Table A: HLA-A*68:02H HLA-B*38:02H
  source 1..9: note = Severe acute respiratory syndrome coronavirus 2
ELVAELEGI

SEQ ID NO: 1411 - protein, 9 aa, Severe acute respiratory syndrome-related coronavirus
  REGION 1..9: note = Table A: HLA-A*36:01H HLA-A*01:01M HLA-B*35:01H HLA-B*35:08M HLA-B*38:02H HLA-B*15:01H HLA-B*39:01H
  source 1..9: note = Severe acute respiratory syndrome coronavirus 2
VAELEGIQY

SEQ ID NO: 1412 - protein, 9 aa, Severe acute respiratory syndrome-related coronavirus
  REGION 1..9: note = Table A: HLA-B*45:01M HLA-B*49:01H
  source 1..9: note = Severe acute respiratory syndrome coronavirus 2
AELEGIQYG

SEQ ID NO: 1413 - protein, 9 aa, Severe acute respiratory syndrome-related coronavirus
  REGION 1..9: note = Table A: HLA-A*33:01M HLA-A*33:03M HLA-A*26:03H HLA-A*68:01M HLA-A*34:01M HLA-A*66:01H
  source 1..9: note = Severe acute respiratory syndrome coronavirus 2
ELEGIQYGR

SEQ ID NO: 1414 - protein, 9 aa, Severe acute respiratory syndrome-related coronavirus
  REGION 1..9: note = Table A: HLA-B*45:01M HLA-B*40:06M HLA-B*50:01M
  source 1..9: note = Severe acute respiratory syndrome coronavirus 2
GETLGVLVP

SEQ ID NO: 1415 - protein, 9 aa, Severe acute respiratory syndrome-related coronavirus
  REGION 1..9: note = Table A: HLA-A*33:01H HLA-A*33:03M HLA-A*34:01H HLA-A*34:02H HLA-A*66:01H
  source 1..9: note = Severe acute respiratory syndrome coronavirus 2
ETLGVLVPH

SEQ ID NO: 1416 - protein, 9 aa, Severe acute respiratory syndrome-related coronavirus
  REGION 1..9: note = Table A: HLA-A*02:11M HLA-A*02:04M HLA-A*02:06H HLA-A*02:07H HLA-A*02:01M HLA-A*02:02M HLA-A*02:03M
  source 1..9: note = Severe acute respiratory syndrome coronavirus 2
TLGVLVPHV

SEQ ID NO: 1417 - protein, 9 aa, Severe acute respiratory syndrome-related coronavirus
  REGION 1..9: note = Table A: HLA-A*11:303H HLA-A*02:11H HLA-C*15:05H HLA-A*02:04H HLA-A*02:05H HLA-A*02:06H HLA-A*02:01H HLA-A*02:02M HLA-A*02:03M HLA-B*38:02M HLA-B*13:02H
  source 1..9: note = Severe acute respiratory syndrome coronavirus 2
VLVPHVGEI

SEQ ID NO: 1418 - protein, 9 aa, Severe acute respiratory syndrome-related coronavirus
  REGION 1..9: note = Table A: HLA-B*56:01M HLA-B*55:02M HLA-B*35:03H HLA-C*15:05H HLA-B*55:01H HLA-B*35:02M HLA-B*35:08H HLA-B*51:01H HLA-B*35:07H HLA-C*08:01H HLA-B*35:12H HLA-B*54:01H
  source 1..9: note = Severe acute respiratory syndrome coronavirus 2
VPHVGEIPV

SEQ ID NO: 1419 - protein, 9 aa, Severe acute respiratory syndrome-related coronavirus
  REGION 1..9: note = Table A: HLA-B*39:06H
  source 1..9: note = Severe acute respiratory syndrome coronavirus 2
PHVGEIPVA

SEQ ID NO: 1420 - protein, 9 aa, Severe acute respiratory syndrome-related coronavirus
  REGION 1..9: note = Table A: HLA-C*16:04H HLA-A*25:01H HLA-B*46:01H HLA-A*26:01M HLA-A*26:02M HLA-A*26:03H HLA-A*29:01M HLA-A*29:02M HLA-B*18:01M HLA-B*53:01H HLA-A*30:02M HLA-A*68:01H HLA-A*68:02H HLA-B*35:03H HLA-C*15:05H HLA-C*12:02H
  REGION 1..9: note = CONT. FROM ABOVE: HLA-A*34:01H HLA-A*34:02H HLA-B*35:01H HLA- B*35:02H HLA-B*35:08M HLA-B*35:07H HLA-B*35:12H HLA-B*38:02H HLA-B*15:01M HLA-B*15:02H HLA-B*39:01H HLA-B*07:05M HLA-B*57 :03H HLA-B*15:11H
  source 1..9: note = Severe acute respiratory syndrome coronavirus 2
HVGEIPVAY

SEQ ID NO: 1421 - protein, 9 aa, Severe acute respiratory syndrome-related coronavirus
  REGION 1..9: note = Table A: HLA-A*36:01H HLA-A*33:01H HLA-A*33:03H HLA-A*68:01H HLA-A*31:01H
  source 1..9: note = Severe acute respiratory syndrome coronavirus 2
VGEIPVAYR

SEQ ID NO: 1422 - protein, 9 aa, Severe acute respiratory syndrome-related coronavirus
  REGION 1..9: note = Table A: HLA-B*42:01H HLA-B*07:02H HLA-B*07:04H
  source 1..9: note = Severe acute respiratory syndrome coronavirus 2
IPVAYRKVL

SEQ ID NO: 1423 - protein, 9 aa, Severe acute respiratory syndrome-related coronavirus
  REGION 1..9: note = Table A: HLA-A*74:01M HLA-A*34:02H
  source 1..9: note = Severe acute respiratory syndrome coronavirus 2
VAYRKVLLR

SEQ ID NO: 1424 - protein, 9 aa, Severe acute respiratory syndrome-related coronavirus
  REGION 1..9: note = Table A: HLA-B*15:03H
  source 1..9: note = Severe acute respiratory syndrome coronavirus 2
NKGAGGHSY

SEQ ID NO: 1425 - protein, 9 aa, Severe acute respiratory syndrome-related coronavirus
  REGION 1..9: note = Table A: HLA-C*14:02H HLA-C*14:03H HLA-A*24:02H
  source 1..9: note = Severe acute respiratory syndrome coronavirus 2
SYGADLKSF

SEQ ID NO: 1426 - protein, 9 aa, Severe acute respiratory syndrome-related coronavirus
  REGION 1..9: note = Table A: HLA-C*04:03H HLA-B*35:02H HLA-C*08:01H HLA-C*08:02H HLA-C*05:01H
  source 1..9: note = Severe acute respiratory syndrome coronavirus 2
GADLKSFDL

SEQ ID NO: 1427 - protein, 9 aa, Severe acute respiratory syndrome-related coronavirus
  REGION 1..9: note = Table A: HLA-B*48:01H HLA-B*58:01H HLA-B*58:02H HLA-A*11:303H HLA-A*02:11H HLA-C*15:05H HLA-C*15:02H HLA-A*02:05H HLA-A*02:08M HLA-A*02:02H HLA-C*08:01M HLA-C*08:03H HLA-B*38:02H HLA-B*40:01H HLA-B*39:01H
  REGION 1..9: note = CONT. FROM ABOVE: HLA-B*57:03H HLA-B*13:01H
  source 1..9: note = Severe acute respiratory syndrome coronavirus 2
KSFDLGDEL

SEQ ID NO: 1428 - protein, 9 aa, Severe acute respiratory syndrome-related coronavirus
  REGION 1..9: note = Table A: HLA-A*24:02H HLA-A*24:07M HLA-A*23:01H
  source 1..9: note = Severe acute respiratory syndrome coronavirus 2
PYEDFQENW

SEQ ID NO: 1429 - protein, 9 aa, Severe acute respiratory syndrome-related coronavirus
  REGION 1..9: note = Table A: HLA-A*33:01H HLA-A*33:03H
  source 1..9: note = Severe acute respiratory syndrome coronavirus 2
DFQENWNTK

SEQ ID NO: 1430 - protein, 9 aa, Severe acute respiratory syndrome-related coronavirus
  REGION 1..9: note = Table A: HLA-B*45:01H
  source 1..9: note = Severe acute respiratory syndrome coronavirus 2
QENWNTKHS

SEQ ID NO: 1431 - protein, 9 aa, Severe acute respiratory syndrome-related coronavirus
  REGION 1..9: note = Table A: HLA-B*58:01H HLA-B*58:02H HLA-A*11:303H HLA-C*16:01M HLA-C*16:04M HLA-B*57:01H HLA-C*06:02H HLA-C*03:03M HLA-C*07:01H HLA-B*53:01H HLA-C*03:02H HLA-C*03:04M HLA-A*68:01H HLA-A*68:02M HLA-B*35:03M
  REGION 1..9: note = CONT. FROM ABOVE: HLA-C*15:05M HLA-C*01:02H HLA-C*12:02H HLA- C*12:03H HLA-C*15:02M HLA-A*02:05H HLA-A*02:02M HLA-A*02:03H HLA-A*34:01H HLA-A*34:02H HLA-C*07:27H HLA-B*35:01H HLA-C*08 :01H HLA-B*38:02M HLA-B*07:02H HLA-B*07:04M HLA-B*07:05H
  REGION 1..9: note = CONT. FROM ABOVE: HLA-B*57:03M HLA-C*02:02H HLA-B*13:02H HLA- B*15:10H HLA-C*07:04M HLA-A*66:01H
  source 1..9: note = Severe acute respiratory syndrome coronavirus 2
HSSGVTREL

SEQ ID NO: 1432 - protein, 9 aa, Severe acute respiratory syndrome-related coronavirus
  REGION 1..9: note = Table A: HLA-C*15:05H HLA-B*57:03H
  source 1..9: note = Severe acute respiratory syndrome coronavirus 2
SSGVTRELM

SEQ ID NO: 1433 - protein, 9 aa, Severe acute respiratory syndrome-related coronavirus
  REGION 1..9: note = Table A: HLA-B*58:02H HLA-C*16:01H HLA-A*30:01H HLA-C*15:02H HLA-B*07:04H HLA-B*57:03H
  source 1..9: note = Severe acute respiratory syndrome coronavirus 2
VTRELMREL

SEQ ID NO: 1434 - protein, 9 aa, Severe acute respiratory syndrome-related coronavirus
  REGION 1..9: note = Table A: HLA-B*38:02H HLA-B*39:01M
  source 1..9: note = Severe acute respiratory syndrome coronavirus 2
MRELNGGAY

SEQ ID NO: 1435 - protein, 9 aa, Severe acute respiratory syndrome-related coronavirus
  REGION 1..9: note = Table A: HLA-A*74:01M HLA-A*33:01H HLA-A*33:03H HLA-A*26:03H HLA-A*68:01H HLA-A*34:01H HLA-A*34:02M HLA-A*66:01M
  source 1..9: note = Severe acute respiratory syndrome coronavirus 2
ELNGGAYTR

SEQ ID NO: 1436 - protein, 9 aa, Severe acute respiratory syndrome-related coronavirus
  REGION 1..9: note = Table A: HLA-B*58:01H HLA-B*58:02H HLA-B*57:01M HLA-B*46:01H HLA-C*03:02H HLA-C*12:02H HLA-B*38:02H HLA-B*15:01H HLA-B*15:02H HLA-B*57:03H HLA-C*02:02H
  source 1..9: note = Severe acute respiratory syndrome coronavirus 2
YTRYVDNNF

SEQ ID NO: 1437 - protein, 9 aa, Severe acute respiratory syndrome-related coronavirus
  REGION 1..9: note = Table A: HLA-B*38:02H
  source 1..9: note = Severe acute respiratory syndrome coronavirus 2
TRYVDNNFC

SEQ ID NO: 1438 - protein, 9 aa, Severe acute respiratory syndrome-related coronavirus
  REGION 1..9: note = Table A: HLA-B*35:03H
  source 1..9: note = Severe acute respiratory syndrome coronavirus 2
FCGPDGYPL

SEQ ID NO: 1439 - protein, 9 aa, Severe acute respiratory syndrome-related coronavirus
  REGION 1..9: note = Table A: HLA-C*15:05M
  source 1..9: note = Severe acute respiratory syndrome coronavirus 2
GPDGYPLEC

SEQ ID NO: 1440 - protein, 9 aa, Severe acute respiratory syndrome-related coronavirus
  REGION 1..9: note = Table A: HLA-B*07:04H
  source 1..9: note = Severe acute respiratory syndrome coronavirus 2
YPLECIKDL

SEQ ID NO: 1441 - protein, 9 aa, Severe acute respiratory syndrome-related coronavirus
  REGION 1..9: note = Table A: HLA-A*33:01H HLA-A*33:03M HLA-A*26:03M HLA-A*68:01H HLA-A*34:01H HLA-A*34:02M HLA-A*66:01H
  source 1..9: note = Severe acute respiratory syndrome coronavirus 2
ECIKDLLAR

SEQ ID NO: 1442 - protein, 9 aa, Severe acute respiratory syndrome-related coronavirus
  REGION 1..9: note = Table A: HLA-A*02:03H
  source 1..9: note = Severe acute respiratory syndrome coronavirus 2
CIKDLLARA

SEQ ID NO: 1443 - protein, 9 aa, Severe acute respiratory syndrome-related coronavirus
  REGION 1..9: note = Table A: HLA-C*15:05H
  source 1..9: note = Severe acute respiratory syndrome coronavirus 2
RAGKASCTL

SEQ ID NO: 1444 - protein, 9 aa, Severe acute respiratory syndrome-related coronavirus
  REGION 1..9: note = Table A: HLA-A*02:04H HLA-A*02:05H HLA-A*02:01H HLA-A*02:02M HLA-B*38:02H
  source 1..9: note = Severe acute respiratory syndrome coronavirus 2
TLSEQLDFI

SEQ ID NO: 1445 - protein, 9 aa, Severe acute respiratory syndrome-related coronavirus
  REGION 1..9: note = Table A: HLA-B*45:01H
  source 1..9: note = Severe acute respiratory syndrome coronavirus 2
SEQLDFIDT

SEQ ID NO: 1446 - protein, 9 aa, Severe acute respiratory syndrome-related coronavirus
  REGION 1..9: note = Table A: HLA-B*27:02H HLA-A*68:02H HLA-A*34:02H HLA-B*39:01H
  source 1..9: note = Severe acute respiratory syndrome coronavirus 2
EQLDFIDTK

SEQ ID NO: 1447 - protein, 9 aa, Severe acute respiratory syndrome-related coronavirus
  REGION 1..9: note = Table A: HLA-A*34:01H
  source 1..9: note = Severe acute respiratory syndrome coronavirus 2
QLDFIDTKR

SEQ ID NO: 1448 - protein, 9 aa, Severe acute respiratory syndrome-related coronavirus
  REGION 1..9: note = Table A: HLA-A*36:01M HLA-A*01:01H HLA-B*38:02H HLA-B*15:02H
  source 1..9: note = Severe acute respiratory syndrome coronavirus 2
FIDTKRGVY

SEQ ID NO: 1449 - protein, 9 aa, Severe acute respiratory syndrome-related coronavirus
  REGION 1..9: note = Table A: HLA-B*37:01H
  source 1..9: note = Severe acute respiratory syndrome coronavirus 2
IDTKRGVYC

SEQ ID NO: 1450 - protein, 9 aa, Severe acute respiratory syndrome-related coronavirus
  REGION 1..9: note = Table A: HLA-B*58:01H HLA-B*44:02H HLA-B*44:05H HLA-B*45:01H HLA-B*44:03M HLA-B*37:01H HLA-A*32:01H HLA-B*40:01H HLA-B*40:02H HLA-B*40:06H HLA-B*41:02H HLA-B*57:03H HLA-B*13:01M
  source 1..9: note = Severe acute respiratory syndrome coronavirus 2
REHEHEIAW

SEQ ID NO: 1451 - protein, 9 aa, Severe acute respiratory syndrome-related coronavirus
  REGION 1..9: note = Table A: HLA-B*38:02H HLA-B*39:01M
  source 1..9: note = Severe acute respiratory syndrome coronavirus 2
EHEHEIAWY

SEQ ID NO: 1452 - protein, 9 aa, Severe acute respiratory syndrome-related coronavirus
  REGION 1..9: note = Table A: HLA-B*45:01H HLA-B*40:06M
  source 1..9: note = Severe acute respiratory syndrome coronavirus 2
HEHEIAWYT

SEQ ID NO: 1453 - protein, 9 aa, Severe acute respiratory syndrome-related coronavirus
  REGION 1..9: note = Table A: HLA-A*74:01H HLA-A*34:01H HLA-A*66:01H
  source 1..9: note = Severe acute respiratory syndrome coronavirus 2
HEIAWYTER

SEQ ID NO: 1454 - protein, 9 aa, Severe acute respiratory syndrome-related coronavirus
  REGION 1..9: note = Table A: HLA-B*58:01H HLA-A*36:01H HLA-A*01:01M
  source 1..9: note = Severe acute respiratory syndrome coronavirus 2
YTERSEKSY

SEQ ID NO: 1455 - protein, 9 aa, Severe acute respiratory syndrome-related coronavirus
  REGION 1..9: note = Table A: HLA-B*14:02H HLA-B*14:01H HLA-B*38:01H HLA-B*38:02M HLA-B*39:01M
  source 1..9: note = Severe acute respiratory syndrome coronavirus 2
ERSEKSYEL

SEQ ID NO: 1456 - protein, 9 aa, Severe acute respiratory syndrome-related coronavirus
  REGION 1..9: note = Table A: HLA-B*45:01H HLA-B*40:02H HLA-B*41:02H
  source 1..9: note = Severe acute respiratory syndrome coronavirus 2
SEKSYELQT

SEQ ID NO: 1457 - protein, 9 aa, Severe acute respiratory syndrome-related coronavirus
  REGION 1..9: note = Table A: HLA-B*58:01M HLA-B*58:02H HLA-B*57:01H HLA-C*15:05H HLA-C*12:02H HLA-B*15:01H HLA-B*15:03H HLA-B*57:03H
  source 1..9: note = Severe acute respiratory syndrome coronavirus 2
KSYELQTPF

SEQ ID NO: 1458 - protein, 9 aa, Severe acute respiratory syndrome-related coronavirus
  REGION 1..9: note = Table A: HLA-B*44:05H HLA-B*18:01H HLA-B*38:02H HLA-B*40:01H HLA-B*40:02H HLA-B*40:06H HLA-B*41:02H HLA-B*13:02H HLA-B*49:01H
  source 1..9: note = Severe acute respiratory syndrome coronavirus 2
YELQTPFEI

SEQ ID NO: 1459 - protein, 9 aa, Severe acute respiratory syndrome-related coronavirus
  REGION 1..9: note = Table A: HLA-A*34:02M
  source 1..9: note = Severe acute respiratory syndrome coronavirus 2
ELQTPFEIK

SEQ ID NO: 1460 - protein, 9 aa, Severe acute respiratory syndrome-related coronavirus
  REGION 1..9: note = Table A: HLA-B*48:01H HLA-A*11:303H HLA-C*06:02H HLA-A*02:11H HLA-C*03:04H HLA-A*68:02H HLA-C*15:02H HLA-A*02:04M HLA-A*02:05M HLA-A*02:06H HLA-A*02:07H HLA-A*02:08H HLA-A*02:01H HLA-A*02:02H HLA-C*17:01M
  REGION 1..9: note = CONT. FROM ABOVE: HLA-C*08:01H HLA-B*38:01H HLA-B*38:02M HLA- B*40:06H HLA-B*57:03H HLA-B*13:01H HLA-B*13:02M HLA-C*07:04H
  source 1..9: note = Severe acute respiratory syndrome coronavirus 2
LQTPFEIKL

SEQ ID NO: 1461 - protein, 9 aa, Severe acute respiratory syndrome-related coronavirus
  REGION 1..9: note = Table A: HLA-A*68:02H HLA-A*02:05H
  source 1..9: note = Severe acute respiratory syndrome coronavirus 2
QTPFEIKLA

SEQ ID NO: 1462 - protein, 9 aa, Severe acute respiratory syndrome-related coronavirus
  REGION 1..9: note = Table A: HLA-A*34:01H HLA-A*34:02M HLA-A*66:01H
  source 1..9: note = Severe acute respiratory syndrome coronavirus 2
TPFEIKLAK

SEQ ID NO: 1463 - protein, 9 aa, Severe acute respiratory syndrome-related coronavirus
  REGION 1..9: note = Table A: HLA-B*44:03H
  source 1..9: note = Severe acute respiratory syndrome coronavirus 2
FEIKLAKKF

SEQ ID NO: 1464 - protein, 9 aa, Severe acute respiratory syndrome-related coronavirus
  REGION 1..9: note = Table A: HLA-A*02:02H HLA-A*24:07H HLA-A*32:01H HLA-B*57:03H HLA-B*13:01M
  source 1..9: note = Severe acute respiratory syndrome coronavirus 2
KLAKKFDTF

SEQ ID NO: 1465 - protein, 9 aa, Severe acute respiratory syndrome-related coronavirus
  REGION 1..9: note = Table A: HLA-B*45:01H HLA-B*40:06H HLA-B*50:01M
  source 1..9: note = Severe acute respiratory syndrome coronavirus 2
GECPNFVFP

SEQ ID NO: 1466 - protein, 9 aa, Severe acute respiratory syndrome-related coronavirus
  REGION 1..9: note = Table A: HLA-B*38:02H
  source 1..9: note = Severe acute respiratory syndrome coronavirus 2
FVFPLNSII

SEQ ID NO: 1467 - protein, 9 aa, Severe acute respiratory syndrome-related coronavirus
  REGION 1..9: note = Table A: HLA-B*56:01H HLA-B*55:02H HLA-B*35:07H HLA-B*54:01M
  source 1..9: note = Severe acute respiratory syndrome coronavirus 2
FPLNSIIKT

SEQ ID NO: 1468 - protein, 9 aa, Severe acute respiratory syndrome-related coronavirus
  REGION 1..9: note = Table A: HLA-A*02:04H HLA-A*02:02H HLA-A*02:03H
  source 1..9: note = Severe acute respiratory syndrome coronavirus 2
PLNSIIKTI

SEQ ID NO: 1469 - protein, 9 aa, Severe acute respiratory syndrome-related coronavirus
  REGION 1..9: note = Table A: HLA-A*74:01H HLA-A*11:01H HLA-A*11:02M HLA-A*33:01H HLA-A*33:03M HLA-A*26:03M HLA-A*68:01M HLA-A*34:01H HLA-A*34:02H HLA-A*31:01H HLA-A*66:01H
  source 1..9: note = Severe acute respiratory syndrome coronavirus 2
SIIKTIQPR

SEQ ID NO: 1470 - protein, 9 aa, Severe acute respiratory syndrome-related coronavirus
  REGION 1..9: note = Table A: HLA-A*02:11H HLA-A*30:01H HLA-B*13:02H
  source 1..9: note = Severe acute respiratory syndrome coronavirus 2
IIKTIQPRV

SEQ ID NO: 1471 - protein, 9 aa, Severe acute respiratory syndrome-related coronavirus
  REGION 1..9: note = Table A: HLA-A*11:303M HLA-A*74:01M HLA-A*03:01M HLA-A*03:02M HLA-A*11:01H HLA-A*11:02H HLA-A*36:01H HLA-A*30:01M HLA-A*30:02H HLA-A*34:02M HLA-C*07:27M HLA-A*31:01H HLA-B*57:03H HLA-A*66:01H
  source 1..9: note = Severe acute respiratory syndrome coronavirus 2
KTIQPRVEK

SEQ ID NO: 1472 - protein, 9 aa, Severe acute respiratory syndrome-related coronavirus
  REGION 1..9: note = Table A: HLA-A*03:02H
  source 1..9: note = Severe acute respiratory syndrome coronavirus 2
TIQPRVEKK

SEQ ID NO: 1473 - protein, 9 aa, Severe acute respiratory syndrome-related coronavirus
  REGION 1..9: note = Table A: HLA-B*07:02H HLA-B*07:04M
  source 1..9: note = Severe acute respiratory syndrome coronavirus 2
QPRVEKKKL

SEQ ID NO: 1474 - protein, 9 aa, Severe acute respiratory syndrome-related coronavirus
  REGION 1..9: note = Table A: HLA-B*13:01H
  source 1..9: note = Severe acute respiratory syndrome coronavirus 2
KLDGFMGRI

SEQ ID NO: 1475 - protein, 9 aa, Severe acute respiratory syndrome-related coronavirus
  REGION 1..9: note = Table A: HLA-C*14:03H
  source 1..9: note = Severe acute respiratory syndrome coronavirus 2
GFMGRIRSV

SEQ ID NO: 1476 - protein, 9 aa, Severe acute respiratory syndrome-related coronavirus
  REGION 1..9: note = Table A: HLA-A*30:02H HLA-B*38:02H HLA-B*15:02H
  source 1..9: note = Severe acute respiratory syndrome coronavirus 2
FMGRIRSVY

SEQ ID NO: 1477 - protein, 9 aa, Severe acute respiratory syndrome-related coronavirus
  REGION 1..9: note = Table A: HLA-B*27:05H
  source 1..9: note = Severe acute respiratory syndrome coronavirus 2
GRIRSVYPV

SEQ ID NO: 1478 - protein, 9 aa, Severe acute respiratory syndrome-related coronavirus
  REGION 1..9: note = Table A: HLA-A*30:01H
  source 1..9: note = Severe acute respiratory syndrome coronavirus 2
RIRSVYPVA

SEQ ID NO: 1479 - protein, 9 aa, Severe acute respiratory syndrome-related coronavirus
  REGION 1..9: note = Table A: HLA-B*56:01M HLA-B*55:02M HLA-B*35:03M HLA-C*15:05M HLA-B*55:01H HLA-B*35:01H HLA-B*35:02H HLA-B*51:01H HLA-B*35:12H HLA-B*38:02H HLA-B*39:06H HLA-B*54:01H HLA-B*07:05H
  source 1..9: note = Severe acute respiratory syndrome coronavirus 2
YPVASPNEC

SEQ ID NO: 1480 - protein, 9 aa, Severe acute respiratory syndrome-related coronavirus
  REGION 1..9: note = Table A: HLA-C*15:05H
  source 1..9: note = Severe acute respiratory syndrome coronavirus 2
SPNECNQMC

SEQ ID NO: 1481 - protein, 9 aa, Severe acute respiratory syndrome-related coronavirus
  REGION 1..9: note = Table A: HLA-B*38:02H HLA-B*15:02H
  source 1..9: note = Severe acute respiratory syndrome coronavirus 2
NQMCLSTLM

SEQ ID NO: 1482 - protein, 9 aa, Severe acute respiratory syndrome-related coronavirus
  REGION 1..9: note = Table A: HLA-A*25:01H HLA-A*26:01H HLA-A*26:02H HLA-A*66:01H
  source 1..9: note = Severe acute respiratory syndrome coronavirus 2
ETSWQTGDF

SEQ ID NO: 1483 - protein, 9 aa, Severe acute respiratory syndrome-related coronavirus
  REGION 1..9: note = Table A: HLA-B*13:02H
  source 1..9: note = Severe acute respiratory syndrome coronavirus 2
TSWQTGDFV

SEQ ID NO: 1484 - protein, 9 aa, Severe acute respiratory syndrome-related coronavirus
  REGION 1..9: note = Table A: HLA-A*02:05H HLA-A*02:06H
  source 1..9: note = Severe acute respiratory syndrome coronavirus 2
WQTGDFVKA

SEQ ID NO: 1485 - protein, 9 aa, Severe acute respiratory syndrome-related coronavirus
  REGION 1..9: note = Table A: HLA-A*68:02H
  source 1..9: note = Severe acute respiratory syndrome coronavirus 2
QTGDFVKAT

SEQ ID NO: 1486 - protein, 9 aa, Severe acute respiratory syndrome-related coronavirus
  REGION 1..9: note = Table A: HLA-C*14:03H HLA-A*24:02H HLA-A*24:07H HLA-A*23:01H HLA-B*38:02H HLA-B*15:02H HLA-B*07:05H
  source 1..9: note = Severe acute respiratory syndrome coronavirus 2
DFVKATCEF

SEQ ID NO: 1487 - protein, 9 aa, Severe acute respiratory syndrome-related coronavirus
  REGION 1..9: note = Table A: HLA-B*44:05H HLA-B*40:01H HLA-B*40:02H HLA-B*41:02H HLA-B*49:01H
  source 1..9: note = Severe acute respiratory syndrome coronavirus 2
CEFCGTENL

SEQ ID NO: 1488 - protein, 9 aa, Severe acute respiratory syndrome-related coronavirus
  REGION 1..9: note = Table A: HLA-A*34:02H
  source 1..9: note = Severe acute respiratory syndrome coronavirus 2
FCGTENLTK

SEQ ID NO: 1489 - protein, 9 aa, Severe acute respiratory syndrome-related coronavirus
  REGION 1..9: note = Table A: HLA-B*45:01M HLA-B*50:01H
  source 1..9: note = Severe acute respiratory syndrome coronavirus 2
TENLTKEGA

SEQ ID NO: 1490 - protein, 9 aa, Severe acute respiratory syndrome-related coronavirus
  REGION 1..9: note = Table A: HLA-A*02:08H HLA-A*02:03H
  source 1..9: note = Severe acute respiratory syndrome coronavirus 2
LTKEGATTC

SEQ ID NO: 1491 - protein, 9 aa, Severe acute respiratory syndrome-related coronavirus
  REGION 1..9: note = Table A: HLA-B*44:03H
  source 1..9: note = Severe acute respiratory syndrome coronavirus 2
KEGATTCGY

SEQ ID NO: 1492 - protein, 9 aa, Severe acute respiratory syndrome-related coronavirus
  REGION 1..9: note = Table A: HLA-B*52:01H
  source 1..9: note = Severe acute respiratory syndrome coronavirus 2
CGYLPQNAV

SEQ ID NO: 1493 - protein, 9 aa, Severe acute respiratory syndrome-related coronavirus
  REGION 1..9: note = Table A: HLA-C*14:03H HLA-B*39:01H
  source 1..9: note = Severe acute respiratory syndrome coronavirus 2
GYLPQNAVV

SEQ ID NO: 1494 - protein, 9 aa, Severe acute respiratory syndrome-related coronavirus
  REGION 1..9: note = Table A: HLA-A*34:02H
  source 1..9: note = Severe acute respiratory syndrome coronavirus 2
YLPQNAVVK

SEQ ID NO: 1495 - protein, 9 aa, Severe acute respiratory syndrome-related coronavirus
  REGION 1..9: note = Table A: HLA-B*42:01H HLA-B*56:01H HLA-B*53:01H HLA-B*55:02H HLA-B*35:03H HLA-C*15:05M HLA-B*35:01H HLA-B*35:02H HLA-B*51:01H HLA-B*35:07H HLA-B*35:12H HLA-B*38:02H HLA-B*54:01H HLA-B*07:04H HLA-B*07:05H
  source 1..9: note = Severe acute respiratory syndrome coronavirus 2
LPQNAVVKI

SEQ ID NO: 1496 - protein, 9 aa, Severe acute respiratory syndrome-related coronavirus
  REGION 1..9: note = Table A: HLA-A*30:02H HLA-B*15:01H
  source 1..9: note = Severe acute respiratory syndrome coronavirus 2
PQNAVVKIY

SEQ ID NO: 1497 - protein, 9 aa, Severe acute respiratory syndrome-related coronavirus
  REGION 1..9: note = Table A: HLA-B*56:01H HLA-B*55:02H HLA-A*02:05H
  source 1..9: note = Severe acute respiratory syndrome coronavirus 2
AVVKIYCPA

SEQ ID NO: 1498 - protein, 9 aa, Severe acute respiratory syndrome-related coronavirus
  REGION 1..9: note = Table A: HLA-C*15:05H
  source 1..9: note = Severe acute respiratory syndrome coronavirus 2
CPACHNSEV

SEQ ID NO: 1499 - protein, 9 aa, Severe acute respiratory syndrome-related coronavirus
  REGION 1..9: note = Table A: HLA-B*35:01H HLA-B*07:05H
  source 1..9: note = Severe acute respiratory syndrome coronavirus 2
HNSEVGPEH

SEQ ID NO: 1500 - protein, 9 aa, Severe acute respiratory syndrome-related coronavirus
  REGION 1..9: note = Table A: HLA-B*48:01M HLA-A*11:303H HLA-B*44:02M HLA-B*44:05H HLA-C*16:04M HLA-B*45:01M HLA-B*44:03H HLA-B*18:01H HLA-B*27:02H HLA-A*68:02H HLA-B*35:03H HLA-A*02:05H HLA-B*14:01H HLA-B*35:02M HLA-C*08:01H
  REGION 1..9: note = CONT. FROM ABOVE: HLA-B*35:12M HLA-B*37:01M HLA-B*38:01H HLA- B*38:02H HLA-B*40:01H HLA-B*40:02H HLA-B*40:06H HLA-B*39:01H HLA-B*07:05H HLA-B*41:02H HLA-B*13:01H HLA-B*49:01M HLA-C*07 :04H HLA-B*50:01M
  source 1..9: note = Severe acute respiratory syndrome coronavirus 2
SEVGPEHSL

SEQ ID NO: 1501 - protein, 9 aa, Severe acute respiratory syndrome-related coronavirus
  REGION 1..9: note = Table A: HLA-A*26:03M HLA-A*68:02H HLA-A*34:01M
  source 1..9: note = Severe acute respiratory syndrome coronavirus 2
EVGPEHSLA

SEQ ID NO: 1502 - protein, 9 aa, Severe acute respiratory syndrome-related coronavirus
  REGION 1..9: note = Table A: HLA-B*35:01M HLA-B*35:08H HLA-B*35:07H HLA-B*07:05H
  source 1..9: note = Severe acute respiratory syndrome coronavirus 2
GPEHSLAEY

SEQ ID NO: 1503 - protein, 9 aa, Severe acute respiratory syndrome-related coronavirus
  REGION 1..9: note = Table A: HLA-A*02:02M
  source 1..9: note = Severe acute respiratory syndrome coronavirus 2
SLAEYHNES

SEQ ID NO: 1504 - protein, 9 aa, Severe acute respiratory syndrome-related coronavirus
  REGION 1..9: note = Table A: HLA-B*44:05M HLA-B*45:01M HLA-B*44:03H HLA-B*37:01H HLA-B*40:01H HLA-B*40:02M HLA-B*41:02M HLA-B*49:01H HLA-B*50:01M
  source 1..9: note = Severe acute respiratory syndrome coronavirus 2
AEYHNESGL

SEQ ID NO: 1505 - protein, 9 aa, Severe acute respiratory syndrome-related coronavirus
  REGION 1..9: note = Table A: HLA-A*33:03H HLA-A*34:02H
  source 1..9: note = Severe acute respiratory syndrome coronavirus 2
EYHNESGLK

SEQ ID NO: 1506 - protein, 9 aa, Severe acute respiratory syndrome-related coronavirus
  REGION 1..9: note = Table A: HLA-B*38:01H HLA-B*38:02M HLA-B*39:06H HLA-B*39:01M HLA-B*15:10M
  source 1..9: note = Severe acute respiratory syndrome coronavirus 2
YHNESGLKT

SEQ ID NO: 1507 - protein, 9 aa, Severe acute respiratory syndrome-related coronavirus
  REGION 1..9: note = Table A: HLA-B*44:02H HLA-B*44:05H HLA-B*45:01H HLA-B*44:03M HLA-B*18:01M HLA-B*40:01H HLA-B*40:02H HLA-B*39:01H HLA-B*07:05M HLA-B*41:02H HLA-B*49:01H
  source 1..9: note = Severe acute respiratory syndrome coronavirus 2
NESGLKTIL

SEQ ID NO: 1508 - protein, 9 aa, Severe acute respiratory syndrome-related coronavirus
  REGION 1..9: note = Table A: HLA-A*33:01H HLA-A*33:03H HLA-A*26:03H HLA-A*68:01M HLA-A*34:01H HLA-A*34:02M HLA-A*66:01M
  source 1..9: note = Severe acute respiratory syndrome coronavirus 2
ESGLKTILR

SEQ ID NO: 1509 - protein, 9 aa, Severe acute respiratory syndrome-related coronavirus
  REGION 1..9: note = Table A: HLA-A*11:303H HLA-A*03:01H HLA-A*11:01M HLA-A*11:02M HLA-A*34:02M HLA-C*07:27H
  source 1..9: note = Severe acute respiratory syndrome coronavirus 2
SGLKTILRK

SEQ ID NO: 1510 - protein, 9 aa, Severe acute respiratory syndrome-related coronavirus
  REGION 1..9: note = Table A: HLA-B*38:02H
  source 1..9: note = Severe acute respiratory syndrome coronavirus 2
ILRKGGRTI

SEQ ID NO: 1511 - protein, 9 aa, Severe acute respiratory syndrome-related coronavirus
  REGION 1..9: note = Table A: HLA-B*15:03M
  source 1..9: note = Severe acute respiratory syndrome coronavirus 2
RKGGRTIAF

SEQ ID NO: 1512 - protein, 9 aa, Severe acute respiratory syndrome-related coronavirus
  REGION 1..9: note = Table A: HLA-B*38:02H HLA-B*15:01H HLA-B*15:02M HLA-B*07:05H
  source 1..9: note = Severe acute respiratory syndrome coronavirus 2
TIAFGGCVF

SEQ ID NO: 1513 - protein, 9 aa, Severe acute respiratory syndrome-related coronavirus
  REGION 1..9: note = Table A: HLA-A*29:01H HLA-A*29:02H
  source 1..9: note = Severe acute respiratory syndrome coronavirus 2
AFGGCVFSY

SEQ ID NO: 1514 - protein, 9 aa, Severe acute respiratory syndrome-related coronavirus
  REGION 1..9: note = Table A: HLA-A*11:02H HLA-A*34:02M
  source 1..9: note = Severe acute respiratory syndrome coronavirus 2
FSYVGCHNK

SEQ ID NO: 1515 - protein, 9 aa, Severe acute respiratory syndrome-related coronavirus
  REGION 1..9: note = Table A: HLA-C*14:03H HLA-B*56:01H HLA-B*55:02H HLA-B*55:01H HLA-B*39:06H HLA-B*54:01H
  source 1..9: note = Severe acute respiratory syndrome coronavirus 2
AYWVPRASA

SEQ ID NO: 1516 - protein, 9 aa, Severe acute respiratory syndrome-related coronavirus
  REGION 1..9: note = Table A: HLA-B*39:01M
  source 1..9: note = Severe acute respiratory syndrome coronavirus 2
NHTGVVGEG

SEQ ID NO: 1517 - protein, 9 aa, Severe acute respiratory syndrome-related coronavirus
  REGION 1..9: note = Table A: HLA-A*02:05M HLA-A*02:08H HLA-A*02:02H
  source 1..9: note = Severe acute respiratory syndrome coronavirus 2
VVGEGSEGL

SEQ ID NO: 1518 - protein, 9 aa, Severe acute respiratory syndrome-related coronavirus
  REGION 1..9: note = Table A: HLA-B*44:05M HLA-B*40:01H HLA-B*40:02H HLA-B*41:02H
  source 1..9: note = Severe acute respiratory syndrome coronavirus 2
SEGLNDNLL

SEQ ID NO: 1519 - protein, 9 aa, Severe acute respiratory syndrome-related coronavirus
  REGION 1..9: note = Table A: HLA-A*02:04M HLA-A*02:01M HLA-A*02:02H HLA-A*02:03H HLA-B*38:02H HLA-B*13:02H
  source 1..9: note = Severe acute respiratory syndrome coronavirus 2
GLNDNLLEI

SEQ ID NO: 1520 - protein, 9 aa, Severe acute respiratory syndrome-related coronavirus
  REGION 1..9: note = Table A: HLA-B*40:02H HLA-B*41:02H HLA-B*49:01M
  source 1..9: note = Severe acute respiratory syndrome coronavirus 2
LEILQKEKV

SEQ ID NO: 1521 - protein, 9 aa, Severe acute respiratory syndrome-related coronavirus
  REGION 1..9: note = Table A: HLA-A*02:11H HLA-B*13:01H HLA-B*13:02H
  source 1..9: note = Severe acute respiratory syndrome coronavirus 2
ILQKEKVNI

SEQ ID NO: 1522 - protein, 9 aa, Severe acute respiratory syndrome-related coronavirus
  REGION 1..9: note = Table A: HLA-B*45:01M HLA-B*40:02M HLA-B*40:06M HLA-B*41:02M HLA-B*49:01M HLA-B*50:01H
  source 1..9: note = Severe acute respiratory syndrome coronavirus 2
KEKVNINIV

SEQ ID NO: 1523 - protein, 9 aa, Severe acute respiratory syndrome-related coronavirus
  REGION 1..9: note = Table A: HLA-A*26:01H
  source 1..9: note = Severe acute respiratory syndrome coronavirus 2
VNINIVGDF

SEQ ID NO: 1524 - protein, 9 aa, Severe acute respiratory syndrome-related coronavirus
  REGION 1..9: note = Table A: HLA-B*40:02H
  source 1..9: note = Severe acute respiratory syndrome coronavirus 2
GDFKLNEEI

SEQ ID NO: 1525 - protein, 9 aa, Severe acute respiratory syndrome-related coronavirus
  REGION 1..9: note = Table A: HLA-A*02:11M HLA-A*02:04H HLA-A*02:02M HLA-A*02:03H HLA-B*38:02H HLA-B*13:01H HLA-B*13:02H
  source 1..9: note = Severe acute respiratory syndrome coronavirus 2
KLNEEIAII

SEQ ID NO: 1526 - protein, 9 aa, Severe acute respiratory syndrome-related coronavirus
  REGION 1..9: note = Table A: HLA-B*45:01M
  source 1..9: note = Severe acute respiratory syndrome coronavirus 2
NEEIAIILA

SEQ ID NO: 1527 - protein, 9 aa, Severe acute respiratory syndrome-related coronavirus
  REGION 1..9: note = Table A: HLA-A*25:01H HLA-A*26:01H HLA-A*26:02H HLA-A*26:03H HLA-A*68:02M HLA-A*34:01M HLA-A*34:02H HLA-B*35:01H HLA-B*38:02H HLA-B*15:02H HLA-B*07:05H HLA-A*66:01H
  source 1..9: note = Severe acute respiratory syndrome coronavirus 2
EIAIILASF

SEQ ID NO: 1528 - protein, 9 aa, Severe acute respiratory syndrome-related coronavirus
  REGION 1..9: note = Table A: HLA-B*55:02H
  source 1..9: note = Severe acute respiratory syndrome coronavirus 2
AIILASFSA

SEQ ID NO: 1529 - protein, 9 aa, Severe acute respiratory syndrome-related coronavirus
  REGION 1..9: note = Table A: HLA-A*02:02H HLA-A*02:03H HLA-B*38:02H
  source 1..9: note = Severe acute respiratory syndrome coronavirus 2
ILASFSAST

SEQ ID NO: 1530 - protein, 9 aa, Severe acute respiratory syndrome-related coronavirus
  REGION 1..9: note = Table A: HLA-C*14:02H HLA-C*14:03H HLA-B*46:01H HLA-C*04:01H HLA-C*15:05H HLA-A*24:07H HLA-B*38:02H HLA-B*15:01H HLA-B*15:02M HLA-B*07:05M
  source 1..9: note = Severe acute respiratory syndrome coronavirus 2
SFSASTSAF

SEQ ID NO: 1531 - protein, 9 aa, Severe acute respiratory syndrome-related coronavirus
  REGION 1..9: note = Table A: HLA-A*68:02H
  source 1..9: note = Severe acute respiratory syndrome coronavirus 2
FSASTSAFV

SEQ ID NO: 1532 - protein, 9 aa, Severe acute respiratory syndrome-related coronavirus
  REGION 1..9: note = Table A: HLA-C*16:04H HLA-A*02:11H HLA-A*68:02H HLA-C*15:05M HLA-C*15:02H HLA-A*02:04H HLA-A*02:05M HLA-A*02:06H HLA-A*02:08M HLA-A*02:01M HLA-A*02:02H HLA-A*02:03H HLA-B*38:02M HLA-B*07:05H HLA-B*13:02H
  source 1..9: note = Severe acute respiratory syndrome coronavirus 2
STSAFVETV

SEQ ID NO: 1533 - protein, 9 aa, Severe acute respiratory syndrome-related coronavirus
  REGION 1..9: note = Table A: HLA-A*03:02H HLA-A*11:01M HLA-A*11:02H HLA-A*36:01H HLA-B*27:02H HLA-A*68:01M HLA-A*68:02H HLA-A*34:02M
  source 1..9: note = Severe acute respiratory syndrome coronavirus 2
TSAFVETVK

SEQ ID NO: 1534 - protein, 9 aa, Severe acute respiratory syndrome-related coronavirus
  REGION 1..9: note = Table A: HLA-C*14:02H HLA-C*14:03M
  source 1..9: note = Severe acute respiratory syndrome coronavirus 2
AFVETVKGL

SEQ ID NO: 1535 - protein, 9 aa, Severe acute respiratory syndrome-related coronavirus
  REGION 1..9: note = Table A: HLA-B*44:02H HLA-B*44:03M HLA-B*18:01H HLA-B*07:05H
  source 1..9: note = Severe acute respiratory syndrome coronavirus 2
VETVKGLDY

SEQ ID NO: 1536 - protein, 9 aa, Severe acute respiratory syndrome-related coronavirus
  REGION 1..9: note = Table A: HLA-A*36:01H HLA-A*33:03H HLA-A*26:03H HLA-A*68:01H HLA-A*68:02H HLA-A*34:01H HLA-A*34:02H HLA-A*66:01H
  source 1..9: note = Severe acute respiratory syndrome coronavirus 2
ETVKGLDYK

SEQ ID NO: 1537 - protein, 9 aa, Severe acute respiratory syndrome-related coronavirus
  REGION 1..9: note = Table A: HLA-A*11:02H HLA-A*36:01H HLA-A*30:01H HLA-A*30:02H
  source 1..9: note = Severe acute respiratory syndrome coronavirus 2
KGLDYKAFK

SEQ ID NO: 1538 - protein, 9 aa, Severe acute respiratory syndrome-related coronavirus
  REGION 1..9: note = Table A: HLA-B*57:03H
  source 1..9: note = Severe acute respiratory syndrome coronavirus 2
KAFKQIVES

SEQ ID NO: 1539 - protein, 9 aa, Severe acute respiratory syndrome-related coronavirus
  REGION 1..9: note = Table A: HLA-B*08:01H HLA-B*38:02H HLA-B*39:06H
  source 1..9: note = Severe acute respiratory syndrome coronavirus 2
AFKQIVESC

SEQ ID NO: 1540 - protein, 9 aa, Severe acute respiratory syndrome-related coronavirus
  REGION 1..9: note = Table A: HLA-A*26:02H HLA-B*15:02H
  source 1..9: note = Severe acute respiratory syndrome coronavirus 2
QIVESCGNF

SEQ ID NO: 1541 - protein, 9 aa, Severe acute respiratory syndrome-related coronavirus
  REGION 1..9: note = Table A: HLA-A*03:02H
  source 1..9: note = Severe acute respiratory syndrome coronavirus 2
IVESCGNFK

SEQ ID NO: 1542 - protein, 9 aa, Severe acute respiratory syndrome-related coronavirus
  REGION 1..9: note = Table A: HLA-B*49:01H
  source 1..9: note = Severe acute respiratory syndrome coronavirus 2
VESCGNFKV

SEQ ID NO: 1543 - protein, 9 aa, Severe acute respiratory syndrome-related coronavirus
  REGION 1..9: note = Table A: HLA-A*11:01H HLA-A*11:02H HLA-A*34:02H
  source 1..9: note = Severe acute respiratory syndrome coronavirus 2
SCGNFKVTK

SEQ ID NO: 1544 - protein, 9 aa, Severe acute respiratory syndrome-related coronavirus
  REGION 1..9: note = Table A: HLA-A*03:02H HLA-A*11:02H HLA-A*34:02H
  source 1..9: note = Severe acute respiratory syndrome coronavirus 2
GNFKVTKGK

SEQ ID NO: 1545 - protein, 9 aa, Severe acute respiratory syndrome-related coronavirus
  REGION 1..9: note = Table A: HLA-B*58:02H HLA-B*07:04H HLA-B*57:03M
  source 1..9: note = Severe acute respiratory syndrome coronavirus 2
KAKKGAWNI

SEQ ID NO: 1546 - protein, 9 aa, Severe acute respiratory syndrome-related coronavirus
  REGION 1..9: note = Table A: HLA-A*11:01H HLA-A*11:02H HLA-B*27:02H HLA-A*68:01H HLA-A*34:02M
  source 1..9: note = Severe acute respiratory syndrome coronavirus 2
GAWNIGEQK

SEQ ID NO: 1547 - protein, 9 aa, Severe acute respiratory syndrome-related coronavirus
  REGION 1..9: note = Table A: HLA-B*45:01H HLA-B*40:02H HLA-B*40:06M HLA-B*41:02H HLA-B*50:01M
  source 1..9: note = Severe acute respiratory syndrome coronavirus 2
GEQKSILSP

SEQ ID NO: 1548 - protein, 9 aa, Severe acute respiratory syndrome-related coronavirus
  REGION 1..9: note = Table A: HLA-B*15:03M
  source 1..9: note = Severe acute respiratory syndrome coronavirus 2
QKSILSPLY

SEQ ID NO: 1549 - protein, 9 aa, Severe acute respiratory syndrome-related coronavirus
  REGION 1..9: note = Table A: HLA-C*15:02H
  source 1..9: note = Severe acute respiratory syndrome coronavirus 2
KSILSPLYA

SEQ ID NO: 1550 - protein, 9 aa, Severe acute respiratory syndrome-related coronavirus
  REGION 1..9: note = Table A: HLA-A*11:303H HLA-A*29:02H HLA-A*02:04H HLA-B*38:02H HLA-B*15:02H
  source 1..9: note = Severe acute respiratory syndrome coronavirus 2
SILSPLYAF

SEQ ID NO: 1551 - protein, 9 aa, Severe acute respiratory syndrome-related coronavirus
  REGION 1..9: note = Table A: HLA-A*02:11H HLA-A*02:07H HLA-A*02:01H HLA-A*02:02M HLA-A*02:03H HLA-B*38:02H
  source 1..9: note = Severe acute respiratory syndrome coronavirus 2
ILSPLYAFA

SEQ ID NO: 1552 - protein, 9 aa, Severe acute respiratory syndrome-related coronavirus
  REGION 1..9: note = Table A: HLA-A*33:01H HLA-A*33:03H HLA-A*26:03H HLA-A*68:01M HLA-A*34:01M HLA-A*34:02H HLA-A*66:01M
  source 1..9: note = Severe acute respiratory syndrome coronavirus 2
YAFASEAAR

SEQ ID NO: 1553 - protein, 9 aa, Severe acute respiratory syndrome-related coronavirus
  REGION 1..9: note = Table A: HLA-B*58:02H HLA-A*11:303M HLA-C*16:01H HLA-C*16:04M HLA-B*46:01H HLA-C*06:02M HLA-C*03:03M HLA-C*12:05H HLA-B*53:01H HLA-C*03:02M HLA-C*03:04H HLA-A*68:02H HLA-B*35:03M HLA-C*15:05M HLA-C*12:02M
  REGION 1..9: note = CONT. FROM ABOVE: HLA-C*12:03H HLA-C*15:02M HLA-A*02:05H HLA- A*02:06H HLA-A*02:02H HLA-A*02:03H HLA-A*34:01H HLA-C*07:27H HLA-B*35:01H HLA-B*35:02H HLA-B*51:01M HLA-C*17:01H HLA-B*35 :07H HLA-C*08:01H HLA-B*38:02M HLA-B*07:04M HLA-C*02:02M
  REGION 1..9: note = CONT. FROM ABOVE: HLA-B*13:02H HLA-B*15:10H HLA-C*07:04H
  source 1..9: note = Severe acute respiratory syndrome coronavirus 2
FASEAARVV

SEQ ID NO: 1554 - protein, 9 aa, Severe acute respiratory syndrome-related coronavirus
  REGION 1..9: note = Table A: HLA-A*74:01H HLA-A*68:01H HLA-A*31:01H
  source 1..9: note = Severe acute respiratory syndrome coronavirus 2
ASEAARVVR

SEQ ID NO: 1555 - protein, 9 aa, Severe acute respiratory syndrome-related coronavirus
  REGION 1..9: note = Table A: HLA-B*45:01H
  source 1..9: note = Severe acute respiratory syndrome coronavirus 2
SEAARVVRS

SEQ ID NO: 1556 - protein, 9 aa, Severe acute respiratory syndrome-related coronavirus
  REGION 1..9: note = Table A: HLA-B*58:02H HLA-A*25:01H HLA-B*53:01H HLA-A*68:02M HLA-A*34:01H HLA-B*51:01H HLA-B*38:02H
  source 1..9: note = Severe acute respiratory syndrome coronavirus 2
EAARVVRSI

SEQ ID NO: 1557 - protein, 9 aa, Severe acute respiratory syndrome-related coronavirus
  REGION 1..9: note = Table A: HLA-B*46:01H HLA-C*03:02H HLA-C*12:02H HLA-B*07:02M HLA-B*07:04M HLA-B*57:03H
  source 1..9: note = Severe acute respiratory syndrome coronavirus 2
AARVVRSIF

SEQ ID NO: 1558 - protein, 9 aa, Severe acute respiratory syndrome-related coronavirus
  REGION 1..9: note = Table A: HLA-A*74:01H HLA-A*11:01H HLA-A*11:02H HLA-A*31:01M HLA-A*66:01H
  source 1..9: note = Severe acute respiratory syndrome coronavirus 2
RVVRSIFSR

SEQ ID NO: 1559 - protein, 9 aa, Severe acute respiratory syndrome-related coronavirus
  REGION 1..9: note = Table A: HLA-A*74:01H HLA-A*30:01H HLA-A*31:01H
  source 1..9: note = Severe acute respiratory syndrome coronavirus 2
VVRSIFSRT

SEQ ID NO: 1560 - protein, 9 aa, Severe acute respiratory syndrome-related coronavirus
  REGION 1..9: note = Table A: HLA-C*06:02H HLA-C*07:01H HLA-B*14:02H
  source 1..9: note = Severe acute respiratory syndrome coronavirus 2
VRSIFSRTL

SEQ ID NO: 1561 - protein, 9 aa, Severe acute respiratory syndrome-related coronavirus
  REGION 1..9: note = Table A: HLA-A*03:01H HLA-A*11:02H HLA-B*08:01H HLA-A*02:11H HLA-C*03:02H HLA-A*68:02H HLA-C*15:05H HLA-C*12:03H HLA-C*15:02H HLA-A*02:03H HLA-A*34:02H HLA-B*38:02H HLA-B*13:02H
  source 1..9: note = Severe acute respiratory syndrome coronavirus 2
SIFSRTLET

SEQ ID NO: 1562 - protein, 9 aa, Severe acute respiratory syndrome-related coronavirus
  REGION 1..9: note = Table A: HLA-B*38:02H HLA-B*39:01H
  source 1..9: note = Severe acute respiratory syndrome coronavirus 2
TLETAQNSV

SEQ ID NO: 1563 - protein, 9 aa, Severe acute respiratory syndrome-related coronavirus
  REGION 1..9: note = Table A: HLA-B*49:01H
  source 1..9: note = Severe acute respiratory syndrome coronavirus 2
LETAQNSVR

SEQ ID NO: 1564 - protein, 9 aa, Severe acute respiratory syndrome-related coronavirus
  REGION 1..9: note = Table A: HLA-A*33:03H HLA-A*26:01M HLA-A*26:02M HLA-A*26:03H HLA-A*68:01M HLA-A*68:02H HLA-A*34:01M HLA-A*34:02M HLA-A*66:01M
  source 1..9: note = Severe acute respiratory syndrome coronavirus 2
ETAQNSVRV

SEQ ID NO: 1565 - protein, 9 aa, Severe acute respiratory syndrome-related coronavirus
  REGION 1..9: note = Table A: HLA-B*42:01H HLA-B*58:02M HLA-C*14:03H HLA-A*11:303M HLA-C*16:01H HLA-C*16:04H HLA-B*46:01H HLA-C*06:02M HLA-C*03:03H HLA-C*12:05H HLA-B*53:01H HLA-C*03:02M HLA-C*03:04H HLA-B*35:03H HLA-C*15:05M
  REGION 1..9: note = CONT. FROM ABOVE: HLA-C*01:02H HLA-C*12:02M HLA-C*12:03H HLA- C*15:02H HLA-C*07:27M HLA-B*35:01H HLA-C*17:01M HLA-B*35:07H HLA-C*08:01M HLA-B*38:02M HLA-B*07:02H HLA-B*07:04H HLA-B*15 :02H HLA-B*39:01H HLA-B*41:02H HLA-C*02:02H HLA-B*15:10H
  REGION 1..9: note = CONT. FROM ABOVE: HLA-C*07:04M
  source 1..9: note = Severe acute respiratory syndrome coronavirus 2
TAQNSVRVL

SEQ ID NO: 1566 - protein, 9 aa, Severe acute respiratory syndrome-related coronavirus
  REGION 1..9: note = Table A: HLA-A*31:01H
  source 1..9: note = Severe acute respiratory syndrome coronavirus 2
AQNSVRVLQ

SEQ ID NO: 1567 - protein, 9 aa, Severe acute respiratory syndrome-related coronavirus
  REGION 1..9: note = Table A: HLA-A*34:02H
  source 1..9: note = Severe acute respiratory syndrome coronavirus 2
QNSVRVLQK

SEQ ID NO: 1568 - protein, 9 aa, Severe acute respiratory syndrome-related coronavirus
  REGION 1..9: note = Table A: HLA-A*02:05H
  source 1..9: note = Severe acute respiratory syndrome coronavirus 2
NSVRVLQKA

SEQ ID NO: 1569 - protein, 9 aa, Severe acute respiratory syndrome-related coronavirus
  REGION 1..9: note = Table A: HLA-B*55:02H HLA-B*55:01H
  source 1..9: note = Severe acute respiratory syndrome coronavirus 2
SVRVLQKAA

SEQ ID NO: 1570 - protein, 9 aa, Severe acute respiratory syndrome-related coronavirus
  REGION 1..9: note = Table A: HLA-B*14:02H HLA-B*14:01H
  source 1..9: note = Severe acute respiratory syndrome coronavirus 2
VRVLQKAAI

SEQ ID NO: 1571 - protein, 9 aa, Severe acute respiratory syndrome-related coronavirus
  REGION 1..9: note = Table A: HLA-B*52:01H HLA-B*13:02H
  source 1..9: note = Severe acute respiratory syndrome coronavirus 2
VLQKAAITI

SEQ ID NO: 1572 - protein, 9 aa, Severe acute respiratory syndrome-related coronavirus
  REGION 1..9: note = Table A: HLA-B*15:01H
  source 1..9: note = Severe acute respiratory syndrome coronavirus 2
LQKAAITIL

SEQ ID NO: 1573 - protein, 9 aa, Severe acute respiratory syndrome-related coronavirus
  REGION 1..9: note = Table A: HLA-C*12:05M HLA-A*02:11H HLA-A*68:02H HLA-A*02:05M HLA-A*02:06H HLA-A*02:08H HLA-C*08:01H HLA-B*38:02M HLA-B*13:02H
  source 1..9: note = Severe acute respiratory syndrome coronavirus 2
AAITILDGI

SEQ ID NO: 1574 - protein, 9 aa, Severe acute respiratory syndrome-related coronavirus
  REGION 1..9: note = Table A: HLA-C*14:03H HLA-A*11:303M HLA-A*25:01M HLA-B*46:01H HLA-A*26:01M HLA-A*26:02H HLA-A*26:03M HLA-A*29:01M HLA-A*29:02M HLA-B*44:03H HLA-B*18:01H HLA-C*07:01H HLA-B*27:02H HLA-C*03:02M HLA-A*30:02M
  REGION 1..9: note = CONT. FROM ABOVE: HLA-C*15:05H HLA-C*12:02M HLA-C*12:03H HLA- A*02:03H HLA-A*34:01H HLA-A*34:02H HLA-B*35:01H HLA-B*35:08H HLA-B*35:07M HLA-B*15:13H HLA-B*38:02H HLA-B*15:01H HLA-B*15 :02H HLA-B*15:03H HLA-B*39:01M HLA-B*07:05M HLA-C*02:02H
  REGION 1..9: note = CONT. FROM ABOVE: HLA-B*15:11M
  source 1..9: note = Severe acute respiratory syndrome coronavirus 2
TILDGISQY

SEQ ID NO: 1575 - protein, 9 aa, Severe acute respiratory syndrome-related coronavirus
  REGION 1..9: note = Table A: HLA-A*33:01M HLA-A*33:03H HLA-A*26:03M HLA-A*68:01H HLA-A*34:01M HLA-A*66:01M
  source 1..9: note = Severe acute respiratory syndrome coronavirus 2
DGISQYSLR

SEQ ID NO: 1576 - protein, 9 aa, Severe acute respiratory syndrome-related coronavirus
  REGION 1..9: note = Table A: HLA-B*58:02M HLA-C*15:02H
  source 1..9: note = Severe acute respiratory syndrome coronavirus 2
ISQYSLRLI

SEQ ID NO: 1577 - protein, 9 aa, Severe acute respiratory syndrome-related coronavirus
  REGION 1..9: note = Table A: HLA-C*08:01H HLA-B*57:03H
  source 1..9: note = Severe acute respiratory syndrome coronavirus 2
YSLRLIDAM

SEQ ID NO: 1578 - protein, 9 aa, Severe acute respiratory syndrome-related coronavirus
  REGION 1..9: note = Table A: HLA-B*38:02H HLA-B*15:02M
  source 1..9: note = Severe acute respiratory syndrome coronavirus 2
SLRLIDAMM

SEQ ID NO: 1579 - protein, 9 aa, Severe acute respiratory syndrome-related coronavirus
  REGION 1..9: note = Table A: HLA-B*13:02H
  source 1..9: note = Severe acute respiratory syndrome coronavirus 2
RLIDAMMFT

SEQ ID NO: 1580 - protein, 9 aa, Severe acute respiratory syndrome-related coronavirus
  REGION 1..9: note = Table A: HLA-A*68:02H HLA-B*35:03H HLA-C*15:05M HLA-A*34:01H HLA-B*35:01H HLA-B*51:01M HLA-B*38:02H HLA-B*07:05M
  source 1..9: note = Severe acute respiratory syndrome coronavirus 2
DAMMFTSDL

SEQ ID NO: 1581 - protein, 9 aa, Severe acute respiratory syndrome-related coronavirus
  REGION 1..9: note = Table A: HLA-B*38:02H
  source 1..9: note = Severe acute respiratory syndrome coronavirus 2
MMFTSDLAT

SEQ ID NO: 1582 - protein, 9 aa, Severe acute respiratory syndrome-related coronavirus
  REGION 1..9: note = Table A: HLA-C*04:03M HLA-C*15:05H HLA-C*08:02H HLA-B*38:02H HLA-B*39:01H HLA-C*05:01M
  source 1..9: note = Severe acute respiratory syndrome coronavirus 2
TSDLATNNL

SEQ ID NO: 1583 - protein, 9 aa, Severe acute respiratory syndrome-related coronavirus
  REGION 1..9: note = Table A: HLA-B*38:02H
  source 1..9: note = Severe acute respiratory syndrome coronavirus 2
DLATNNLVV

SEQ ID NO: 1584 - protein, 9 aa, Severe acute respiratory syndrome-related coronavirus
  REGION 1..9: note = Table A: HLA-A*11:303H HLA-C*03:03H HLA-C*12:05H HLA-C*03:02H HLA-C*03:04H
  source 1..9: note = Severe acute respiratory syndrome coronavirus 2
LATNNLVVM

SEQ ID NO: 1585 - protein, 9 aa, Severe acute respiratory syndrome-related coronavirus
  REGION 1..9: note = Table A: HLA-A*68:02H HLA-A*02:08H
  source 1..9: note = Severe acute respiratory syndrome coronavirus 2
ATNNLVVMA

SEQ ID NO: 1586 - protein, 9 aa, Severe acute respiratory syndrome-related coronavirus
  REGION 1..9: note = Table A: HLA-B*18:01H HLA-B*35:01H HLA-B*38:02H HLA-B*15:01H HLA-B*15:02H HLA-B*07:05H
  source 1..9: note = Severe acute respiratory syndrome coronavirus 2
TNNLVVMAY

SEQ ID NO: 1587 - protein, 9 aa, Severe acute respiratory syndrome-related coronavirus
  REGION 1..9: note = Table A: HLA-A*02:11H HLA-A*02:02H HLA-A*02:03M
  source 1..9: note = Severe acute respiratory syndrome coronavirus 2
VMAYITGGV

SEQ ID NO: 1588 - protein, 9 aa, Severe acute respiratory syndrome-related coronavirus
  REGION 1..9: note = Table A: HLA-C*15:05H HLA-B*51:01H HLA-B*38:02H
  source 1..9: note = Severe acute respiratory syndrome coronavirus 2
MAYITGGVV

SEQ ID NO: 1589 - protein, 9 aa, Severe acute respiratory syndrome-related coronavirus
  REGION 1..9: note = Table A: HLA-A*11:303H HLA-C*04:03H HLA-C*03:03H HLA-A*02:11H HLA-C*03:04M HLA-A*68:02H HLA-B*35:03H HLA-C*15:05H HLA-C*15:02H HLA-A*02:04M HLA-A*02:05M HLA-A*02:06H HLA-A*02:07H HLA-A*02:08H HLA-B*14:01H
  REGION 1..9: note = CONT. FROM ABOVE: HLA-A*02:01H HLA-A*02:02M HLA-A*02:03H HLA- C*17:01H HLA-C*08:01H HLA-B*38:02M HLA-B*39:01H HLA-C*02:02H HLA-C*07:04M
  source 1..9: note = Severe acute respiratory syndrome coronavirus 2
YITGGVVQL

SEQ ID NO: 1590 - protein, 9 aa, Severe acute respiratory syndrome-related coronavirus
  REGION 1..9: note = Table A: HLA-A*68:02H
  source 1..9: note = Severe acute respiratory syndrome coronavirus 2
ITGGVVQLT

SEQ ID NO: 1591 - protein, 9 aa, Severe acute respiratory syndrome-related coronavirus
  REGION 1..9: note = Table A: HLA-B*58:01H HLA-B*57:01H HLA-A*25:01M HLA-B*44:03H HLA-B*27:02H HLA-B*53:01H HLA-B*15:13H HLA-B*38:02H HLA-B*15:01H HLA-B*57:03M HLA-B*13:01H
  source 1..9: note = Severe acute respiratory syndrome coronavirus 2
GVVQLTSQW

SEQ ID NO: 1592 - protein, 9 aa, Severe acute respiratory syndrome-related coronavirus
  REGION 1..9: note = Table A: HLA-A*02:03H HLA-B*38:02H
  source 1..9: note = Severe acute respiratory syndrome coronavirus 2
WLTNIFGTV

SEQ ID NO: 1593 - protein, 9 aa, Severe acute respiratory syndrome-related coronavirus
  REGION 1..9: note = Table A: HLA-B*58:01H HLA-A*36:01H HLA-B*46:01M HLA-A*29:02H HLA-C*03:02H HLA-A*30:02M HLA-B*38:02H HLA-B*15:01H HLA-B*15:02H HLA-B*15:03H HLA-B*07:05H
  source 1..9: note = Severe acute respiratory syndrome coronavirus 2
LTNIFGTVY

SEQ ID NO: 1594 - protein, 9 aa, Severe acute respiratory syndrome-related coronavirus
  REGION 1..9: note = Table A: HLA-A*03:02H HLA-A*11:01H HLA-A*11:02M HLA-A*68:01H HLA-A*34:01H HLA-A*34:02M
  source 1..9: note = Severe acute respiratory syndrome coronavirus 2
NIFGTVYEK

SEQ ID NO: 1595 - protein, 9 aa, Severe acute respiratory syndrome-related coronavirus
  REGION 1..9: note = Table A: HLA-A*02:02H HLA-A*24:02H HLA-A*24:07H HLA-A*23:01H
  source 1..9: note = Severe acute respiratory syndrome coronavirus 2
IFGTVYEKL

SEQ ID NO: 1596 - protein, 9 aa, Severe acute respiratory syndrome-related coronavirus
  REGION 1..9: note = Table A: HLA-A*02:11H HLA-A*68:02H HLA-A*02:03H HLA-B*38:02H
  source 1..9: note = Severe acute respiratory syndrome coronavirus 2
TVYEKLKPV

SEQ ID NO: 1597 - protein, 9 aa, Severe acute respiratory syndrome-related coronavirus
  REGION 1..9: note = Table A: HLA-A*24:07M HLA-A*23:01H
  source 1..9: note = Severe acute respiratory syndrome coronavirus 2
VYEKLKPVL

SEQ ID NO: 1598 - protein, 9 aa, Severe acute respiratory syndrome-related coronavirus
  REGION 1..9: note = Table A: HLA-A*02:11H HLA-A*02:04M HLA-A*02:05H HLA-A*02:08H HLA-A*02:02H HLA-A*02:03H
  source 1..9: note = Severe acute respiratory syndrome coronavirus 2
KLKPVLDWL

SEQ ID NO: 1599 - protein, 9 aa, Severe acute respiratory syndrome-related coronavirus
  REGION 1..9: note = Table A: HLA-C*04:03H HLA-A*02:07M HLA-B*13:01H
  source 1..9: note = Severe acute respiratory syndrome coronavirus 2
VLDWLEEKF

SEQ ID NO: 1600 - protein, 9 aa, Severe acute respiratory syndrome-related coronavirus
  REGION 1..9: note = Table A: HLA-B*49:01H
  source 1..9: note = Severe acute respiratory syndrome coronavirus 2
LEEKFKEGV

SEQ ID NO: 1601 - protein, 9 aa, Severe acute respiratory syndrome-related coronavirus
  REGION 1..9: note = Table A: HLA-B*38:02H HLA-B*15:03H
  source 1..9: note = Severe acute respiratory syndrome coronavirus 2
EKFKEGVEF

SEQ ID NO: 1602 - protein, 9 aa, Severe acute respiratory syndrome-related coronavirus
  REGION 1..9: note = Table A: HLA-B*58:02H HLA-C*14:02H HLA-C*14:03H HLA-A*02:11H HLA-A*30:01M HLA-A*02:05H HLA-A*02:08H HLA-A*02:02M HLA-A*02:03H HLA-A*24:02H HLA-A*24:07M HLA-A*23:01H HLA-B*38:02H HLA-B*57:03H
  source 1..9: note = Severe acute respiratory syndrome coronavirus 2
KFKEGVEFL

SEQ ID NO: 1603 - protein, 9 aa, Severe acute respiratory syndrome-related coronavirus
  REGION 1..9: note = Table A: HLA-A*24:07H
  source 1..9: note = Severe acute respiratory syndrome coronavirus 2
EFLRDGWEI

SEQ ID NO: 1604 - protein, 9 aa, Severe acute respiratory syndrome-related coronavirus
  REGION 1..9: note = Table A: HLA-B*51:01M
  source 1..9: note = Severe acute respiratory syndrome coronavirus 2
DGWEIVKFI

SEQ ID NO: 1605 - protein, 9 aa, Severe acute respiratory syndrome-related coronavirus
  REGION 1..9: note = Table A: HLA-B*45:01H HLA-B*40:02H HLA-B*40:06M HLA-B*49:01H HLA-B*50:01M
  source 1..9: note = Severe acute respiratory syndrome coronavirus 2
WEIVKFIST

SEQ ID NO: 1606 - protein, 9 aa, Severe acute respiratory syndrome-related coronavirus
  REGION 1..9: note = Table A: HLA-A*26:01H HLA-A*26:02H HLA-A*26:03H HLA-A*68:02H HLA-A*02:05H HLA-B*38:02H
  source 1..9: note = Severe acute respiratory syndrome coronavirus 2
EIVKFISTC

SEQ ID NO: 1607 - protein, 9 aa, Severe acute respiratory syndrome-related coronavirus
  REGION 1..9: note = Table A: HLA-B*44:05H HLA-B*45:01H HLA-B*40:01H HLA-B*40:02M HLA-B*41:02M HLA-B*49:01H HLA-B*50:01M
  source 1..9: note = Severe acute respiratory syndrome coronavirus 2
CEIVGGQIV

SEQ ID NO: 1608 - protein, 9 aa, Severe acute respiratory syndrome-related coronavirus
  REGION 1..9: note = Table A: HLA-A*68:02H HLA-C*15:05H HLA-A*02:05H HLA-A*02:08M HLA-A*02:03H HLA-B*38:02H
  source 1..9: note = Severe acute respiratory syndrome coronavirus 2
IVGGQIVTC

SEQ ID NO: 1609 - protein, 9 aa, Severe acute respiratory syndrome-related coronavirus
  REGION 1..9: note = Table A: HLA-B*40:01H HLA-B*40:02M HLA-B*40:06H HLA-B*41:02H HLA-B*49:01H
  source 1..9: note = Severe acute respiratory syndrome coronavirus 2
KEIKESVQT

SEQ ID NO: 1610 - protein, 9 aa, Severe acute respiratory syndrome-related coronavirus
  REGION 1..9: note = Table A: HLA-A*25:01H HLA-B*46:01H HLA-A*26:01H HLA-A*26:02H HLA-A*26:03H HLA-B*08:01H HLA-A*68:02H HLA-C*12:02H HLA-A*34:01M HLA-B*38:02M HLA-B*15:01M HLA-B*15:02M
  source 1..9: note = Severe acute respiratory syndrome coronavirus 2
EIKESVQTF

SEQ ID NO: 1611 - protein, 9 aa, Severe acute respiratory syndrome-related coronavirus
  REGION 1..9: note = Table A: HLA-B*15:03H
  source 1..9: note = Severe acute respiratory syndrome coronavirus 2
IKESVQTFF

SEQ ID NO: 1612 - protein, 9 aa, Severe acute respiratory syndrome-related coronavirus
  REGION 1..9: note = Table A: HLA-A*68:02M HLA-A*34:02H
  source 1..9: note = Severe acute respiratory syndrome coronavirus 2
ESVQTFFKL

SEQ ID NO: 1613 - protein, 9 aa, Severe acute respiratory syndrome-related coronavirus
  REGION 1..9: note = Table A: HLA-A*68:02H HLA-C*15:02H HLA-A*02:04H HLA-A*02:06H HLA-A*02:07H
  source 1..9: note = Severe acute respiratory syndrome coronavirus 2
SVQTFFKLV

SEQ ID NO: 1614 - protein, 9 aa, Severe acute respiratory syndrome-related coronavirus
  REGION 1..9: note = Table A: HLA-A*11:303H HLA-A*74:01H HLA-A*03:01H HLA-A*03:02H HLA-A*11:01M HLA-A*11:02H HLA-A*36:01H HLA-A*33:03H HLA-A*30:01H HLA-A*68:01H HLA-A*68:02H HLA-A*34:01H HLA-A*34:02H HLA-C*07:27H HLA-A*66:01H
  source 1..9: note = Severe acute respiratory syndrome coronavirus 2
QTFFKLVNK

SEQ ID NO: 1615 - protein, 9 aa, Severe acute respiratory syndrome-related coronavirus
  REGION 1..9: note = Table A: HLA-A*24:07M HLA-A*23:01H
  source 1..9: note = Severe acute respiratory syndrome coronavirus 2
TFFKLVNKF

SEQ ID NO: 1616 - protein, 9 aa, Severe acute respiratory syndrome-related coronavirus
  REGION 1..9: note = Table A: HLA-A*11:303H HLA-A*74:01H HLA-A*03:01H HLA-B*08:01H HLA-A*02:11M HLA-C*03:02H HLA-C*03:04H HLA-C*15:02M HLA-A*02:04M HLA-A*02:06H HLA-A*02:07H HLA-A*02:01H HLA-A*02:02M HLA-A*02:03H HLA-C*08:01H
  REGION 1..9: note = CONT. FROM ABOVE: HLA-B*38:02H HLA-A*32:01H HLA-B*40:06M HLA- B*07:04H HLA-B*13:01H HLA-B*13:02H
  source 1..9: note = Severe acute respiratory syndrome coronavirus 2
KLVNKFLAL

SEQ ID NO: 1617 - protein, 9 aa, Severe acute respiratory syndrome-related coronavirus
  REGION 1..9: note = Table A: HLA-B*38:02H
  source 1..9: note = Severe acute respiratory syndrome coronavirus 2
FLALCADSI

SEQ ID NO: 1618 - protein, 9 aa, Severe acute respiratory syndrome-related coronavirus
  REGION 1..9: note = Table A: HLA-B*45:01H HLA-B*50:01H
  source 1..9: note = Severe acute respiratory syndrome coronavirus 2
ADSIIIGGA

SEQ ID NO: 1619 - protein, 9 aa, Severe acute respiratory syndrome-related coronavirus
  REGION 1..9: note = Table A: HLA-A*26:03H HLA-A*68:01H HLA-A*34:01M HLA-A*34:02H HLA-A*66:01H
  source 1..9: note = Severe acute respiratory syndrome coronavirus 2
DSIIIGGAK

SEQ ID NO: 1620 - protein, 9 aa, Severe acute respiratory syndrome-related coronavirus
  REGION 1..9: note = Table A: HLA-A*11:303M HLA-B*44:05H HLA-C*03:03H HLA-C*03:04H HLA-C*15:05H HLA-A*02:05M HLA-A*02:08M HLA-A*02:02H HLA-A*34:01H HLA-C*08:01H HLA-B*38:02H HLA-B*15:01H
  source 1..9: note = Severe acute respiratory syndrome coronavirus 2
SIIIGGAKL

SEQ ID NO: 1621 - protein, 9 aa, Severe acute respiratory syndrome-related coronavirus
  REGION 1..9: note = Table A: HLA-A*03:01H HLA-A*03:02H HLA-A*11:01H HLA-A*11:02H HLA-A*30:01H HLA-A*34:01H HLA-A*34:02M HLA-A*66:01H
  source 1..9: note = Severe acute respiratory syndrome coronavirus 2
IIIGGAKLK

SEQ ID NO: 1622 - protein, 9 aa, Severe acute respiratory syndrome-related coronavirus
  REGION 1..9: note = Table A: HLA-B*08:01H HLA-B*07:04H
  source 1..9: note = Severe acute respiratory syndrome coronavirus 2
GAKLKALNL

SEQ ID NO: 1623 - protein, 9 aa, Severe acute respiratory syndrome-related coronavirus
  REGION 1..9: note = Table A: HLA-B*58:01H HLA-B*58:02M HLA-A*11:303H HLA-B*57:01M HLA-C*15:05H HLA-C*12:02H HLA-B*35:01H HLA-A*24:07H HLA-C*08:01H HLA-A*23:01H HLA-B*38:02H HLA-B*15:01H HLA-B*15:03M HLA-B*07:05H HLA-B*57:03H
  REGION 1..9: note = CONT. FROM ABOVE: HLA-B*13:01H
  source 1..9: note = Severe acute respiratory syndrome coronavirus 2
KALNLGETF

SEQ ID NO: 1624 - protein, 9 aa, Severe acute respiratory syndrome-related coronavirus
  REGION 1..9: note = Table A: HLA-A*02:02H HLA-A*02:03H HLA-B*38:02H
  source 1..9: note = Severe acute respiratory syndrome coronavirus 2
ALNLGETFV

SEQ ID NO: 1625 - protein, 9 aa, Severe acute respiratory syndrome-related coronavirus
  REGION 1..9: note = Table A: HLA-A*11:303H HLA-B*38:02H HLA-B*15:02H HLA-B*07:05H
  source 1..9: note = Severe acute respiratory syndrome coronavirus 2
NLGETFVTH

SEQ ID NO: 1626 - protein, 9 aa, Severe acute respiratory syndrome-related coronavirus
  REGION 1..9: note = Table A: HLA-A*11:01H HLA-A*11:02H HLA-B*45:01H HLA-B*44:03H HLA-B*27:02H HLA-A*30:02H HLA-B*40:02H HLA-B*40:06H HLA-B*49:01M HLA-B*50:01H
  source 1..9: note = Severe acute respiratory syndrome coronavirus 2
GETFVTHSK

SEQ ID NO: 1627 - protein, 9 aa, Severe acute respiratory syndrome-related coronavirus
  REGION 1..9: note = Table A: HLA-A*34:01H HLA-A*34:02H HLA-A*66:01H
  source 1..9: note = Severe acute respiratory syndrome coronavirus 2
ETFVTHSKG

SEQ ID NO: 1628 - protein, 9 aa, Severe acute respiratory syndrome-related coronavirus
  REGION 1..9: note = Table A: HLA-A*36:01H HLA-A*26:01H HLA-A*29:02M HLA-A*30:02H HLA-A*34:02H HLA-B*38:02H HLA-B*15:02H
  source 1..9: note = Severe acute respiratory syndrome coronavirus 2
FVTHSKGLY

SEQ ID NO: 1629 - protein, 9 aa, Severe acute respiratory syndrome-related coronavirus
  REGION 1..9: note = Table A: HLA-A*11:303H HLA-A*74:01H HLA-A*03:01M HLA-A*11:01H HLA-A*11:02M HLA-A*36:01H HLA-A*33:01H HLA-A*33:03M HLA-A*26:03H HLA-A*68:01H HLA-A*34:01M HLA-A*34:02H HLA-A*31:01H HLA-A*66:01H
  source 1..9: note = Severe acute respiratory syndrome coronavirus 2
VTHSKGLYR

SEQ ID NO: 1630 - protein, 9 aa, Severe acute respiratory syndrome-related coronavirus
  REGION 1..9: note = Table A: HLA-B*58:02H HLA-B*57:03M
  source 1..9: note = Severe acute respiratory syndrome coronavirus 2
KSREETGLL

SEQ ID NO: 1631 - protein, 9 aa, Severe acute respiratory syndrome-related coronavirus
  REGION 1..9: note = Table A: HLA-B*38:01H HLA-B*38:02H HLA-B*39:01H
  source 1..9: note = Severe acute respiratory syndrome coronavirus 2
SREETGLLM

SEQ ID NO: 1632 - protein, 9 aa, Severe acute respiratory syndrome-related coronavirus
  REGION 1..9: note = Table A: HLA-B*45:01H HLA-B*50:01H
  source 1..9: note = Severe acute respiratory syndrome coronavirus 2
REETGLLMP

SEQ ID NO: 1633 - protein, 9 aa, Severe acute respiratory syndrome-related coronavirus
  REGION 1..9: note = Table A: HLA-A*11:01H HLA-A*11:02H HLA-A*34:02H
  source 1..9: note = Severe acute respiratory syndrome coronavirus 2
ETGLLMPLK

SEQ ID NO: 1634 - protein, 9 aa, Severe acute respiratory syndrome-related coronavirus
  REGION 1..9: note = Table A: HLA-B*39:06H HLA-B*54:01H
  source 1..9: note = Severe acute respiratory syndrome coronavirus 2
TGLLMPLKA

SEQ ID NO: 1635 - protein, 9 aa, Severe acute respiratory syndrome-related coronavirus
  REGION 1..9: note = Table A: HLA-A*74:01H HLA-A*11:02H HLA-A*34:02H
  source 1..9: note = Severe acute respiratory syndrome coronavirus 2
LLMPLKAPK

SEQ ID NO: 1636 - protein, 9 aa, Severe acute respiratory syndrome-related coronavirus
  REGION 1..9: note = Table A: HLA-B*42:01H HLA-B*53:01H HLA-C*15:05H HLA-B*51:01M HLA-B*54:01H HLA-B*07:04M HLA-B*07:05H
  source 1..9: note = Severe acute respiratory syndrome coronavirus 2
MPLKAPKEI

SEQ ID NO: 1637 - protein, 9 aa, Severe acute respiratory syndrome-related coronavirus
  REGION 1..9: note = Table A: HLA-B*15:03H
  source 1..9: note = Severe acute respiratory syndrome coronavirus 2
LKAPKEIIF

SEQ ID NO: 1638 - protein, 9 aa, Severe acute respiratory syndrome-related coronavirus
  REGION 1..9: note = Table A: HLA-B*58:02H HLA-C*04:03M HLA-A*02:11M HLA-C*01:02H HLA-C*15:02H HLA-A*02:04H HLA-A*02:05H HLA-A*02:06H HLA-A*02:07H HLA-A*02:08H HLA-A*02:02H HLA-C*17:01M HLA-C*08:01H HLA-B*57:03M HLA-C*07:04M
  source 1..9: note = Severe acute respiratory syndrome coronavirus 2
KAPKEIIFL

SEQ ID NO: 1639 - protein, 9 aa, Severe acute respiratory syndrome-related coronavirus
  REGION 1..9: note = Table A: HLA-A*11:303H HLA-A*02:11H HLA-C*03:04H HLA-C*15:05H HLA-A*02:05H HLA-A*02:02H HLA-C*08:01M HLA-B*38:01H HLA-B*38:02H HLA-B*15:01H HLA-B*13:01H
  source 1..9: note = Severe acute respiratory syndrome coronavirus 2
IIFLEGETL

SEQ ID NO: 1640 - protein, 9 aa, Severe acute respiratory syndrome-related coronavirus
  REGION 1..9: note = Table A: HLA-B*48:01H HLA-B*44:05M HLA-B*45:01H HLA-B*40:01H HLA-B*40:02H HLA-B*41:02H HLA-B*49:01M HLA-B*50:01H
  source 1..9: note = Severe acute respiratory syndrome coronavirus 2
GETLPTEVL

SEQ ID NO: 1641 - protein, 9 aa, Severe acute respiratory syndrome-related coronavirus
  REGION 1..9: note = Table A: HLA-B*49:01H
  source 1..9: note = Severe acute respiratory syndrome coronavirus 2
TEVLTEEVV

SEQ ID NO: 1642 - protein, 9 aa, Severe acute respiratory syndrome-related coronavirus
  REGION 1..9: note = Table A: HLA-B*35:02H HLA-B*35:12H
  source 1..9: note = Severe acute respiratory syndrome coronavirus 2
EVLTEEVVL

SEQ ID NO: 1643 - protein, 9 aa, Severe acute respiratory syndrome-related coronavirus
  REGION 1..9: note = Table A: HLA-A*11:303H HLA-A*03:01H HLA-A*03:02H HLA-A*11:01H HLA-A*11:02H HLA-A*36:01H HLA-B*27:02H HLA-A*34:02H HLA-A*23:01H
  source 1..9: note = Severe acute respiratory syndrome coronavirus 2
VLTEEVVLK

SEQ ID NO: 1644 - protein, 9 aa, Severe acute respiratory syndrome-related coronavirus
  REGION 1..9: note = Table A: HLA-A*01:01H
  source 1..9: note = Severe acute respiratory syndrome coronavirus 2
LTEEVVLKT

SEQ ID NO: 1645 - protein, 9 aa, Severe acute respiratory syndrome-related coronavirus
  REGION 1..9: note = Table A: HLA-A*25:01H HLA-A*26:01H HLA-A*26:02H HLA-A*26:03H HLA-A*34:01M HLA-A*66:01H
  source 1..9: note = Severe acute respiratory syndrome coronavirus 2
EVVLKTGDL

SEQ ID NO: 1646 - protein, 9 aa, Severe acute respiratory syndrome-related coronavirus
  REGION 1..9: note = Table A: HLA-B*45:01H HLA-B*41:02H HLA-B*49:01M HLA-B*50:01H
  source 1..9: note = Severe acute respiratory syndrome coronavirus 2
LEQPTSEAV

SEQ ID NO: 1647 - protein, 9 aa, Severe acute respiratory syndrome-related coronavirus
  REGION 1..9: note = Table A: HLA-B*56:01H HLA-B*55:02H HLA-B*35:02H
  source 1..9: note = Severe acute respiratory syndrome coronavirus 2
QPTSEAVEA

SEQ ID NO: 1648 - protein, 9 aa, Severe acute respiratory syndrome-related coronavirus
  REGION 1..9: note = Table A: HLA-B*35:02H HLA-B*35:12H
  source 1..9: note = Severe acute respiratory syndrome coronavirus 2
TSEAVEAPL

SEQ ID NO: 1649 - protein, 9 aa, Severe acute respiratory syndrome-related coronavirus
  REGION 1..9: note = Table A: HLA-B*44:05H HLA-B*45:01M HLA-B*40:01H HLA-B*40:02H HLA-B*41:02H HLA-B*49:01H
  source 1..9: note = Severe acute respiratory syndrome coronavirus 2
SEAVEAPLV

SEQ ID NO: 1650 - protein, 9 aa, Severe acute respiratory syndrome-related coronavirus
  REGION 1..9: note = Table A: HLA-B*45:01M HLA-B*40:06H HLA-B*49:01H HLA-B*50:01H
  source 1..9: note = Severe acute respiratory syndrome coronavirus 2
VEAPLVGTP

SEQ ID NO: 1651 - protein, 9 aa, Severe acute respiratory syndrome-related coronavirus
  REGION 1..9: note = Table A: HLA-A*68:01H HLA-A*68:02M HLA-C*15:05H HLA-A*34:01H HLA-A*34:02H HLA-B*51:01M HLA-B*54:01H HLA-A*66:01H
  source 1..9: note = Severe acute respiratory syndrome coronavirus 2
EAPLVGTPV

SEQ ID NO: 1652 - protein, 9 aa, Severe acute respiratory syndrome-related coronavirus
  REGION 1..9: note = Table A: HLA-B*56:01M HLA-B*55:02M HLA-C*15:05M HLA-B*55:01M HLA-B*54:01H HLA-B*07:05H
  source 1..9: note = Severe acute respiratory syndrome coronavirus 2
APLVGTPVC

SEQ ID NO: 1653 - protein, 9 aa, Severe acute respiratory syndrome-related coronavirus
  REGION 1..9: note = Table A: HLA-B*13:02H
  source 1..9: note = Severe acute respiratory syndrome coronavirus 2
PLVGTPVCI

SEQ ID NO: 1654 - protein, 9 aa, Severe acute respiratory syndrome-related coronavirus
  REGION 1..9: note = Table A: HLA-B*58:01M HLA-B*44:02H HLA-B*44:05M HLA-C*16:04H HLA-B*46:01H HLA-B*44:03H HLA-B*18:01H HLA-C*07:01H HLA-A*30:02H HLA-B*35:01H HLA-B*38:02H HLA-B*40:01H HLA-B*40:02H HLA-B*15:01M HLA-B*15:03H HLA-B*39:01H
  REGION 1..9: note = CONT. FROM ABOVE: HLA-B*07:05M HLA-B*49:01H
  source 1..9: note = Severe acute respiratory syndrome coronavirus 2
LEIKDTEKY

SEQ ID NO: 1655 - protein, 9 aa, Severe acute respiratory syndrome-related coronavirus
  REGION 1..9: note = Table A: HLA-B*37:01H
  source 1..9: note = Severe acute respiratory syndrome coronavirus 2
KDTEKYCAL

SEQ ID NO: 1656 - protein, 9 aa, Severe acute respiratory syndrome-related coronavirus
  REGION 1..9: note = Table A: HLA-C*15:05H
  source 1..9: note = Severe acute respiratory syndrome coronavirus 2
CALAPNMMV

SEQ ID NO: 1657 - protein, 9 aa, Severe acute respiratory syndrome-related coronavirus
  REGION 1..9: note = Table A: HLA-B*38:02H
  source 1..9: note = Severe acute respiratory syndrome coronavirus 2
ALAPNMMVT

SEQ ID NO: 1658 - protein, 9 aa, Severe acute respiratory syndrome-related coronavirus
  REGION 1..9: note = Table A: HLA-B*46:01H HLA-C*15:05H HLA-A*24:02H HLA-B*35:01H HLA-B*15:13H HLA-B*38:02M HLA-B*15:01H HLA-B*15:02H HLA-B*07:05M
  source 1..9: note = Severe acute respiratory syndrome coronavirus 2
NMMVTNNTF

SEQ ID NO: 1659 - protein, 9 aa, Severe acute respiratory syndrome-related coronavirus
  REGION 1..9: note = Table A: HLA-A*68:02H HLA-B*35:03M HLA-C*15:05H HLA-A*02:04H HLA-A*02:05H HLA-A*02:06H HLA-A*02:08H HLA-A*02:02H HLA-A*34:02H HLA-B*35:01H HLA-B*35:02H HLA-C*08:01H HLA-B*35:12H HLA-B*38:02H HLA-B*40:06H HLA-B*39:01H
  REGION 1..9: note = CONT. FROM ABOVE: HLA-B*07:05H HLA-B*13:02H HLA-C*07:04H
  source 1..9: note = Severe acute respiratory syndrome coronavirus 2
MVTNNTFTL

SEQ ID NO: 1660 - protein, 9 aa, Severe acute respiratory syndrome-related coronavirus
  REGION 1..9: note = Table A: HLA-A*11:303M HLA-A*74:01H HLA-A*03:01H HLA-A*03:02H HLA-A*11:01H HLA-A*11:02H HLA-A*36:01M HLA-A*33:03H HLA-A*30:01H HLA-A*30:02M HLA-A*68:01H HLA-A*34:02H HLA-C*07:27H HLA-A*23:01H HLA-A*31:01H
  REGION 1..9: note = CONT. FROM ABOVE: HLA-A*66:01H
  source 1..9: note = Severe acute respiratory syndrome coronavirus 2
VTNNTFTLK

SEQ ID NO: 1661 - protein, 9 aa, Severe acute respiratory syndrome-related coronavirus
  REGION 1..9: note = Table A: HLA-A*03:01H HLA-A*03:02H HLA-A*30:01H HLA-A*34:02H
  source 1..9: note = Severe acute respiratory syndrome coronavirus 2
TLKGGAPTK

SEQ ID NO: 1662 - protein, 9 aa, Severe acute respiratory syndrome-related coronavirus
  REGION 1..9: note = Table A: HLA-B*48:01H HLA-B*58:01M HLA-A*11:303H HLA-B*44:05M HLA-B*46:01H HLA-C*15:05H HLA-B*35:01H HLA-B*38:02H HLA-B*40:02H HLA-B*07:02H HLA-B*15:01H HLA-B*15:02H HLA-B*15:03M HLA-B*07:05H HLA-B*41:02H
  REGION 1..9: note = CONT. FROM ABOVE: HLA-B*57:03M HLA-C*07:04H
  source 1..9: note = Severe acute respiratory syndrome coronavirus 2
GGAPTKVTF

SEQ ID NO: 1663 - protein, 9 aa, Severe acute respiratory syndrome-related coronavirus
  REGION 1..9: note = Table A: HLA-A*11:303M HLA-C*04:01H HLA-C*04:03M HLA-C*03:03H HLA-C*12:05H HLA-C*03:04H HLA-A*68:02H HLA-B*35:03M HLA-C*15:05H HLA-C*15:02H HLA-A*02:05H HLA-A*02:06H HLA-A*02:07M HLA-A*02:01H HLA-B*35:01H
  REGION 1..9: note = CONT. FROM ABOVE: HLA-B*35:02H HLA-C*08:01M HLA-C*08:02M HLA- B*38:02M HLA-B*39:01M HLA-C*05:01M HLA-B*13:02H HLA-C*07:04H
  source 1..9: note = Severe acute respiratory syndrome coronavirus 2
FGDDTVIEV

SEQ ID NO: 1664 - protein, 9 aa, Severe acute respiratory syndrome-related coronavirus
  REGION 1..9: note = Table A: HLA-A*25:01H HLA-A*26:01H HLA-A*26:02H HLA-A*26:03H HLA-B*18:01H HLA-A*68:01H HLA-A*34:02H HLA-B*35:01H HLA-B*38:02H HLA-B*15:02H HLA-B*07:05H
  source 1..9: note = Severe acute respiratory syndrome coronavirus 2
DTVIEVQGY

SEQ ID NO: 1665 - protein, 9 aa, Severe acute respiratory syndrome-related coronavirus
  REGION 1..9: note = Table A: HLA-A*03:01H HLA-A*03:02H HLA-A*11:01H HLA-A*11:02M HLA-A*30:02H HLA-A*68:01H HLA-A*34:01H HLA-A*34:02H HLA-C*07:27H HLA-A*66:01M
  source 1..9: note = Severe acute respiratory syndrome coronavirus 2
TVIEVQGYK

SEQ ID NO: 1666 - protein, 9 aa, Severe acute respiratory syndrome-related coronavirus
  REGION 1..9: note = Table A: HLA-B*45:01H HLA-B*40:02M HLA-B*40:06H HLA-B*41:02M HLA-B*49:01H HLA-B*50:01M
  source 1..9: note = Severe acute respiratory syndrome coronavirus 2
IEVQGYKSV

SEQ ID NO: 1667 - protein, 9 aa, Severe acute respiratory syndrome-related coronavirus
  REGION 1..9: note = Table A: HLA-C*14:03H HLA-A*24:02M HLA-A*24:07M HLA-A*23:01M HLA-B*15:01H
  source 1..9: note = Severe acute respiratory syndrome coronavirus 2
GYKSVNITF

SEQ ID NO: 1668 - protein, 9 aa, Severe acute respiratory syndrome-related coronavirus
  REGION 1..9: note = Table A: HLA-B*48:01H HLA-B*58:01H HLA-B*58:02H HLA-C*16:04H HLA-B*57:01H HLA-C*07:01H HLA-A*02:11H HLA-C*03:04H HLA-A*68:02M HLA-C*15:05H HLA-C*12:03H HLA-C*15:02H HLA-A*02:05H HLA-A*02:06H HLA-A*02:08M HLA-A*02:02H
  REGION 1..9: note = CONT. FROM ABOVE: HLA-C*08:01H HLA-A*32:01H HLA-B*40:06H HLA- B*57:03H HLA-B*13:02H HLA-C*07:04H
  source 1..9: note = Severe acute respiratory syndrome coronavirus 2
KSVNITFEL

SEQ ID NO: 1669 - protein, 9 aa, Severe acute respiratory syndrome-related coronavirus
  REGION 1..9: note = Table A: HLA-A*02:11M HLA-A*68:02H HLA-A*02:05H HLA-A*02:02H HLA-B*57:03M
  source 1..9: note = Severe acute respiratory syndrome coronavirus 2
ITFELDERI

SEQ ID NO: 1670 - protein, 9 aa, Severe acute respiratory syndrome-related coronavirus
  REGION 1..9: note = Table A: HLA-A*02:11H HLA-A*02:07H HLA-B*38:02H
  source 1..9: note = Severe acute respiratory syndrome coronavirus 2
ELDERIDKV

SEQ ID NO: 1671 - protein, 9 aa, Severe acute respiratory syndrome-related coronavirus
  REGION 1..9: note = Table A: HLA-A*03:01M HLA-A*03:02M HLA-A*11:01H HLA-A*11:02H HLA-A*36:01H
  source 1..9: note = Severe acute respiratory syndrome coronavirus 2
RIDKVLNEK

SEQ ID NO: 1672 - protein, 9 aa, Severe acute respiratory syndrome-related coronavirus
  REGION 1..9: note = Table A: HLA-A*11:303H HLA-A*03:01H HLA-B*46:01M HLA-A*30:02H HLA-B*38:02M HLA-B*15:01H HLA-B*15:02M
  source 1..9: note = Severe acute respiratory syndrome coronavirus 2
VLNEKCSAY

SEQ ID NO: 1673 - protein, 9 aa, Severe acute respiratory syndrome-related coronavirus
  REGION 1..9: note = Table A: HLA-A*11:303H HLA-C*16:04M HLA-B*46:01H HLA-A*26:01H HLA-C*03:03H HLA-C*12:05H HLA-A*02:11H HLA-C*03:02H HLA-C*03:04H HLA-A*68:02H HLA-C*15:05H HLA-C*12:03H HLA-C*15:02H HLA-A*02:05M HLA-A*02:06M
  REGION 1..9: note = CONT. FROM ABOVE: HLA-A*02:07H HLA-A*02:08H HLA-A*02:01H HLA- A*02:02H HLA-A*02:03H HLA-C*08:01H HLA-B*38:02M HLA-B*39:01H HLA-B*13:02H HLA-B*49:01H HLA-A*66:01H
  source 1..9: note = Severe acute respiratory syndrome coronavirus 2
YTVELGTEV

SEQ ID NO: 1674 - protein, 9 aa, Severe acute respiratory syndrome-related coronavirus
  REGION 1..9: note = Table A: HLA-A*26:02M HLA-A*26:03H HLA-B*38:02H HLA-B*15:02H
  source 1..9: note = Severe acute respiratory syndrome coronavirus 2
ELGTEVNEF

SEQ ID NO: 1675 - protein, 9 aa, Severe acute respiratory syndrome-related coronavirus
  REGION 1..9: note = Table A: HLA-B*44:05H HLA-B*45:01H HLA-B*40:01H HLA-B*40:02M HLA-B*40:06H HLA-B*41:02H HLA-B*49:01H HLA-B*50:01M
  source 1..9: note = Severe acute respiratory syndrome coronavirus 2
TEVNEFACV

SEQ ID NO: 1676 - protein, 9 aa, Severe acute respiratory syndrome-related coronavirus
  REGION 1..9: note = Table A: HLA-A*68:02M HLA-B*38:02H
  source 1..9: note = Severe acute respiratory syndrome coronavirus 2
EVNEFACVV

SEQ ID NO: 1677 - protein, 9 aa, Severe acute respiratory syndrome-related coronavirus
  REGION 1..9: note = Table A: HLA-A*11:01H
  source 1..9: note = Severe acute respiratory syndrome coronavirus 2
CVVADAVIK

SEQ ID NO: 1678 - protein, 9 aa, Severe acute respiratory syndrome-related coronavirus
  REGION 1..9: note = Table A: HLA-A*68:01H HLA-A*68:02H HLA-A*02:05M HLA-A*02:06H HLA-A*02:08M HLA-A*02:03H
  source 1..9: note = Severe acute respiratory syndrome coronavirus 2
VVADAVIKT

SEQ ID NO: 1679 - protein, 9 aa, Severe acute respiratory syndrome-related coronavirus
  REGION 1..9: note = Table A: HLA-B*58:01H HLA-B*58:02H HLA-A*11:303H HLA-C*16:01H HLA-C*16:04H HLA-C*04:03H HLA-C*03:03H HLA-C*12:05H HLA-A*02:11H HLA-B*53:01M HLA-C*03:02H HLA-C*03:04H HLA-A*68:02H HLA-B*35:03M HLA-C*15:05M
  REGION 1..9: note = CONT. FROM ABOVE: HLA-C*12:02H HLA-C*12:03M HLA-C*15:02M HLA- A*02:06H HLA-A*02:07H HLA-C*07:27M HLA-B*35:01H HLA-B*35:02M HLA-B*51:01H HLA-C*17:01H HLA-C*08:01H HLA-C*08:02H HLA-B*35 :12H HLA-B*38:01H HLA-B*38:02M HLA-B*07:04H HLA-B*07:05H
  REGION 1..9: note = CONT. FROM ABOVE: HLA-B*57:03H HLA-C*02:02H HLA-C*05:01M HLA- C*07:04H
  source 1..9: note = Severe acute respiratory syndrome coronavirus 2
VADAVIKTL

SEQ ID NO: 1680 - protein, 9 aa, Severe acute respiratory syndrome-related coronavirus
  REGION 1..9: note = Table A: HLA-A*11:303H HLA-B*46:01H HLA-A*26:03H HLA-A*02:11M HLA-A*68:02M HLA-C*15:05H HLA-A*02:04H HLA-A*02:05H HLA-A*02:06M HLA-A*02:07H HLA-A*02:08H HLA-B*14:01H HLA-A*02:01M HLA-A*02:02H HLA-A*02:03M
  REGION 1..9: note = CONT. FROM ABOVE: HLA-C*08:01H HLA-C*08:03H HLA-B*38:02M HLA- B*40:06H HLA-B*13:02H
  source 1..9: note = Severe acute respiratory syndrome coronavirus 2
AVIKTLQPV

SEQ ID NO: 1681 - protein, 9 aa, Severe acute respiratory syndrome-related coronavirus
  REGION 1..9: note = Table A: HLA-B*58:01H HLA-B*58:02H HLA-A*11:303H HLA-A*02:11H HLA-C*15:05H HLA-C*15:02H HLA-A*02:08H HLA-B*57:03H
  source 1..9: note = Severe acute respiratory syndrome coronavirus 2
KTLQPVSEL

SEQ ID NO: 1682 - protein, 9 aa, Severe acute respiratory syndrome-related coronavirus
  REGION 1..9: note = Table A: HLA-A*02:11H HLA-A*02:04H HLA-A*02:01H HLA-A*02:02M HLA-B*38:02H
  source 1..9: note = Severe acute respiratory syndrome coronavirus 2
TLQPVSELL

SEQ ID NO: 1683 - protein, 9 aa, Severe acute respiratory syndrome-related coronavirus
  REGION 1..9: note = Table A: HLA-B*44:05M HLA-B*44:03H HLA-B*40:02H HLA-B*13:02H HLA-B*49:01M
  source 1..9: note = Severe acute respiratory syndrome coronavirus 2
SELLTPLGI

SEQ ID NO: 1684 - protein, 9 aa, Severe acute respiratory syndrome-related coronavirus
  REGION 1..9: note = Table A: HLA-A*02:02H
  source 1..9: note = Severe acute respiratory syndrome coronavirus 2
LLTPLGIDL

SEQ ID NO: 1685 - protein, 9 aa, Severe acute respiratory syndrome-related coronavirus
  REGION 1..9: note = Table A: HLA-B*18:01H HLA-B*07:05H
  source 1..9: note = Severe acute respiratory syndrome coronavirus 2
DEWSMATYY

SEQ ID NO: 1686 - protein, 9 aa, Severe acute respiratory syndrome-related coronavirus
  REGION 1..9: note = Table A: HLA-C*14:02H HLA-C*14:03H HLA-A*11:303M HLA-A*25:01H HLA-B*46:01H HLA-A*26:01H HLA-A*26:02H HLA-A*26:03H HLA-A*29:01H HLA-A*29:02H HLA-C*03:03H HLA-B*53:01H HLA-C*03:02M HLA-C*03:04H HLA-B*35:03H
  REGION 1..9: note = CONT. FROM ABOVE: HLA-C*15:05H HLA-C*12:02H HLA-A*02:07H HLA- A*02:02H HLA-A*02:03H HLA-A*34:01H HLA-C*07:27H HLA-B*35:01M HLA-B*35:02H HLA-B*35:08H HLA-B*35:07M HLA-C*08:01H HLA-C*08 :02H HLA-B*38:01H HLA-B*38:02H HLA-B*15:01M HLA-B*15:02H
  REGION 1..9: note = CONT. FROM ABOVE: HLA-B*15:03H HLA-B*39:01M HLA-B*07:05H HLA- C*02:02H HLA-B*13:01H HLA-A*66:01H
  source 1..9: note = Severe acute respiratory syndrome coronavirus 2
YLFDESGEF

SEQ ID NO: 1687 - protein, 9 aa, Severe acute respiratory syndrome-related coronavirus
  REGION 1..9: note = Table A: HLA-A*36:01H
  source 1..9: note = Severe acute respiratory syndrome coronavirus 2
LFDESGEFK

SEQ ID NO: 1688 - protein, 9 aa, Severe acute respiratory syndrome-related coronavirus
  REGION 1..9: note = Table A: HLA-B*35:03H HLA-B*35:02H HLA-B*35:12H HLA-B*38:02H
  source 1..9: note = Severe acute respiratory syndrome coronavirus 2
FDESGEFKL

SEQ ID NO: 1689 - protein, 9 aa, Severe acute respiratory syndrome-related coronavirus
  REGION 1..9: note = Table A: HLA-B*45:01M HLA-B*50:01H
  source 1..9: note = Severe acute respiratory syndrome coronavirus 2
DESGEFKLA

SEQ ID NO: 1690 - protein, 9 aa, Severe acute respiratory syndrome-related coronavirus
  REGION 1..9: note = Table A: HLA-B*44:05H HLA-B*40:01M HLA-B*40:02M HLA-B*07:05H HLA-B*49:01H
  source 1..9: note = Severe acute respiratory syndrome coronavirus 2
GEFKLASHM

SEQ ID NO: 1691 - protein, 9 aa, Severe acute respiratory syndrome-related coronavirus
  REGION 1..9: note = Table A: HLA-A*30:02H HLA-B*15:02H
  source 1..9: note = Severe acute respiratory syndrome coronavirus 2
EFKLASHMY

SEQ ID NO: 1692 - protein, 9 aa, Severe acute respiratory syndrome-related coronavirus
  REGION 1..9: note = Table A: HLA-A*30:02H
  source 1..9: note = Severe acute respiratory syndrome coronavirus 2
ASHMYCSFY

SEQ ID NO: 1693 - protein, 9 aa, Severe acute respiratory syndrome-related coronavirus
  REGION 1..9: note = Table A: HLA-B*45:01H
  source 1..9: note = Severe acute respiratory syndrome coronavirus 2
EEEEFEPST

SEQ ID NO: 1694 - protein, 9 aa, Severe acute respiratory syndrome-related coronavirus
  REGION 1..9: note = Table A: HLA-B*44:02M HLA-B*44:05M HLA-C*16:04H HLA-B*45:01H HLA-B*44:03H HLA-B*18:01H HLA-B*27:02H HLA-B*35:01H HLA-B*38:02M HLA-B*15:01H HLA-B*15:02M HLA-B*15:03H HLA-B*07:05H HLA-B*15:11M HLA-B*50:01H
  source 1..9: note = Severe acute respiratory syndrome coronavirus 2
EEFEPSTQY

SEQ ID NO: 1695 - protein, 9 aa, Severe acute respiratory syndrome-related coronavirus
  REGION 1..9: note = Table A: HLA-B*46:01H HLA-A*29:01H HLA-A*29:02H HLA-B*18:01H HLA-C*07:01H HLA-B*07:05H
  source 1..9: note = Severe acute respiratory syndrome coronavirus 2
FEPSTQYEY

SEQ ID NO: 1696 - protein, 9 aa, Severe acute respiratory syndrome-related coronavirus
  REGION 1..9: note = Table A: HLA-B*18:01H HLA-B*27:02H HLA-B*39:01H HLA-B*07:05H
  source 1..9: note = Severe acute respiratory syndrome coronavirus 2
YEYGTEDDY

SEQ ID NO: 1697 - protein, 9 aa, Severe acute respiratory syndrome-related coronavirus
  REGION 1..9: note = Table A: HLA-A*11:01H
  source 1..9: note = Severe acute respiratory syndrome coronavirus 2
GTEDDYQGK

SEQ ID NO: 1698 - protein, 9 aa, Severe acute respiratory syndrome-related coronavirus
  REGION 1..9: note = Table A: HLA-B*45:01H HLA-B*50:01H
  source 1..9: note = Severe acute respiratory syndrome coronavirus 2
TEDDYQGKP

SEQ ID NO: 1699 - protein, 9 aa, Severe acute respiratory syndrome-related coronavirus
  REGION 1..9: note = Table A: HLA-C*14:02M HLA-C*14:03M HLA-A*33:01H HLA-A*33:03H HLA-A*29:01H HLA-C*07:01H HLA-C*07:02H HLA-C*15:05H HLA-A*24:02H HLA-A*24:07H HLA-C*08:01H HLA-A*23:01M HLA-B*38:02H HLA-B*39:01H HLA-B*07:05H
  source 1..9: note = Severe acute respiratory syndrome coronavirus 2
DYQGKPLEF

SEQ ID NO: 1700 - protein, 9 aa, Severe acute respiratory syndrome-related coronavirus
  REGION 1..9: note = Table A: HLA-B*39:06H
  source 1..9: note = Severe acute respiratory syndrome coronavirus 2
QGKPLEFGA

SEQ ID NO: 1701 - protein, 9 aa, Severe acute respiratory syndrome-related coronavirus
  REGION 1..9: note = Table A: HLA-B*56:01H HLA-B*55:02M HLA-C*15:05H HLA-B*55:01H HLA-B*54:01H HLA-B*07:05H
  source 1..9: note = Severe acute respiratory syndrome coronavirus 2
KPLEFGATS

SEQ ID NO: 1702 - protein, 9 aa, Severe acute respiratory syndrome-related coronavirus
  REGION 1..9: note = Table A: HLA-B*45:01H HLA-B*40:06H HLA-B*50:01H
  source 1..9: note = Severe acute respiratory syndrome coronavirus 2
LEFGATSAA

SEQ ID NO: 1703 - protein, 9 aa, Severe acute respiratory syndrome-related coronavirus
  REGION 1..9: note = Table A: HLA-B*44:05H HLA-B*45:01H HLA-B*44:03H HLA-B*38:02H HLA-B*40:01M HLA-B*40:02H HLA-B*41:02H HLA-B*49:01H
  source 1..9: note = Severe acute respiratory syndrome coronavirus 2
SEDNQTTTI

SEQ ID NO: 1704 - protein, 9 aa, Severe acute respiratory syndrome-related coronavirus
  REGION 1..9: note = Table A: HLA-C*15:05H HLA-A*02:05M HLA-A*02:06H HLA-B*52:01H HLA-B*38:01M HLA-B*38:02H HLA-B*39:01H HLA-B*13:01H HLA-B*13:02H
  source 1..9: note = Severe acute respiratory syndrome coronavirus 2
NQTTTIQTI

SEQ ID NO: 1705 - protein, 9 aa, Severe acute respiratory syndrome-related coronavirus
  REGION 1..9: note = Table A: HLA-A*68:02M HLA-C*15:02H
  source 1..9: note = Severe acute respiratory syndrome coronavirus 2
QTTTIQTIV

SEQ ID NO: 1706 - protein, 9 aa, Severe acute respiratory syndrome-related coronavirus
  REGION 1..9: note = Table A: HLA-A*11:303H HLA-C*16:04H HLA-A*11:01H HLA-A*26:01H HLA-A*26:02H HLA-A*26:03H HLA-C*12:05H HLA-A*02:11H HLA-A*68:01H HLA-A*68:02H HLA-C*15:05M HLA-C*12:03H HLA-C*15:02M HLA-A*02:04M HLA-A*02:05H
  REGION 1..9: note = CONT. FROM ABOVE: HLA-A*02:06H HLA-A*02:07H HLA-A*02:08H HLA- A*02:01M HLA-A*02:02H HLA-A*02:03M HLA-A*34:02H HLA-C*08:01H HLA-B*38:02M HLA-B*40:06H HLA-B*39:01H HLA-B*07:05H HLA-B*13 :02M
  source 1..9: note = Severe acute respiratory syndrome coronavirus 2
TTIQTIVEV

SEQ ID NO: 1707 - protein, 9 aa, Severe acute respiratory syndrome-related coronavirus
  REGION 1..9: note = Table A: HLA-B*48:01H HLA-B*58:01H HLA-A*11:303M HLA-B*44:05H HLA-C*03:03H HLA-A*02:11M HLA-C*03:04M HLA-A*68:02M HLA-B*35:03M HLA-C*15:05H HLA-A*02:04M HLA-A*02:05M HLA-A*02:06M HLA-A*02:07M HLA-A*02:08H
  REGION 1..9: note = CONT. FROM ABOVE: HLA-B*14:01H HLA-A*02:01H HLA-A*02:02M HLA- B*35:01M HLA-B*35:02M HLA-C*08:01M HLA-B*35:12M HLA-B*38:01H HLA-B*38:02M HLA-B*40:02H HLA-B*40:06H HLA-B*15:02H HLA-B*39 :01H HLA-B*07:05H HLA-B*41:02H HLA-B*57:03H HLA-B*13:02H
  REGION 1..9: note = CONT. FROM ABOVE: HLA-C*07:04H
  source 1..9: note = Severe acute respiratory syndrome coronavirus 2
TIVEVQPQL

SEQ ID NO: 1708 - protein, 9 aa, Severe acute respiratory syndrome-related coronavirus
  REGION 1..9: note = Table A: HLA-B*44:05M HLA-B*44:03H HLA-B*18:01H HLA-B*40:01M HLA-B*40:02M HLA-B*07:05H HLA-B*41:02M HLA-B*49:01M
  source 1..9: note = Severe acute respiratory syndrome coronavirus 2
VEVQPQLEM

SEQ ID NO: 1709 - protein, 9 aa, Severe acute respiratory syndrome-related coronavirus
  REGION 1..9: note = Table A: HLA-B*45:01H HLA-B*18:01H HLA-B*40:02H HLA-B*40:06H HLA-B*07:05H HLA-B*41:02H HLA-B*49:01M HLA-B*50:01M
  source 1..9: note = Severe acute respiratory syndrome coronavirus 2
LEMELTPVV

SEQ ID NO: 1710 - protein, 9 aa, Severe acute respiratory syndrome-related coronavirus
  REGION 1..9: note = Table A: HLA-B*44:05H HLA-A*25:01H HLA-A*68:02H HLA-A*02:04H HLA-A*02:05H HLA-A*02:02M HLA-A*02:03H HLA-A*24:02H HLA-B*38:01H HLA-B*38:02H HLA-B*13:02H
  source 1..9: note = Severe acute respiratory syndrome coronavirus 2
ELTPVVQTI

SEQ ID NO: 1711 - protein, 9 aa, Severe acute respiratory syndrome-related coronavirus
  REGION 1..9: note = Table A: HLA-B*42:01H HLA-B*56:01M HLA-B*53:01H HLA-B*55:02H HLA-B*35:03M HLA-C*15:05H HLA-B*55:01M HLA-B*35:01M HLA-B*35:02H HLA-B*51:01M HLA-B*35:07H HLA-C*08:01H HLA-B*35:12H HLA-B*38:02H HLA-B*39:06H HLA-B*54:01H
  REGION 1..9: note = CONT. FROM ABOVE: HLA-B*07:02H HLA-B*39:01H HLA-B*07:05M
  source 1..9: note = Severe acute respiratory syndrome coronavirus 2
TPVVQTIEV

SEQ ID NO: 1712 - protein, 9 aa, Severe acute respiratory syndrome-related coronavirus
  REGION 1..9: note = Table A: HLA-B*44:05H HLA-B*27:02H HLA-A*24:02H HLA-B*38:01H HLA-B*38:02H HLA-B*15:01H HLA-B*15:03H HLA-B*39:01H HLA-B*13:01H
  source 1..9: note = Severe acute respiratory syndrome coronavirus 2
VQTIEVNSF

SEQ ID NO: 1713 - protein, 9 aa, Severe acute respiratory syndrome-related coronavirus
  REGION 1..9: note = Table A: HLA-B*44:03H HLA-B*18:01M HLA-B*27:02H HLA-B*07:05H HLA-B*49:01H HLA-B*50:01H
  source 1..9: note = Severe acute respiratory syndrome coronavirus 2
IEVNSFSGY

SEQ ID NO: 1714 - protein, 9 aa, Severe acute respiratory syndrome-related coronavirus
  REGION 1..9: note = Table A: HLA-A*33:03H HLA-A*26:01H HLA-A*26:02H HLA-A*26:03H HLA-A*68:02M HLA-A*34:01M HLA-A*34:02H HLA-A*66:01M
  source 1..9: note = Severe acute respiratory syndrome coronavirus 2
EVNSFSGYL

SEQ ID NO: 1715 - protein, 9 aa, Severe acute respiratory syndrome-related coronavirus
  REGION 1..9: note = Table A: HLA-A*11:01H HLA-A*11:02H HLA-A*36:01H HLA-A*34:02H
  source 1..9: note = Severe acute respiratory syndrome coronavirus 2
VNSFSGYLK

SEQ ID NO: 1716 - protein, 9 aa, Severe acute respiratory syndrome-related coronavirus
  REGION 1..9: note = Table A: HLA-B*53:01H HLA-A*68:01H HLA-A*68:02H HLA-C*15:05H HLA-C*12:03H HLA-C*15:02M HLA-A*34:02H HLA-C*17:01H HLA-C*08:01H HLA-B*38:02H HLA-B*57:03H HLA-A*66:01H
  source 1..9: note = Severe acute respiratory syndrome coronavirus 2
NSFSGYLKL

SEQ ID NO: 1717 - protein, 9 aa, Severe acute respiratory syndrome-related coronavirus
  REGION 1..9: note = Table A: HLA-B*46:01H HLA-B*38:02M HLA-B*15:01M HLA-B*15:02H HLA-B*15:11H
  source 1..9: note = Severe acute respiratory syndrome coronavirus 2
YLKLTDNVY

SEQ ID NO: 1718 - protein, 9 aa, Severe acute respiratory syndrome-related coronavirus
  REGION 1..9: note = Table A: HLA-A*74:01H HLA-A*03:01H HLA-A*03:02M HLA-A*11:01H HLA-A*11:02H HLA-A*36:01H HLA-A*30:02H
  source 1..9: note = Severe acute respiratory syndrome coronavirus 2
KLTDNVYIK

SEQ ID NO: 1719 - protein, 9 aa, Severe acute respiratory syndrome-related coronavirus
  REGION 1..9: note = Table A: HLA-A*68:02H HLA-A*02:05H HLA-A*02:08M HLA-A*02:01H HLA-A*02:02H
  source 1..9: note = Severe acute respiratory syndrome coronavirus 2
KNADIVEEA

SEQ ID NO: 1720 - protein, 9 aa, Severe acute respiratory syndrome-related coronavirus
  REGION 1..9: note = Table A: HLA-B*35:02H HLA-B*35:12H
  source 1..9: note = Severe acute respiratory syndrome coronavirus 2
NADIVEEAK

SEQ ID NO: 1721 - protein, 9 aa, Severe acute respiratory syndrome-related coronavirus
  REGION 1..9: note = Table A: HLA-A*68:02H
  source 1..9: note = Severe acute respiratory syndrome coronavirus 2
DIVEEAKKV

SEQ ID NO: 1722 - protein, 9 aa, Severe acute respiratory syndrome-related coronavirus
  REGION 1..9: note = Table A: HLA-A*34:02H
  source 1..9: note = Severe acute respiratory syndrome coronavirus 2
IVEEAKKVK

SEQ ID NO: 1723 - protein, 9 aa, Severe acute respiratory syndrome-related coronavirus
  REGION 1..9: note = Table A: HLA-B*45:01H
  source 1..9: note = Severe acute respiratory syndrome coronavirus 2
VEEAKKVKP

SEQ ID NO: 1724 - protein, 9 aa, Severe acute respiratory syndrome-related coronavirus
  REGION 1..9: note = Table A: HLA-B*51:01H
  source 1..9: note = Severe acute respiratory syndrome coronavirus 2
EAKKVKPTV

SEQ ID NO: 1725 - protein, 9 aa, Severe acute respiratory syndrome-related coronavirus
  REGION 1..9: note = Table A: HLA-B*48:01H HLA-B*15:03M
  source 1..9: note = Severe acute respiratory syndrome coronavirus 2
KKVKPTVVV

SEQ ID NO: 1726 - protein, 9 aa, Severe acute respiratory syndrome-related coronavirus
  REGION 1..9: note = Table A: HLA-B*56:01H HLA-B*55:02H HLA-C*15:05M HLA-B*55:01H HLA-B*39:06M HLA-B*40:06H HLA-B*54:01M HLA-B*07:02H HLA-B*07:05H HLA-B*50:01H
  source 1..9: note = Severe acute respiratory syndrome coronavirus 2
KPTVVVNAA

SEQ ID NO: 1727 - protein, 9 aa, Severe acute respiratory syndrome-related coronavirus
  REGION 1..9: note = Table A: HLA-A*68:02H
  source 1..9: note = Severe acute respiratory syndrome coronavirus 2
TVVVNAANV

SEQ ID NO: 1728 - protein, 9 aa, Severe acute respiratory syndrome-related coronavirus
  REGION 1..9: note = Table A: HLA-A*30:02H HLA-B*35:01H HLA-B*38:02M HLA-B*15:01M HLA-B*15:02M HLA-B*07:05H
  source 1..9: note = Severe acute respiratory syndrome coronavirus 2
VVVNAANVY

SEQ ID NO: 1729 - protein, 9 aa, Severe acute respiratory syndrome-related coronavirus
  REGION 1..9: note = Table A: HLA-C*15:05H HLA-C*07:04H
  source 1..9: note = Severe acute respiratory syndrome coronavirus 2
VVNAANVYL

SEQ ID NO: 1730 - protein, 9 aa, Severe acute respiratory syndrome-related coronavirus
  REGION 1..9: note = Table A: HLA-A*03:02H HLA-A*11:01H HLA-A*11:02H HLA-A*34:02H
  source 1..9: note = Severe acute respiratory syndrome coronavirus 2
VNAANVYLK

SEQ ID NO: 1731 - protein, 9 aa, Severe acute respiratory syndrome-related coronavirus
  REGION 1..9: note = Table A: HLA-C*16:04M HLA-A*29:01H HLA-A*29:02H HLA-B*53:01M HLA-C*03:02H HLA-A*68:01M HLA-C*15:05H HLA-C*12:02H HLA-C*12:03H HLA-A*34:01H HLA-A*34:02H HLA-B*35:01M HLA-B*35:07M HLA-B*38:02H HLA-B*07:05H HLA-C*02:02H
  source 1..9: note = Severe acute respiratory syndrome coronavirus 2
NAANVYLKH

SEQ ID NO: 1732 - protein, 9 aa, Severe acute respiratory syndrome-related coronavirus
  REGION 1..9: note = Table A: HLA-B*55:01H HLA-A*02:03H HLA-B*38:02H
  source 1..9: note = Severe acute respiratory syndrome coronavirus 2
YLKHGGGVA

SEQ ID NO: 1733 - protein, 9 aa, Severe acute respiratory syndrome-related coronavirus
  REGION 1..9: note = Table A: HLA-B*35:03H HLA-C*15:05H HLA-B*35:01H HLA-B*35:02H HLA-C*08:03H HLA-B*38:02H HLA-B*39:01M HLA-B*07:05H
  source 1..9: note = Severe acute respiratory syndrome coronavirus 2
HGGGVAGAL

SEQ ID NO: 1734 - protein, 9 aa, Severe acute respiratory syndrome-related coronavirus
  REGION 1..9: note = Table A: HLA-A*11:01H
  source 1..9: note = Severe acute respiratory syndrome coronavirus 2
GGVAGALNK

SEQ ID NO: 1735 - protein, 9 aa, Severe acute respiratory syndrome-related coronavirus
  REGION 1..9: note = Table A: HLA-A*02:05H HLA-A*02:06H HLA-A*02:08H HLA-A*02:02M HLA-A*02:03M HLA-B*38:02H
  source 1..9: note = Severe acute respiratory syndrome coronavirus 2
GVAGALNKA

SEQ ID NO: 1736 - protein, 9 aa, Severe acute respiratory syndrome-related coronavirus
  REGION 1..9: note = Table A: HLA-A*02:02M HLA-A*02:03M HLA-B*38:02H
  source 1..9: note = Severe acute respiratory syndrome coronavirus 2
ALNKATNNA

SEQ ID NO: 1737 - protein, 9 aa, Severe acute respiratory syndrome-related coronavirus
  REGION 1..9: note = Table A: HLA-C*12:05H HLA-C*15:05H HLA-C*15:02H HLA-B*13:02H
  source 1..9: note = Severe acute respiratory syndrome coronavirus 2
KATNNAMQV

SEQ ID NO: 1738 - protein, 9 aa, Severe acute respiratory syndrome-related coronavirus
  REGION 1..9: note = Table A: HLA-A*30:02H HLA-B*15:01H HLA-B*39:01H
  source 1..9: note = Severe acute respiratory syndrome coronavirus 2
AMQVESDDY

SEQ ID NO: 1739 - protein, 9 aa, Severe acute respiratory syndrome-related coronavirus
  REGION 1..9: note = Table A: HLA-A*02:05H HLA-B*38:01M HLA-B*38:02M HLA-B*39:01H HLA-B*13:01M HLA-B*13:02H
  source 1..9: note = Severe acute respiratory syndrome coronavirus 2
MQVESDDYI

SEQ ID NO: 1740 - protein, 9 aa, Severe acute respiratory syndrome-related coronavirus
  REGION 1..9: note = Table A: HLA-B*35:02H
  source 1..9: note = Severe acute respiratory syndrome coronavirus 2
QVESDDYIA

SEQ ID NO: 1741 - protein, 9 aa, Severe acute respiratory syndrome-related coronavirus
  REGION 1..9: note = Table A: HLA-B*39:01H
  source 1..9: note = Severe acute respiratory syndrome coronavirus 2
DYIATNGPL

SEQ ID NO: 1742 - protein, 9 aa, Severe acute respiratory syndrome-related coronavirus
  REGION 1..9: note = Table A: HLA-A*11:303H HLA-A*03:01M HLA-A*03:02M HLA-A*11:01M HLA-A*11:02M HLA-A*36:01H HLA-A*68:01H HLA-A*34:01H HLA-A*34:02H HLA-C*07:27H HLA-A*66:01H
  source 1..9: note = Severe acute respiratory syndrome coronavirus 2
YIATNGPLK

SEQ ID NO: 1743 - protein, 9 aa, Severe acute respiratory syndrome-related coronavirus
  REGION 1..9: note = Table A: HLA-C*16:01H HLA-A*29:01H HLA-C*12:05H HLA-C*15:05M HLA-C*12:03H HLA-C*15:02H HLA-A*02:03H HLA-B*51:01M HLA-C*17:01H HLA-B*38:02H HLA-B*13:02M HLA-B*49:01H
  source 1..9: note = Severe acute respiratory syndrome coronavirus 2
IATNGPLKV

SEQ ID NO: 1744 - protein, 9 aa, Severe acute respiratory syndrome-related coronavirus
  REGION 1..9: note = Table A: HLA-C*15:05M HLA-B*07:02H HLA-B*07:05M
  source 1..9: note = Severe acute respiratory syndrome coronavirus 2
GPLKVGGSC

SEQ ID NO: 1745 - protein, 9 aa, Severe acute respiratory syndrome-related coronavirus
  REGION 1..9: note = Table A: HLA-A*11:303H HLA-C*03:04H HLA-C*08:01H
  source 1..9: note = Severe acute respiratory syndrome coronavirus 2
SCVLSGHNL

SEQ ID NO: 1746 - protein, 9 aa, Severe acute respiratory syndrome-related coronavirus
  REGION 1..9: note = Table A: HLA-A*03:01M HLA-A*03:02H HLA-A*11:01H HLA-A*11:02H HLA-A*36:01H HLA-A*34:02H
  source 1..9: note = Severe acute respiratory syndrome coronavirus 2
VLSGHNLAK

SEQ ID NO: 1747 - protein, 9 aa, Severe acute respiratory syndrome-related coronavirus
  REGION 1..9: note = Table A: HLA-B*38:02H HLA-B*15:10M
  source 1..9: note = Severe acute respiratory syndrome coronavirus 2
GHNLAKHCL

SEQ ID NO: 1748 - protein, 9 aa, Severe acute respiratory syndrome-related coronavirus
  REGION 1..9: note = Table A: HLA-A*02:02H
  source 1..9: note = Severe acute respiratory syndrome coronavirus 2
NLAKHCLHV

SEQ ID NO: 1749 - protein, 9 aa, Severe acute respiratory syndrome-related coronavirus
  REGION 1..9: note = Table A: HLA-A*02:11M HLA-A*02:04H HLA-A*02:07H HLA-A*02:01H HLA-A*02:02M HLA-A*02:03H HLA-B*38:02H HLA-B*13:02H
  source 1..9: note = Severe acute respiratory syndrome coronavirus 2
CLHVVGPNV

SEQ ID NO: 1750 - protein, 9 aa, Severe acute respiratory syndrome-related coronavirus
  REGION 1..9: note = Table A: HLA-B*39:01H
  source 1..9: note = Severe acute respiratory syndrome coronavirus 2
LHVVGPNVN

SEQ ID NO: 1751 - protein, 9 aa, Severe acute respiratory syndrome-related coronavirus
  REGION 1..9: note = Table A: HLA-A*11:303M HLA-A*74:01H HLA-A*03:01M HLA-A*03:02H HLA-A*11:01H HLA-A*11:02H HLA-A*36:01H HLA-A*33:01H HLA-A*33:03M HLA-A*26:03M HLA-B*27:05H HLA-A*30:01H HLA-A*30:02H HLA-A*68:01H HLA-A*68:02H
  REGION 1..9: note = CONT. FROM ABOVE: HLA-A*34:01H HLA-A*34:02H HLA-C*07:27M HLA- A*31:01H HLA-A*66:01H
  source 1..9: note = Severe acute respiratory syndrome coronavirus 2
HVVGPNVNK

SEQ ID NO: 1752 - protein, 9 aa, Severe acute respiratory syndrome-related coronavirus
  REGION 1..9: note = Table A: HLA-A*03:02H HLA-A*11:01H HLA-A*36:01M
  source 1..9: note = Severe acute respiratory syndrome coronavirus 2
KGEDIQLLK

SEQ ID NO: 1753 - protein, 9 aa, Severe acute respiratory syndrome-related coronavirus
  REGION 1..9: note = Table A: HLA-B*45:01H HLA-B*39:06H HLA-B*50:01H
  source 1..9: note = Severe acute respiratory syndrome coronavirus 2
EDIQLLKSA

SEQ ID NO: 1754 - protein, 9 aa, Severe acute respiratory syndrome-related coronavirus
  REGION 1..9: note = Table A: HLA-B*18:01H HLA-B*38:02H HLA-B*15:02M HLA-B*07:05H
  source 1..9: note = Severe acute respiratory syndrome coronavirus 2
DIQLLKSAY

SEQ ID NO: 1755 - protein, 9 aa, Severe acute respiratory syndrome-related coronavirus
  REGION 1..9: note = Table A: HLA-B*38:02H HLA-B*15:01H
  source 1..9: note = Severe acute respiratory syndrome coronavirus 2
LLKSAYENF

SEQ ID NO: 1756 - protein, 9 aa, Severe acute respiratory syndrome-related coronavirus
  REGION 1..9: note = Table A: HLA-A*11:303M HLA-C*16:04M HLA-A*03:01H HLA-A*11:01M HLA-A*11:02M HLA-B*46:01H HLA-C*03:02M HLA-A*68:01H HLA-C*15:05H HLA-C*12:02H HLA-C*12:03H HLA-A*34:02M HLA-C*07:27H HLA-B*35:01H HLA-C*08:01H
  REGION 1..9: note = CONT. FROM ABOVE: HLA-B*38:02H HLA-B*07:05H HLA-A*66:01H
  source 1..9: note = Severe acute respiratory syndrome coronavirus 2
SAYENFNQH

SEQ ID NO: 1757 - protein, 9 aa, Severe acute respiratory syndrome-related coronavirus
  REGION 1..9: note = Table A: HLA-B*44:02H HLA-B*44:05M HLA-C*16:04H HLA-B*45:01H HLA-B*44:03H HLA-B*18:01H HLA-A*02:11H HLA-A*68:02M HLA-C*15:02H HLA-A*02:05H HLA-A*02:02H HLA-C*08:01H HLA-B*37:01H HLA-B*38:02H HLA-B*40:01H HLA-B*40:02H
  REGION 1..9: note = CONT. FROM ABOVE: HLA-B*40:06M HLA-B*54:01H HLA-B*07:05H HLA- B*41:02H HLA-B*13:02H HLA-B*49:01H HLA-B*50:01M
  source 1..9: note = Severe acute respiratory syndrome coronavirus 2
YENFNQHEV

SEQ ID NO: 1758 - protein, 9 aa, Severe acute respiratory syndrome-related coronavirus
  REGION 1..9: note = Table A: HLA-A*68:02M HLA-B*14:02H
  source 1..9: note = Severe acute respiratory syndrome coronavirus 2
ENFNQHEVL

SEQ ID NO: 1759 - protein, 9 aa, Severe acute respiratory syndrome-related coronavirus
  REGION 1..9: note = Table A: HLA-C*04:03H HLA-A*02:02H HLA-A*24:07H
  source 1..9: note = Severe acute respiratory syndrome coronavirus 2
NFNQHEVLL

SEQ ID NO: 1760 - protein, 9 aa, Severe acute respiratory syndrome-related coronavirus
  REGION 1..9: note = Table A: HLA-B*39:06H
  source 1..9: note = Severe acute respiratory syndrome coronavirus 2
NQHEVLLAP

SEQ ID NO: 1761 - protein, 9 aa, Severe acute respiratory syndrome-related coronavirus
  REGION 1..9: note = Table A: HLA-B*38:02M HLA-B*39:01H
  source 1..9: note = Severe acute respiratory syndrome coronavirus 2
QHEVLLAPL

SEQ ID NO: 1762 - protein, 9 aa, Severe acute respiratory syndrome-related coronavirus
  REGION 1..9: note = Table A: HLA-B*44:05H HLA-B*44:03H HLA-B*40:01M HLA-B*40:02M HLA-B*40:06M HLA-B*41:02H HLA-B*49:01H
  source 1..9: note = Severe acute respiratory syndrome coronavirus 2
HEVLLAPLL

SEQ ID NO: 1763 - protein, 9 aa, Severe acute respiratory syndrome-related coronavirus
  REGION 1..9: note = Table A: HLA-A*11:303H HLA-A*02:01H HLA-A*02:03H HLA-B*38:02H HLA-B*54:01H
  source 1..9: note = Severe acute respiratory syndrome coronavirus 2
VLLAPLLSA

SEQ ID NO: 1764 - protein, 9 aa, Severe acute respiratory syndrome-related coronavirus
  REGION 1..9: note = Table A: HLA-C*15:05M HLA-B*35:01H HLA-B*07:02H HLA-B*07:05M
  source 1..9: note = Severe acute respiratory syndrome coronavirus 2
APLLSAGIF

SEQ ID NO: 1765 - protein, 9 aa, Severe acute respiratory syndrome-related coronavirus
  REGION 1..9: note = Table A: HLA-A*02:01H HLA-A*02:03H
  source 1..9: note = Severe acute respiratory syndrome coronavirus 2
LLSAGIFGA

SEQ ID NO: 1766 - protein, 9 aa, Severe acute respiratory syndrome-related coronavirus
  REGION 1..9: note = Table A: HLA-B*38:02H
  source 1..9: note = Severe acute respiratory syndrome coronavirus 2
AGIFGADPI

SEQ ID NO: 1767 - protein, 9 aa, Severe acute respiratory syndrome-related coronavirus
  REGION 1..9: note = Table A: HLA-B*48:01H HLA-A*11:303H HLA-C*16:01M HLA-C*16:04M HLA-B*46:01M HLA-C*06:02H HLA-B*08:01H HLA-C*04:03H HLA-C*03:03H HLA-C*12:05M HLA-A*02:11M HLA-C*03:02M HLA-C*03:04H HLA-A*68:02M HLA-B*35:03M
  REGION 1..9: note = CONT. FROM ABOVE: HLA-C*15:05H HLA-C*12:02M HLA-C*12:03M HLA- C*15:02H HLA-A*02:04M HLA-A*02:05H HLA-A*02:06H HLA-A*02:07H HLA-A*02:08H HLA-B*14:01H HLA-A*02:01H HLA-A*02:02H HLA-A*02 :03H HLA-A*34:01H HLA-C*07:27M HLA-B*35:01M HLA-B*35:02M
  REGION 1..9: note = CONT. FROM ABOVE: HLA-B*35:08H HLA-C*17:01M HLA-B*35:07H HLA- C*08:01H HLA-C*08:02M HLA-C*08:03H HLA-B*35:12H HLA-B*38:01H HLA-B*38:02M HLA-B*40:01H HLA-B*40:02H HLA-B*07:04H HLA-B*39 :01M HLA-B*41:02H HLA-B*57:03H HLA-C*02:02H HLA-B*15:10H
  REGION 1..9: note = CONT. FROM ABOVE: HLA-C*07:04M HLA-A*66:01H
  source 1..9: note = Severe acute respiratory syndrome coronavirus 2
FGADPIHSL

SEQ ID NO: 1768 - protein, 9 aa, Severe acute respiratory syndrome-related coronavirus
  REGION 1..9: note = Table A: HLA-A*33:03H HLA-A*68:01H HLA-A*34:01H HLA-A*34:02H HLA-A*66:01H
  source 1..9: note = Severe acute respiratory syndrome coronavirus 2
GADPIHSLR

SEQ ID NO: 1769 - protein, 9 aa, Severe acute respiratory syndrome-related coronavirus
  REGION 1..9: note = Table A: HLA-B*54:01H
  source 1..9: note = Severe acute respiratory syndrome coronavirus 2
DPIHSLRVC

SEQ ID NO: 1770 - protein, 9 aa, Severe acute respiratory syndrome-related coronavirus
  REGION 1..9: note = Table A: HLA-A*02:03H HLA-B*38:02M
  source 1..9: note = Severe acute respiratory syndrome coronavirus 2
SLRVCVDTV

SEQ ID NO: 1771 - protein, 9 aa, Severe acute respiratory syndrome-related coronavirus
  REGION 1..9: note = Table A: HLA-C*04:03H HLA-A*02:11M HLA-A*02:06H HLA-A*02:07M HLA-A*02:01H
  source 1..9: note = Severe acute respiratory syndrome coronavirus 2
CVDTVRTNV

SEQ ID NO: 1772 - protein, 9 aa, Severe acute respiratory syndrome-related coronavirus
  REGION 1..9: note = Table A: HLA-C*16:01H HLA-B*18:01H HLA-B*37:01H
  source 1..9: note = Severe acute respiratory syndrome coronavirus 2
VDTVRTNVY

SEQ ID NO: 1773 - protein, 9 aa, Severe acute respiratory syndrome-related coronavirus
  REGION 1..9: note = Table A: HLA-A*26:01H HLA-A*68:02M HLA-A*34:01H HLA-A*34:02H HLA-B*57:03H HLA-A*66:01M
  source 1..9: note = Severe acute respiratory syndrome coronavirus 2
DTVRTNVYL

SEQ ID NO: 1774 - protein, 9 aa, Severe acute respiratory syndrome-related coronavirus
  REGION 1..9: note = Table A: HLA-C*06:02H HLA-B*27:05H HLA-B*13:02H
  source 1..9: note = Severe acute respiratory syndrome coronavirus 2
VRTNVYLAV

SEQ ID NO: 1775 - protein, 9 aa, Severe acute respiratory syndrome-related coronavirus
  REGION 1..9: note = Table A: HLA-B*58:01M HLA-B*58:02M HLA-A*74:01H HLA-A*36:01H HLA-B*57:01M HLA-C*07:01H HLA-A*30:02H HLA-C*15:05H HLA-C*15:02M HLA-A*32:01H HLA-B*57:03H
  source 1..9: note = Severe acute respiratory syndrome coronavirus 2
RTNVYLAVF

SEQ ID NO: 1776 - protein, 9 aa, Severe acute respiratory syndrome-related coronavirus
  REGION 1..9: note = Table A: HLA-A*34:02M
  source 1..9: note = Severe acute respiratory syndrome coronavirus 2
NVYLAVFDK

SEQ ID NO: 1777 - protein, 9 aa, Severe acute respiratory syndrome-related coronavirus
  REGION 1..9: note = Table A: HLA-A*02:11H HLA-A*02:04H HLA-A*02:02H HLA-A*02:03H
  source 1..9: note = Severe acute respiratory syndrome coronavirus 2
YLAVFDKNL

SEQ ID NO: 1778 - protein, 9 aa, Severe acute respiratory syndrome-related coronavirus
  REGION 1..9: note = Table A: HLA-A*36:01H HLA-B*35:01H HLA-B*35:08H HLA-B*35:07M
  source 1..9: note = Severe acute respiratory syndrome coronavirus 2
LAVFDKNLY

SEQ ID NO: 1779 - protein, 9 aa, Severe acute respiratory syndrome-related coronavirus
  REGION 1..9: note = Table A: HLA-A*36:01H HLA-C*04:03H
  source 1..9: note = Severe acute respiratory syndrome coronavirus 2
VFDKNLYDK

SEQ ID NO: 1780 - protein, 9 aa, Severe acute respiratory syndrome-related coronavirus
  REGION 1..9: note = Table A: HLA-A*02:02H HLA-B*40:02H
  source 1..9: note = Severe acute respiratory syndrome coronavirus 2
FDKNLYDKL

SEQ ID NO: 1781 - protein, 9 aa, Severe acute respiratory syndrome-related coronavirus
  REGION 1..9: note = Table A: HLA-C*14:02H HLA-C*14:03H HLA-C*04:01M HLA-C*04:03H HLA-C*07:02H HLA-A*02:07H HLA-A*24:02M HLA-A*24:07M HLA-C*08:01H HLA-A*23:01H
  source 1..9: note = Severe acute respiratory syndrome coronavirus 2
LYDKLVSSF

SEQ ID NO: 1782 - protein, 9 aa, Severe acute respiratory syndrome-related coronavirus
  REGION 1..9: note = Table A: HLA-B*37:01H HLA-B*41:02H
  source 1..9: note = Severe acute respiratory syndrome coronavirus 2
YDKLVSSFL

SEQ ID NO: 1783 - protein, 9 aa, Severe acute respiratory syndrome-related coronavirus
  REGION 1..9: note = Table A: HLA-A*11:303H HLA-C*15:05H HLA-C*15:02H HLA-A*02:06H HLA-A*02:07H HLA-C*08:01H HLA-B*38:02H HLA-B*40:06H HLA-B*15:01H HLA-B*13:01H HLA-B*13:02H
  source 1..9: note = Severe acute respiratory syndrome coronavirus 2
KLVSSFLEM

SEQ ID NO: 1784 - protein, 9 aa, Severe acute respiratory syndrome-related coronavirus
  REGION 1..9: note = Table A: HLA-A*03:02H HLA-A*11:01H HLA-A*11:02M HLA-A*36:01H HLA-A*34:02M
  source 1..9: note = Severe acute respiratory syndrome coronavirus 2
LVSSFLEMK

SEQ ID NO: 1785 - protein, 9 aa, Severe acute respiratory syndrome-related coronavirus
  REGION 1..9: note = Table A: HLA-C*14:03H
  source 1..9: note = Severe acute respiratory syndrome coronavirus 2
SFLEMKSEK

SEQ ID NO: 1786 - protein, 9 aa, Severe acute respiratory syndrome-related coronavirus
  REGION 1..9: note = Table A: HLA-B*41:02H HLA-B*49:01M
  source 1..9: note = Severe acute respiratory syndrome coronavirus 2
LEMKSEKQV

SEQ ID NO: 1787 - protein, 9 aa, Severe acute respiratory syndrome-related coronavirus
  REGION 1..9: note = Table A: HLA-B*44:02M HLA-B*44:05H HLA-B*45:01H HLA-B*44:03M HLA-B*38:02H HLA-B*40:01H HLA-B*40:02H HLA-B*41:02H HLA-B*13:02M HLA-B*49:01H
  source 1..9: note = Severe acute respiratory syndrome coronavirus 2
SEKQVEQKI

SEQ ID NO: 1788 - protein, 9 aa, Severe acute respiratory syndrome-related coronavirus
  REGION 1..9: note = Table A: HLA-A*68:02H HLA-A*02:05H HLA-A*02:08H HLA-B*38:02H
  source 1..9: note = Severe acute respiratory syndrome coronavirus 2
QVEQKIAEI

SEQ ID NO: 1789 - protein, 9 aa, Severe acute respiratory syndrome-related coronavirus
  REGION 1..9: note = Table A: HLA-B*45:01M HLA-B*40:06H
  source 1..9: note = Severe acute respiratory syndrome coronavirus 2
VEQKIAEIP

SEQ ID NO: 1790 - protein, 9 aa, Severe acute respiratory syndrome-related coronavirus
  REGION 1..9: note = Table A: HLA-C*04:03H HLA-C*08:01H HLA-C*08:02H HLA-C*05:01H
  source 1..9: note = Severe acute respiratory syndrome coronavirus 2
IAEIPKEEV

SEQ ID NO: 1791 - protein, 9 aa, Severe acute respiratory syndrome-related coronavirus
  REGION 1..9: note = Table A: HLA-B*45:01H
  source 1..9: note = Severe acute respiratory syndrome coronavirus 2
AEIPKEEVK

SEQ ID NO: 1792 - protein, 9 aa, Severe acute respiratory syndrome-related coronavirus
  REGION 1..9: note = Table A: HLA-B*42:01H HLA-B*35:07H HLA-B*07:04M
  source 1..9: note = Severe acute respiratory syndrome coronavirus 2
IPKEEVKPF

SEQ ID NO: 1793 - protein, 9 aa, Severe acute respiratory syndrome-related coronavirus
  REGION 1..9: note = Table A: HLA-A*26:01H HLA-A*26:03H
  source 1..9: note = Severe acute respiratory syndrome coronavirus 2
EVKPFITES

SEQ ID NO: 1794 - protein, 9 aa, Severe acute respiratory syndrome-related coronavirus
  REGION 1..9: note = Table A: HLA-A*11:303H HLA-C*16:01H HLA-C*03:03H HLA-A*02:11M HLA-C*03:02H HLA-C*03:04H HLA-A*02:04H HLA-A*02:06M HLA-A*02:07H HLA-B*14:01H HLA-A*02:01H HLA-A*02:02H HLA-A*02:03H HLA-C*08:01H HLA-B*38:02H
  REGION 1..9: note = CONT. FROM ABOVE: HLA-B*13:02H
  source 1..9: note = Severe acute respiratory syndrome coronavirus 2
FITESKPSV

SEQ ID NO: 1795 - protein, 9 aa, Severe acute respiratory syndrome-related coronavirus
  REGION 1..9: note = Table A: HLA-A*33:01M HLA-A*33:03H HLA-A*26:03H HLA-A*68:01M HLA-A*68:02H HLA-A*34:01M HLA-A*34:02H HLA-A*31:01H HLA-A*66:01M
  source 1..9: note = Severe acute respiratory syndrome coronavirus 2
ESKPSVEQR

SEQ ID NO: 1796 - protein, 9 aa, Severe acute respiratory syndrome-related coronavirus
  REGION 1..9: note = Table A: HLA-B*13:01H
  source 1..9: note = Severe acute respiratory syndrome coronavirus 2
KQDDKKIKA

SEQ ID NO: 1797 - protein, 9 aa, Severe acute respiratory syndrome-related coronavirus
  REGION 1..9: note = Table A: HLA-A*02:08H HLA-A*02:03H
  source 1..9: note = Severe acute respiratory syndrome coronavirus 2
KIKACVEEV

SEQ ID NO: 1798 - protein, 9 aa, Severe acute respiratory syndrome-related coronavirus
  REGION 1..9: note = Table A: HLA-A*11:303M HLA-C*04:03M HLA-A*02:11H HLA-A*68:02H HLA-B*35:03H HLA-C*15:05H HLA-A*02:05M HLA-A*02:06H HLA-A*02:07M HLA-A*02:08H HLA-A*02:01H HLA-A*02:02H HLA-B*35:02H HLA-C*08:01H HLA-C*08:02M
  REGION 1..9: note = CONT. FROM ABOVE: HLA-B*35:12H HLA-B*38:02H HLA-B*39:01H HLA- B*07:05H HLA-C*05:01H
  source 1..9: note = Severe acute respiratory syndrome coronavirus 2
CVEEVTTTL

SEQ ID NO: 1799 - protein, 9 aa, Severe acute respiratory syndrome-related coronavirus
  REGION 1..9: note = Table A: HLA-A*11:01H
  source 1..9: note = Severe acute respiratory syndrome coronavirus 2
VTTTLEETK

SEQ ID NO: 1800 - protein, 9 aa, Severe acute respiratory syndrome-related coronavirus
  REGION 1..9: note = Table A: HLA-B*58:01H HLA-B*35:02H HLA-B*35:08H HLA-B*57:03H
  source 1..9: note = Severe acute respiratory syndrome coronavirus 2
TTTLEETKF

SEQ ID NO: 1801 - protein, 9 aa, Severe acute respiratory syndrome-related coronavirus
  REGION 1..9: note = Table A: HLA-A*68:02H
  source 1..9: note = Severe acute respiratory syndrome coronavirus 2
TTLEETKFL

SEQ ID NO: 1802 - protein, 9 aa, Severe acute respiratory syndrome-related coronavirus
  REGION 1..9: note = Table A: HLA-B*45:01H
  source 1..9: note = Severe acute respiratory syndrome coronavirus 2
EETKFLTEN

SEQ ID NO: 1803 - protein, 9 aa, Severe acute respiratory syndrome-related coronavirus
  REGION 1..9: note = Table A: HLA-A*33:03H HLA-A*68:02M
  source 1..9: note = Severe acute respiratory syndrome coronavirus 2
ETKFLTENL

SEQ ID NO: 1804 - protein, 9 aa, Severe acute respiratory syndrome-related coronavirus
  REGION 1..9: note = Table A: HLA-A*24:07M HLA-A*23:01H
  source 1..9: note = Severe acute respiratory syndrome coronavirus 2
KFLTENLLL

SEQ ID NO: 1805 - protein, 9 aa, Severe acute respiratory syndrome-related coronavirus
  REGION 1..9: note = Table A: HLA-A*29:01H HLA-A*29:02M HLA-B*38:02H
  source 1..9: note = Severe acute respiratory syndrome coronavirus 2
FLTENLLLY

SEQ ID NO: 1806 - protein, 9 aa, Severe acute respiratory syndrome-related coronavirus
  REGION 1..9: note = Table A: HLA-C*14:02H HLA-C*14:03M HLA-A*29:02H HLA-A*30:02H HLA-A*24:02M HLA-A*24:07H HLA-C*08:01H HLA-A*23:01M HLA-B*39:01H
  source 1..9: note = Severe acute respiratory syndrome coronavirus 2
LYIDINGNL

SEQ ID NO: 1807 - protein, 9 aa, Severe acute respiratory syndrome-related coronavirus
  REGION 1..9: note = Table A: HLA-C*04:03H
  source 1..9: note = Severe acute respiratory syndrome coronavirus 2
YIDINGNLH

SEQ ID NO: 1808 - protein, 9 aa, Severe acute respiratory syndrome-related coronavirus
  REGION 1..9: note = Table A: HLA-B*50:01H
  source 1..9: note = Severe acute respiratory syndrome coronavirus 2
IDINGNLHP

SEQ ID NO: 1809 - protein, 9 aa, Severe acute respiratory syndrome-related coronavirus
  REGION 1..9: note = Table A: HLA-B*39:06H
  source 1..9: note = Severe acute respiratory syndrome coronavirus 2
NGNLHPDSA

SEQ ID NO: 1810 - protein, 9 aa, Severe acute respiratory syndrome-related coronavirus
  REGION 1..9: note = Table A: HLA-A*11:303H HLA-B*35:03H HLA-A*02:05H HLA-B*14:01H HLA-A*02:02H HLA-A*02:03H HLA-B*35:02H HLA-C*08:01H HLA-B*35:12H HLA-B*38:01H HLA-B*38:02M HLA-B*15:02H HLA-B*39:01H HLA-B*15:10H
  source 1..9: note = Severe acute respiratory syndrome coronavirus 2
NLHPDSATL

SEQ ID NO: 1811 - protein, 9 aa, Severe acute respiratory syndrome-related coronavirus
  REGION 1..9: note = Table A: HLA-B*38:02H
  source 1..9: note = Severe acute respiratory syndrome coronavirus 2
LHPDSATLV

SEQ ID NO: 1812 - protein, 9 aa, Severe acute respiratory syndrome-related coronavirus
  REGION 1..9: note = Table A: HLA-B*58:01H HLA-C*16:04H HLA-B*53:01H HLA-A*68:02H HLA-B*35:03M HLA-A*02:05H HLA-A*02:06H HLA-A*02:07H HLA-A*02:08H HLA-A*02:02H HLA-B*35:01M HLA-B*35:02M HLA-B*35:08H HLA-B*35:07H HLA-B*35:12M HLA-B*38:01H
  REGION 1..9: note = CONT. FROM ABOVE: HLA-B*38:02H HLA-B*15:01H HLA-B*15:02H HLA- B*57:03M HLA-B*13:01H
  source 1..9: note = Severe acute respiratory syndrome coronavirus 2
LVSDIDITF

SEQ ID NO: 1813 - protein, 9 aa, Severe acute respiratory syndrome-related coronavirus
  REGION 1..9: note = Table A: HLA-C*04:03H HLA-A*02:07H HLA-C*17:01H HLA-C*08:01H HLA-C*08:02M HLA-C*05:01M
  source 1..9: note = Severe acute respiratory syndrome coronavirus 2
VSDIDITFL

SEQ ID NO: 1814 - protein, 9 aa, Severe acute respiratory syndrome-related coronavirus
  REGION 1..9: note = Table A: HLA-B*27:02H
  source 1..9: note = Severe acute respiratory syndrome coronavirus 2
SDIDITFLK

SEQ ID NO: 1815 - protein, 9 aa, Severe acute respiratory syndrome-related coronavirus
  REGION 1..9: note = Table A: HLA-A*36:01H HLA-A*34:02M
  source 1..9: note = Severe acute respiratory syndrome coronavirus 2
DIDITFLKK

SEQ ID NO: 1816 - protein, 9 aa, Severe acute respiratory syndrome-related coronavirus
  REGION 1..9: note = Table A: HLA-B*08:01H HLA-A*02:11H HLA-A*02:04H HLA-A*02:02M HLA-A*02:03H HLA-B*38:02H
  source 1..9: note = Severe acute respiratory syndrome coronavirus 2
FLKKDAPYI

SEQ ID NO: 1817 - protein, 9 aa, Severe acute respiratory syndrome-related coronavirus
  REGION 1..9: note = Table A: HLA-A*26:01H HLA-A*68:02H HLA-B*51:01M
  source 1..9: note = Severe acute respiratory syndrome coronavirus 2
DAPYIVGDV

SEQ ID NO: 1818 - protein, 9 aa, Severe acute respiratory syndrome-related coronavirus
  REGION 1..9: note = Table A: HLA-B*42:01H HLA-B*56:01M HLA-B*55:02H HLA-B*35:03H HLA-C*15:05H HLA-B*55:01M HLA-B*35:02H HLA-B*51:01M HLA-C*08:01H HLA-B*38:02H HLA-B*39:06H HLA-B*54:01M HLA-B*07:02M HLA-B*07:04H HLA-B*07:05M
  source 1..9: note = Severe acute respiratory syndrome coronavirus 2
APYIVGDVV

SEQ ID NO: 1819 - protein, 9 aa, Severe acute respiratory syndrome-related coronavirus
  REGION 1..9: note = Table A: HLA-A*02:07H
  source 1..9: note = Severe acute respiratory syndrome coronavirus 2
VGDVVQEGV

SEQ ID NO: 1820 - protein, 9 aa, Severe acute respiratory syndrome-related coronavirus
  REGION 1..9: note = Table A: HLA-B*40:01H HLA-B*40:02H HLA-B*41:02H
  source 1..9: note = Severe acute respiratory syndrome coronavirus 2
GDVVQEGVL

SEQ ID NO: 1821 - protein, 9 aa, Severe acute respiratory syndrome-related coronavirus
  REGION 1..9: note = Table A: HLA-A*11:303H HLA-B*55:02H HLA-B*55:01H HLA-A*02:05H HLA-A*02:06H HLA-A*02:08H HLA-A*02:01H HLA-A*02:03H HLA-B*38:02H
  source 1..9: note = Severe acute respiratory syndrome coronavirus 2
VVQEGVLTA

SEQ ID NO: 1822 - protein, 9 aa, Severe acute respiratory syndrome-related coronavirus
  REGION 1..9: note = Table A: HLA-A*02:05H HLA-A*02:06H HLA-A*02:01H HLA-B*52:01H HLA-B*38:02H HLA-B*39:01H HLA-B*13:02M
  source 1..9: note = Severe acute respiratory syndrome coronavirus 2
VQEGVLTAV

SEQ ID NO: 1823 - protein, 9 aa, Severe acute respiratory syndrome-related coronavirus
  REGION 1..9: note = Table A: HLA-B*49:01H
  source 1..9: note = Severe acute respiratory syndrome coronavirus 2
QEGVLTAVV

SEQ ID NO: 1824 - protein, 9 aa, Severe acute respiratory syndrome-related coronavirus
  REGION 1..9: note = Table A: HLA-A*02:01H
  source 1..9: note = Severe acute respiratory syndrome coronavirus 2
VLTAVVIPT

SEQ ID NO: 1825 - protein, 9 aa, Severe acute respiratory syndrome-related coronavirus
  REGION 1..9: note = Table A: HLA-A*11:303M HLA-A*74:01H HLA-A*03:01M HLA-A*03:02M HLA-A*11:01H HLA-A*11:02M HLA-A*36:01H HLA-B*57:01H HLA-A*30:01H HLA-A*30:02H HLA-A*68:01M HLA-A*68:02H HLA-A*34:02H HLA-C*07:27H HLA-B*57:03H
  source 1..9: note = Severe acute respiratory syndrome coronavirus 2
LTAVVIPTK

SEQ ID NO: 1826 - protein, 9 aa, Severe acute respiratory syndrome-related coronavirus
  REGION 1..9: note = Table A: HLA-A*68:01M HLA-A*34:01H HLA-A*34:02M HLA-A*66:01H
  source 1..9: note = Severe acute respiratory syndrome coronavirus 2
TAVVIPTKK

SEQ ID NO: 1827 - protein, 9 aa, Severe acute respiratory syndrome-related coronavirus
  REGION 1..9: note = Table A: HLA-A*02:08H
  source 1..9: note = Severe acute respiratory syndrome coronavirus 2
AVVIPTKKA

SEQ ID NO: 1828 - protein, 9 aa, Severe acute respiratory syndrome-related coronavirus
  REGION 1..9: note = Table A: HLA-B*15:03M
  source 1..9: note = Severe acute respiratory syndrome coronavirus 2
KKAGGTTEM

SEQ ID NO: 1829 - protein, 9 aa, Severe acute respiratory syndrome-related coronavirus
  REGION 1..9: note = Table A: HLA-C*15:05H
  source 1..9: note = Severe acute respiratory syndrome coronavirus 2
KAGGTTEML

SEQ ID NO: 1830 - protein, 9 aa, Severe acute respiratory syndrome-related coronavirus
  REGION 1..9: note = Table A: HLA-A*11:01H HLA-A*36:01H
  source 1..9: note = Severe acute respiratory syndrome coronavirus 2
GGTTEMLAK

SEQ ID NO: 1831 - protein, 9 aa, Severe acute respiratory syndrome-related coronavirus
  REGION 1..9: note = Table A: HLA-A*02:05M HLA-A*02:06H HLA-A*02:08M HLA-A*02:02H
  source 1..9: note = Severe acute respiratory syndrome coronavirus 2
GTTEMLAKA

SEQ ID NO: 1832 - protein, 9 aa, Severe acute respiratory syndrome-related coronavirus
  REGION 1..9: note = Table A: HLA-A*34:02M
  source 1..9: note = Severe acute respiratory syndrome coronavirus 2
EMLAKALRK

SEQ ID NO: 1833 - protein, 9 aa, Severe acute respiratory syndrome-related coronavirus
  REGION 1..9: note = Table A: HLA-A*02:11H HLA-A*02:02M HLA-A*02:03M HLA-B*38:02H
  source 1..9: note = Severe acute respiratory syndrome coronavirus 2
MLAKALRKV

SEQ ID NO: 1834 - protein, 9 aa, Severe acute respiratory syndrome-related coronavirus
  REGION 1..9: note = Table A: HLA-B*27:05H HLA-C*07:02H HLA-B*27:02H HLA-A*30:02H HLA-B*38:02H
  source 1..9: note = Severe acute respiratory syndrome coronavirus 2
LRKVPTDNY

SEQ ID NO: 1835 - protein, 9 aa, Severe acute respiratory syndrome-related coronavirus
  REGION 1..9: note = Table A: HLA-B*38:02H HLA-B*15:03H
  source 1..9: note = Severe acute respiratory syndrome coronavirus 2
RKVPTDNYI

SEQ ID NO: 1836 - protein, 9 aa, Severe acute respiratory syndrome-related coronavirus
  REGION 1..9: note = Table A: HLA-B*56:01H HLA-B*55:02M HLA-C*15:05H HLA-B*54:01H
  source 1..9: note = Severe acute respiratory syndrome coronavirus 2
VPTDNYITT

SEQ ID NO: 1837 - protein, 9 aa, Severe acute respiratory syndrome-related coronavirus
  REGION 1..9: note = Table A: HLA-B*58:01H HLA-A*36:01M HLA-A*01:01H
  source 1..9: note = Severe acute respiratory syndrome coronavirus 2
PTDNYITTY

SEQ ID NO: 1838 - protein, 9 aa, Severe acute respiratory syndrome-related coronavirus
  REGION 1..9: note = Table A: HLA-A*11:303H HLA-C*03:03M HLA-C*03:04M HLA-A*68:02H HLA-C*15:05H HLA-C*08:01H HLA-C*08:03H HLA-A*66:01H
  source 1..9: note = Severe acute respiratory syndrome coronavirus 2
ITTYPGQGL

SEQ ID NO: 1839 - protein, 9 aa, Severe acute respiratory syndrome-related coronavirus
  REGION 1..9: note = Table A: HLA-B*35:01M HLA-B*35:08H HLA-B*35:07M HLA-B*38:02H HLA-B*07:05H HLA-B*15:11H
  source 1..9: note = Severe acute respiratory syndrome coronavirus 2
YPGQGLNGY

SEQ ID NO: 1840 - protein, 9 aa, Severe acute respiratory syndrome-related coronavirus
  REGION 1..9: note = Table A: HLA-B*13:02M
  source 1..9: note = Severe acute respiratory syndrome coronavirus 2
GQGLNGYTV

SEQ ID NO: 1841 - protein, 9 aa, Severe acute respiratory syndrome-related coronavirus
  REGION 1..9: note = Table A: HLA-A*11:303H HLA-C*12:05H HLA-A*02:11H HLA-C*03:04H HLA-A*68:02M HLA-C*15:05H HLA-C*12:03H HLA-C*15:02H HLA-A*02:05M HLA-A*02:06M HLA-A*02:08H HLA-A*02:02H HLA-A*02:03H HLA-C*08:01H HLA-B*38:02H
  source 1..9: note = Severe acute respiratory syndrome coronavirus 2
YTVEEAKTV

SEQ ID NO: 1842 - protein, 9 aa, Severe acute respiratory syndrome-related coronavirus
  REGION 1..9: note = Table A: HLA-A*11:303H HLA-C*04:03H HLA-C*03:04H HLA-B*35:03H HLA-C*15:05M HLA-C*01:02H HLA-A*02:05H HLA-B*14:01H HLA-B*35:01H HLA-B*35:02H HLA-B*35:08H HLA-C*08:01H HLA-C*08:02M HLA-B*35:12H HLA-B*38:01H
  REGION 1..9: note = CONT. FROM ABOVE: HLA-B*38:02M HLA-B*40:01H HLA-B*07:02H HLA- B*07:04H HLA-B*15:02M HLA-B*39:01M HLA-B*07:05H HLA-B*41:02H HLA-C*05:01H HLA-B*15:10H HLA-C*07:04H
  source 1..9: note = Severe acute respiratory syndrome coronavirus 2
TVEEAKTVL

SEQ ID NO: 1843 - protein, 9 aa, Severe acute respiratory syndrome-related coronavirus
  REGION 1..9: note = Table A: HLA-B*49:01H
  source 1..9: note = Severe acute respiratory syndrome coronavirus 2
VEEAKTVLK

SEQ ID NO: 1844 - protein, 9 aa, Severe acute respiratory syndrome-related coronavirus
  REGION 1..9: note = Table A: HLA-A*68:01H HLA-A*34:01H HLA-A*34:02M
  source 1..9: note = Severe acute respiratory syndrome coronavirus 2
EEAKTVLKK

SEQ ID NO: 1845 - protein, 9 aa, Severe acute respiratory syndrome-related coronavirus
  REGION 1..9: note = Table A: HLA-C*12:05H HLA-A*02:11H HLA-C*03:02H HLA-A*68:02H HLA-C*12:03H HLA-A*02:04H HLA-B*51:01H HLA-C*08:01H HLA-B*38:02H HLA-B*54:01H HLA-B*57:03H
  source 1..9: note = Severe acute respiratory syndrome coronavirus 2
SAFYILPSI

SEQ ID NO: 1846 - protein, 9 aa, Severe acute respiratory syndrome-related coronavirus
  REGION 1..9: note = Table A: HLA-C*14:03H HLA-B*52:01H
  source 1..9: note = Severe acute respiratory syndrome coronavirus 2
AFYILPSII

SEQ ID NO: 1847 - protein, 9 aa, Severe acute respiratory syndrome-related coronavirus
  REGION 1..9: note = Table A: HLA-A*34:02H
  source 1..9: note = Severe acute respiratory syndrome coronavirus 2
LPSIISNEK

SEQ ID NO: 1848 - protein, 9 aa, Severe acute respiratory syndrome-related coronavirus
  REGION 1..9: note = Table A: HLA-B*13:01H HLA-B*13:02H
  source 1..9: note = Severe acute respiratory syndrome coronavirus 2
IISNEKQEI

SEQ ID NO: 1849 - protein, 9 aa, Severe acute respiratory syndrome-related coronavirus
  REGION 1..9: note = Table A: HLA-B*58:01H HLA-B*58:02H HLA-C*16:01H HLA-C*03:04H HLA-C*15:05H HLA-C*15:02H HLA-B*57:03M
  source 1..9: note = Severe acute respiratory syndrome coronavirus 2
ISNEKQEIL

SEQ ID NO: 1850 - protein, 9 aa, Severe acute respiratory syndrome-related coronavirus
  REGION 1..9: note = Table A: HLA-B*45:01H
  source 1..9: note = Severe acute respiratory syndrome coronavirus 2
NEKQEILGT

SEQ ID NO: 1851 - protein, 9 aa, Severe acute respiratory syndrome-related coronavirus
  REGION 1..9: note = Table A: HLA-B*58:01H HLA-B*44:02H HLA-B*44:05H HLA-C*16:04M HLA-B*45:01M HLA-B*44:03H HLA-B*18:01H HLA-B*27:02H HLA-B*15:13H HLA-B*38:02H HLA-B*40:01H HLA-B*40:02H HLA-B*07:05H HLA-B*41:02H HLA-B*49:01H HLA-B*50:01H
  source 1..9: note = Severe acute respiratory syndrome coronavirus 2
QEILGTVSW

SEQ ID NO: 1852 - protein, 9 aa, Severe acute respiratory syndrome-related coronavirus
  REGION 1..9: note = Table A: HLA-A*02:11M HLA-A*02:04M HLA-A*02:07H HLA-A*02:01M HLA-A*02:02H HLA-B*38:02H
  source 1..9: note = Severe acute respiratory syndrome coronavirus 2
ILGTVSWNL

SEQ ID NO: 1853 - protein, 9 aa, Severe acute respiratory syndrome-related coronavirus
  REGION 1..9: note = Table A: HLA-C*16:01H HLA-B*07:04H
  source 1..9: note = Severe acute respiratory syndrome coronavirus 2
TVSWNLREM

SEQ ID NO: 1854 - protein, 9 aa, Severe acute respiratory syndrome-related coronavirus
  REGION 1..9: note = Table A: HLA-A*02:11M HLA-B*57:03M
  source 1..9: note = Severe acute respiratory syndrome coronavirus 2
VSWNLREML

SEQ ID NO: 1855 - protein, 9 aa, Severe acute respiratory syndrome-related coronavirus
  REGION 1..9: note = Table A: HLA-A*02:02H HLA-A*02:03M HLA-B*38:02H
  source 1..9: note = Severe acute respiratory syndrome coronavirus 2
NLREMLAHA

SEQ ID NO: 1856 - protein, 9 aa, Severe acute respiratory syndrome-related coronavirus
  REGION 1..9: note = Table A: HLA-A*34:01H
  source 1..9: note = Severe acute respiratory syndrome coronavirus 2
MLAHAEETR

SEQ ID NO: 1857 - protein, 9 aa, Severe acute respiratory syndrome-related coronavirus
  REGION 1..9: note = Table A: HLA-B*38:01M HLA-B*38:02H HLA-B*39:01M HLA-B*15:10H
  source 1..9: note = Severe acute respiratory syndrome coronavirus 2
AHAEETRKL

SEQ ID NO: 1858 - protein, 9 aa, Severe acute respiratory syndrome-related coronavirus
  REGION 1..9: note = Table A: HLA-B*53:01M HLA-B*35:03H HLA-B*35:01H HLA-B*35:02H HLA-B*35:07H HLA-B*35:12H HLA-B*38:02H
  source 1..9: note = Severe acute respiratory syndrome coronavirus 2
HAEETRKLM

SEQ ID NO: 1859 - protein, 9 aa, Severe acute respiratory syndrome-related coronavirus
  REGION 1..9: note = Table A: HLA-B*45:01H HLA-B*50:01H
  source 1..9: note = Severe acute respiratory syndrome coronavirus 2
AEETRKLMP

SEQ ID NO: 1860 - protein, 9 aa, Severe acute respiratory syndrome-related coronavirus
  REGION 1..9: note = Table A: HLA-A*02:11M HLA-A*02:01M
  source 1..9: note = Severe acute respiratory syndrome coronavirus 2
KLMPVCVET

SEQ ID NO: 1861 - protein, 9 aa, Severe acute respiratory syndrome-related coronavirus
  REGION 1..9: note = Table A: HLA-B*56:01H HLA-B*55:02H HLA-B*35:02H HLA-B*35:12H HLA-B*54:01H
  source 1..9: note = Severe acute respiratory syndrome coronavirus 2
MPVCVETKA

SEQ ID NO: 1862 - protein, 9 aa, Severe acute respiratory syndrome-related coronavirus
  REGION 1..9: note = Table A: HLA-B*40:02H HLA-B*40:06H
  source 1..9: note = Severe acute respiratory syndrome coronavirus 2
VETKAIVST

SEQ ID NO: 1863 - protein, 9 aa, Severe acute respiratory syndrome-related coronavirus
  REGION 1..9: note = Table A: HLA-B*57:01H HLA-A*25:01M HLA-A*26:01M HLA-A*26:02H HLA-A*26:03H HLA-A*68:02H HLA-B*38:02H HLA-B*57:03H
  source 1..9: note = Severe acute respiratory syndrome coronavirus 2
ETKAIVSTI

SEQ ID NO: 1864 - protein, 9 aa, Severe acute respiratory syndrome-related coronavirus
  REGION 1..9: note = Table A: HLA-B*58:02H HLA-A*74:01H HLA-A*03:01H HLA-A*11:01H HLA-A*11:02H HLA-B*57:01H HLA-A*33:03H HLA-A*30:02H HLA-A*68:01M HLA-A*34:01M HLA-A*34:02H HLA-A*31:01M HLA-B*57:03H HLA-A*66:01M
  source 1..9: note = Severe acute respiratory syndrome coronavirus 2
KAIVSTIQR

SEQ ID NO: 1865 - protein, 9 aa, Severe acute respiratory syndrome-related coronavirus
  REGION 1..9: note = Table A: HLA-A*11:303H HLA-A*03:01H HLA-A*03:02H HLA-A*11:01H HLA-A*11:02H HLA-A*30:02H HLA-A*34:02H HLA-C*07:27M HLA-B*13:02H
  source 1..9: note = Severe acute respiratory syndrome coronavirus 2
AIVSTIQRK

SEQ ID NO: 1866 - protein, 9 aa, Severe acute respiratory syndrome-related coronavirus
  REGION 1..9: note = Table A: HLA-B*58:01M HLA-B*58:02M HLA-C*16:01M HLA-A*03:01H HLA-B*57:01M HLA-A*26:01H HLA-A*29:01M HLA-A*29:02H HLA-A*30:02H HLA-C*15:05H HLA-C*12:02H HLA-C*12:03H HLA-A*34:02H HLA-B*35:01H HLA-B*35:07H HLA-B*38:02M
  REGION 1..9: note = CONT. FROM ABOVE: HLA-A*32:01H HLA-B*15:01M HLA-B*15:02H HLA- B*07:05H HLA-B*57:03H HLA-C*02:02H
  source 1..9: note = Severe acute respiratory syndrome coronavirus 2
IVSTIQRKY

SEQ ID NO: 1867 - protein, 9 aa, Severe acute respiratory syndrome-related coronavirus
  REGION 1..9: note = Table A: HLA-A*02:11M HLA-A*02:05H HLA-A*02:08M HLA-A*02:01H HLA-A*02:02H HLA-B*13:02M
  source 1..9: note = Severe acute respiratory syndrome coronavirus 2
KGIKIQEGV

SEQ ID NO: 1868 - protein, 9 aa, Severe acute respiratory syndrome-related coronavirus
  REGION 1..9: note = Table A: HLA-B*58:01H HLA-C*14:03H HLA-A*11:303H HLA-A*03:02H HLA-A*36:01H HLA-B*46:01M HLA-A*30:02M HLA-C*12:02H HLA-B*38:02H HLA-B*15:01H HLA-B*15:02H HLA-B*15:03H HLA-B*39:01H HLA-B*07:05H
  source 1..9: note = Severe acute respiratory syndrome coronavirus 2
KIQEGVVDY

SEQ ID NO: 1869 - protein, 9 aa, Severe acute respiratory syndrome-related coronavirus
  REGION 1..9: note = Table A: HLA-B*45:01H
  source 1..9: note = Severe acute respiratory syndrome coronavirus 2
QEGVVDYGA

SEQ ID NO: 1870 - protein, 9 aa, Severe acute respiratory syndrome-related coronavirus
  REGION 1..9: note = Table A: HLA-A*26:03H HLA-A*34:01H HLA-A*66:01H
  source 1..9: note = Severe acute respiratory syndrome coronavirus 2
EGVVDYGAR

SEQ ID NO: 1871 - protein, 9 aa, Severe acute respiratory syndrome-related coronavirus
  REGION 1..9: note = Table A: HLA-A*26:02H HLA-A*34:01H HLA-B*15:01H HLA-A*66:01H
  source 1..9: note = Severe acute respiratory syndrome coronavirus 2
GVVDYGARF

SEQ ID NO: 1872 - protein, 9 aa, Severe acute respiratory syndrome-related coronavirus
  REGION 1..9: note = Table A: HLA-A*36:01M HLA-A*29:02H HLA-A*01:01H HLA-C*04:03H HLA-A*30:02H
  source 1..9: note = Severe acute respiratory syndrome coronavirus 2
VVDYGARFY

SEQ ID NO: 1873 - protein, 9 aa, Severe acute respiratory syndrome-related coronavirus
  REGION 1..9: note = Table A: HLA-A*33:01H
  source 1..9: note = Severe acute respiratory syndrome coronavirus 2
DYGARFYFY

SEQ ID NO: 1874 - protein, 9 aa, Severe acute respiratory syndrome-related coronavirus
  REGION 1..9: note = Table A: HLA-B*27:05M
  source 1..9: note = Severe acute respiratory syndrome coronavirus 2
ARFYFYTSK

SEQ ID NO: 1875 - protein, 9 aa, Severe acute respiratory syndrome-related coronavirus
  REGION 1..9: note = Table A: HLA-C*14:03H
  source 1..9: note = Severe acute respiratory syndrome coronavirus 2
FYFYTSKTT

SEQ ID NO: 1876 - protein, 9 aa, Severe acute respiratory syndrome-related coronavirus
  REGION 1..9: note = Table A: HLA-C*14:02M HLA-C*14:03H HLA-B*08:01H HLA-A*02:11H HLA-C*15:05H HLA-A*02:03H HLA-B*51:01M HLA-B*52:01H HLA-B*38:02H HLA-B*54:01H HLA-B*15:02H HLA-B*07:05H HLA-B*49:01H
  source 1..9: note = Severe acute respiratory syndrome coronavirus 2
YFYTSKTTV

SEQ ID NO: 1877 - protein, 9 aa, Severe acute respiratory syndrome-related coronavirus
  REGION 1..9: note = Table A: HLA-C*14:02H HLA-C*14:03H
  source 1..9: note = Severe acute respiratory syndrome coronavirus 2
FYTSKTTVA

SEQ ID NO: 1878 - protein, 9 aa, Severe acute respiratory syndrome-related coronavirus
  REGION 1..9: note = Table A: HLA-B*46:01H HLA-B*08:01M HLA-C*15:05H HLA-A*02:08H HLA-A*02:03H HLA-B*38:02H HLA-B*07:04H HLA-B*41:02H
  source 1..9: note = Severe acute respiratory syndrome coronavirus 2
TSKTTVASL

SEQ ID NO: 1879 - protein, 9 aa, Severe acute respiratory syndrome-related coronavirus
  REGION 1..9: note = Table A: HLA-A*11:303H HLA-C*16:04H HLA-A*25:01H HLA-A*26:01H HLA-A*26:02M HLA-A*26:03H HLA-A*02:11H HLA-A*68:01H HLA-A*68:02H HLA-B*35:03M HLA-C*15:05M HLA-A*02:04M HLA-A*02:05H HLA-A*02:06M HLA-A*02:07H
  REGION 1..9: note = CONT. FROM ABOVE: HLA-A*02:08H HLA-B*14:01H HLA-A*02:01H HLA- A*02:02H HLA-A*02:03M HLA-A*34:01H HLA-B*35:01M HLA-B*35:02H HLA-C*08:01M HLA-B*35:12H HLA-B*38:01H HLA-B*38:02H HLA-B*40 :06H HLA-B*07:02H HLA-B*15:01H HLA-B*15:02M HLA-B*39:01M
  REGION 1..9: note = CONT. FROM ABOVE: HLA-B*07:05M HLA-B*57:03H HLA-B*13:02H HLA- C*07:04H
  source 1..9: note = Severe acute respiratory syndrome coronavirus 2
TVASLINTL

SEQ ID NO: 1880 - protein, 9 aa, Severe acute respiratory syndrome-related coronavirus
  REGION 1..9: note = Table A: HLA-A*11:303H HLA-A*02:04M HLA-A*02:05M HLA-A*02:01H HLA-A*02:02M HLA-A*02:03M HLA-B*38:02H
  source 1..9: note = Severe acute respiratory syndrome coronavirus 2
SLINTLNDL

SEQ ID NO: 1881 - protein, 9 aa, Severe acute respiratory syndrome-related coronavirus
  REGION 1..9: note = Table A: HLA-A*11:303H HLA-A*02:11H HLA-B*35:03H HLA-A*02:04M HLA-A*02:05M HLA-A*02:07H HLA-B*14:01H HLA-A*02:01M HLA-A*02:02H HLA-A*02:03H HLA-B*38:01H HLA-B*38:02M HLA-B*39:01H
  source 1..9: note = Severe acute respiratory syndrome coronavirus 2
TLNDLNETL

SEQ ID NO: 1882 - protein, 9 aa, Severe acute respiratory syndrome-related coronavirus
  REGION 1..9: note = Table A: HLA-A*26:02H HLA-B*35:03H HLA-C*15:05H HLA-A*02:04M HLA-B*14:01H HLA-A*02:01H HLA-B*35:01H HLA-B*35:02H HLA-B*35:12H HLA-B*38:02M HLA-B*15:02H HLA-B*39:01H HLA-B*07:05H
  source 1..9: note = Severe acute respiratory syndrome coronavirus 2
DLNETLVTM

SEQ ID NO: 1883 - protein, 9 aa, Severe acute respiratory syndrome-related coronavirus
  REGION 1..9: note = Table A: HLA-B*44:05H HLA-B*18:01H HLA-B*40:01H HLA-B*40:02H HLA-B*07:05H
  source 1..9: note = Severe acute respiratory syndrome coronavirus 2
NETLVTMPL

SEQ ID NO: 1884 - protein, 9 aa, Severe acute respiratory syndrome-related coronavirus
  REGION 1..9: note = Table A: HLA-A*29:01M HLA-A*29:02M HLA-B*27:02H HLA-C*15:05H HLA-B*35:01H HLA-B*38:02M HLA-B*15:01H HLA-B*15:02M HLA-B*07:05M
  source 1..9: note = Severe acute respiratory syndrome coronavirus 2
TLVTMPLGY

SEQ ID NO: 1885 - protein, 9 aa, Severe acute respiratory syndrome-related coronavirus
  REGION 1..9: note = Table A: HLA-A*68:02H
  source 1..9: note = Severe acute respiratory syndrome coronavirus 2
LVTMPLGYV

SEQ ID NO: 1886 - protein, 9 aa, Severe acute respiratory syndrome-related coronavirus
  REGION 1..9: note = Table A: HLA-B*54:01H
  source 1..9: note = Severe acute respiratory syndrome coronavirus 2
MPLGYVTHG

SEQ ID NO: 1887 - protein, 9 aa, Severe acute respiratory syndrome-related coronavirus
  REGION 1..9: note = Table A: HLA-A*02:04H HLA-A*02:02H
  source 1..9: note = Severe acute respiratory syndrome coronavirus 2
PLGYVTHGL

SEQ ID NO: 1888 - protein, 9 aa, Severe acute respiratory syndrome-related coronavirus
  REGION 1..9: note = Table A: HLA-C*14:03H HLA-A*24:07H HLA-A*23:01H
  source 1..9: note = Severe acute respiratory syndrome coronavirus 2
GYVTHGLNL

SEQ ID NO: 1889 - protein, 9 aa, Severe acute respiratory syndrome-related coronavirus
  REGION 1..9: note = Table A: HLA-B*39:06M
  source 1..9: note = Severe acute respiratory syndrome coronavirus 2
THGLNLEEA

SEQ ID NO: 1890 - protein, 9 aa, Severe acute respiratory syndrome-related coronavirus
  REGION 1..9: note = Table A: HLA-B*39:06H
  source 1..9: note = Severe acute respiratory syndrome coronavirus 2
HGLNLEEAA

SEQ ID NO: 1891 - protein, 9 aa, Severe acute respiratory syndrome-related coronavirus
  REGION 1..9: note = Table A: HLA-A*29:01H HLA-A*29:02H
  source 1..9: note = Severe acute respiratory syndrome coronavirus 2
LNLEEAARY

SEQ ID NO: 1892 - protein, 9 aa, Severe acute respiratory syndrome-related coronavirus
  REGION 1..9: note = Table A: HLA-B*15:02H
  source 1..9: note = Severe acute respiratory syndrome coronavirus 2
NLEEAARYM

SEQ ID NO: 1893 - protein, 9 aa, Severe acute respiratory syndrome-related coronavirus
  REGION 1..9: note = Table A: HLA-A*25:01H HLA-A*34:01M HLA-A*34:02H HLA-A*66:01H
  source 1..9: note = Severe acute respiratory syndrome coronavirus 2
EAARYMRSL

SEQ ID NO: 1894 - protein, 9 aa, Severe acute respiratory syndrome-related coronavirus
  REGION 1..9: note = Table A: HLA-C*06:02H HLA-B*14:02H
  source 1..9: note = Severe acute respiratory syndrome coronavirus 2
ARYMRSLKV

SEQ ID NO: 1895 - protein, 9 aa, Severe acute respiratory syndrome-related coronavirus
  REGION 1..9: note = Table A: HLA-B*54:01H
  source 1..9: note = Severe acute respiratory syndrome coronavirus 2
YMRSLKVPA

SEQ ID NO: 1896 - protein, 9 aa, Severe acute respiratory syndrome-related coronavirus
  REGION 1..9: note = Table A: HLA-B*14:01H
  source 1..9: note = Severe acute respiratory syndrome coronavirus 2
MRSLKVPAT

SEQ ID NO: 1897 - protein, 9 aa, Severe acute respiratory syndrome-related coronavirus
  REGION 1..9: note = Table A: HLA-B*58:01H HLA-B*58:02M HLA-A*02:11M HLA-C*15:05M HLA-C*15:02M HLA-A*02:06H HLA-A*02:01H HLA-B*52:01M HLA-B*57:03M HLA-B*13:02M HLA-B*49:01H
  source 1..9: note = Severe acute respiratory syndrome coronavirus 2
RSLKVPATV

SEQ ID NO: 1898 - protein, 9 aa, Severe acute respiratory syndrome-related coronavirus
  REGION 1..9: note = Table A: HLA-B*38:02H
  source 1..9: note = Severe acute respiratory syndrome coronavirus 2
SLKVPATVS

SEQ ID NO: 1899 - protein, 9 aa, Severe acute respiratory syndrome-related coronavirus
  REGION 1..9: note = Table A: HLA-B*38:02H HLA-B*15:03H
  source 1..9: note = Severe acute respiratory syndrome coronavirus 2
LKVPATVSV

SEQ ID NO: 1900 - protein, 9 aa, Severe acute respiratory syndrome-related coronavirus
  REGION 1..9: note = Table A: HLA-B*56:01H HLA-B*55:02H HLA-C*15:05H HLA-B*07:05H
  source 1..9: note = Severe acute respiratory syndrome coronavirus 2
VPATVSVSS

SEQ ID NO: 1901 - protein, 9 aa, Severe acute respiratory syndrome-related coronavirus
  REGION 1..9: note = Table A: HLA-C*14:02H HLA-C*14:03H HLA-A*25:01H HLA-B*46:01M HLA-A*26:01M HLA-A*26:02H HLA-A*26:03H HLA-A*30:02H HLA-A*68:01H HLA-C*01:02H HLA-C*12:02M HLA-A*34:02H HLA-B*35:01H HLA-B*35:08H HLA-B*38:02M HLA-B*15:01M
  REGION 1..9: note = CONT. FROM ABOVE: HLA-B*15:02M HLA-B*15:03H HLA-B*39:01H HLA- B*07:05H HLA-B*15:11H
  source 1..9: note = Severe acute respiratory syndrome coronavirus 2
SSPDAVTAY

SEQ ID NO: 1902 - protein, 9 aa, Severe acute respiratory syndrome-related coronavirus
  REGION 1..9: note = Table A: HLA-A*25:01M HLA-A*26:01M HLA-A*26:02H HLA-A*26:03H HLA-B*35:01M HLA-B*35:07H HLA-B*38:02H
  source 1..9: note = Severe acute respiratory syndrome coronavirus 2
DAVTAYNGY

SEQ ID NO: 1903 - protein, 9 aa, Severe acute respiratory syndrome-related coronavirus
  REGION 1..9: note = Table A: HLA-C*15:05H HLA-B*54:01H
  source 1..9: note = Severe acute respiratory syndrome coronavirus 2
TAYNGYLTS

SEQ ID NO: 1904 - protein, 9 aa, Severe acute respiratory syndrome-related coronavirus
  REGION 1..9: note = Table A: HLA-A*03:01H HLA-A*34:02H
  source 1..9: note = Severe acute respiratory syndrome coronavirus 2
NGYLTSSSK

SEQ ID NO: 1905 - protein, 9 aa, Severe acute respiratory syndrome-related coronavirus
  REGION 1..9: note = Table A: HLA-B*58:02H HLA-B*57:01H HLA-B*46:01H HLA-C*12:02H HLA-B*15:01H HLA-B*57:03M HLA-C*02:02H
  source 1..9: note = Severe acute respiratory syndrome coronavirus 2
SSKTPEEHF

SEQ ID NO: 1906 - protein, 9 aa, Severe acute respiratory syndrome-related coronavirus
  REGION 1..9: note = Table A: HLA-B*38:01H HLA-B*38:02H
  source 1..9: note = Severe acute respiratory syndrome coronavirus 2
SKTPEEHFI

SEQ ID NO: 1907 - protein, 9 aa, Severe acute respiratory syndrome-related coronavirus
  REGION 1..9: note = Table A: HLA-B*35:12H
  source 1..9: note = Severe acute respiratory syndrome coronavirus 2
TPEEHFIET

SEQ ID NO: 1908 - protein, 9 aa, Severe acute respiratory syndrome-related coronavirus
  REGION 1..9: note = Table A: HLA-B*49:01H
  source 1..9: note = Severe acute respiratory syndrome coronavirus 2
PEEHFIETI

SEQ ID NO: 1909 - protein, 9 aa, Severe acute respiratory syndrome-related coronavirus
  REGION 1..9: note = Table A: HLA-B*14:02H HLA-B*38:01H HLA-B*38:02H HLA-B*39:06M HLA-B*39:01H HLA-B*15:10H
  source 1..9: note = Severe acute respiratory syndrome coronavirus 2
EHFIETISL

SEQ ID NO: 1910 - protein, 9 aa, Severe acute respiratory syndrome-related coronavirus
  REGION 1..9: note = Table A: HLA-A*25:01H HLA-A*26:01H HLA-A*26:02H HLA-A*26:03H HLA-A*30:02H HLA-A*68:01H HLA-A*34:01H HLA-A*34:02M HLA-B*35:01H HLA-B*38:02H HLA-B*15:02H HLA-B*39:01H HLA-A*66:01H
  source 1..9: note = Severe acute respiratory syndrome coronavirus 2
ETISLAGSY

SEQ ID NO: 1911 - protein, 9 aa, Severe acute respiratory syndrome-related coronavirus
  REGION 1..9: note = Table A: HLA-A*34:02H
  source 1..9: note = Severe acute respiratory syndrome coronavirus 2
TISLAGSYK

SEQ ID NO: 1912 - protein, 9 aa, Severe acute respiratory syndrome-related coronavirus
  REGION 1..9: note = Table A: HLA-C*16:01M HLA-A*36:01H HLA-A*30:02M
  source 1..9: note = Severe acute respiratory syndrome coronavirus 2
AGSYKDWSY

SEQ ID NO: 1913 - protein, 9 aa, Severe acute respiratory syndrome-related coronavirus
  REGION 1..9: note = Table A: HLA-A*33:03H
  source 1..9: note = Severe acute respiratory syndrome coronavirus 2
SYKDWSYSG

SEQ ID NO: 1914 - protein, 9 aa, Severe acute respiratory syndrome-related coronavirus
  REGION 1..9: note = Table A: HLA-C*14:02M HLA-C*14:03M HLA-C*07:02H HLA-C*15:05H HLA-A*24:02M HLA-A*24:07H HLA-A*23:01H HLA-B*38:02H HLA-B*39:01M HLA-B*07:05H
  source 1..9: note = Severe acute respiratory syndrome coronavirus 2
SYSGQSTQL

SEQ ID NO: 1915 - protein, 9 aa, Severe acute respiratory syndrome-related coronavirus
  REGION 1..9: note = Table A: HLA-B*13:02H
  source 1..9: note = Severe acute respiratory syndrome coronavirus 2
SGQSTQLGI

SEQ ID NO: 1916 - protein, 9 aa, Severe acute respiratory syndrome-related coronavirus
  REGION 1..9: note = Table A: HLA-B*58:01H HLA-C*15:05H HLA-B*57:03M
  source 1..9: note = Severe acute respiratory syndrome coronavirus 2
QSTQLGIEF

SEQ ID NO: 1917 - protein, 9 aa, Severe acute respiratory syndrome-related coronavirus
  REGION 1..9: note = Table A: HLA-A*68:02H HLA-A*02:04H
  source 1..9: note = Severe acute respiratory syndrome coronavirus 2
STQLGIEFL

SEQ ID NO: 1918 - protein, 9 aa, Severe acute respiratory syndrome-related coronavirus
  REGION 1..9: note = Table A: HLA-A*11:02H HLA-B*27:02H
  source 1..9: note = Severe acute respiratory syndrome coronavirus 2
TQLGIEFLK

SEQ ID NO: 1919 - protein, 9 aa, Severe acute respiratory syndrome-related coronavirus
  REGION 1..9: note = Table A: HLA-B*15:03M
  source 1..9: note = Severe acute respiratory syndrome coronavirus 2
LKRGDKSVY

SEQ ID NO: 1920 - protein, 9 aa, Severe acute respiratory syndrome-related coronavirus
  REGION 1..9: note = Table A: HLA-C*06:02H HLA-C*07:01H HLA-C*07:02H
  source 1..9: note = Severe acute respiratory syndrome coronavirus 2
KRGDKSVYY

SEQ ID NO: 1921 - protein, 9 aa, Severe acute respiratory syndrome-related coronavirus
  REGION 1..9: note = Table A: HLA-C*14:02M HLA-C*14:03M HLA-C*07:02H HLA-B*27:02H HLA-C*15:05H HLA-A*24:02H HLA-A*24:07H HLA-C*08:01H HLA-A*23:01H HLA-B*39:01H
  source 1..9: note = Severe acute respiratory syndrome coronavirus 2
YYTSNPTTF

SEQ ID NO: 1922 - protein, 9 aa, Severe acute respiratory syndrome-related coronavirus
  REGION 1..9: note = Table A: HLA-C*12:02H HLA-A*34:01H HLA-A*34:02H HLA-A*66:01M
  source 1..9: note = Severe acute respiratory syndrome coronavirus 2
YTSNPTTFH

SEQ ID NO: 1923 - protein, 9 aa, Severe acute respiratory syndrome-related coronavirus
  REGION 1..9: note = Table A: HLA-B*58:01H HLA-B*58:02H HLA-A*11:303H HLA-B*44:05H HLA-C*16:01H HLA-C*16:04H HLA-A*11:01H HLA-A*11:02H HLA-B*57:01H HLA-C*03:03H HLA-C*07:01M HLA-A*02:11H HLA-B*53:01M HLA-C*03:02H HLA-C*03:04M
  REGION 1..9: note = CONT. FROM ABOVE: HLA-A*30:02H HLA-A*68:02M HLA-B*35:03M HLA- C*15:05M HLA-C*12:02H HLA-C*12:03H HLA-C*15:02H HLA-A*02:04M HLA-A*02:05H HLA-A*02:06H HLA-A*02:08H HLA-A*02:02M HLA-A*34 :02H HLA-C*07:27H HLA-B*35:01H HLA-C*17:01H HLA-B*35:07H
  REGION 1..9: note = CONT. FROM ABOVE: HLA-C*08:01M HLA-B*38:02M HLA-A*32:01H HLA- B*07:05H HLA-B*57:03H HLA-C*02:02H HLA-B*13:02H HLA-C*07:04H HLA-A*66:01H
  source 1..9: note = Severe acute respiratory syndrome coronavirus 2
TSNPTTFHL

SEQ ID NO: 1924 - protein, 9 aa, Severe acute respiratory syndrome-related coronavirus
  REGION 1..9: note = Table A: HLA-A*11:303H HLA-C*04:01H HLA-C*04:03M HLA-B*53:01H HLA-A*02:07M HLA-B*35:01H HLA-B*35:02H HLA-B*35:08M HLA-B*35:07H HLA-C*08:01H HLA-C*08:02H HLA-B*35:12H HLA-B*38:01M HLA-B*38:02M HLA-B*15:01H
  REGION 1..9: note = CONT. FROM ABOVE: HLA-B*15:02M HLA-B*39:01H HLA-B*57:03H HLA- C*05:01H HLA-B*13:01H
  source 1..9: note = Severe acute respiratory syndrome coronavirus 2
HLDGEVITF

SEQ ID NO: 1925 - protein, 9 aa, Severe acute respiratory syndrome-related coronavirus
  REGION 1..9: note = Table A: HLA-B*44:05M HLA-B*44:03H HLA-B*40:01H HLA-B*40:02M HLA-B*40:06H HLA-B*41:02H HLA-B*49:01M
  source 1..9: note = Severe acute respiratory syndrome coronavirus 2
GEVITFDNL

SEQ ID NO: 1926 - protein, 9 aa, Severe acute respiratory syndrome-related coronavirus
  REGION 1..9: note = Table A: HLA-A*33:03H HLA-A*26:03H HLA-A*68:01M HLA-A*68:02H HLA-A*34:01M HLA-A*34:02H HLA-A*66:01M
  source 1..9: note = Severe acute respiratory syndrome coronavirus 2
EVITFDNLK

SEQ ID NO: 1927 - protein, 9 aa, Severe acute respiratory syndrome-related coronavirus
  REGION 1..9: note = Table A: HLA-B*58:02H HLA-A*02:11H HLA-C*03:04H HLA-A*68:02M HLA-C*15:02H HLA-A*02:04H HLA-A*02:05H HLA-A*02:08H HLA-A*02:02H HLA-A*02:03H HLA-B*57:03H
  source 1..9: note = Severe acute respiratory syndrome coronavirus 2
ITFDNLKTL

SEQ ID NO: 1928 - protein, 9 aa, Severe acute respiratory syndrome-related coronavirus
  REGION 1..9: note = Table A: HLA-C*04:01H HLA-C*04:03H HLA-A*02:07M HLA-A*24:07H HLA-C*08:02H HLA-B*38:02H
  source 1..9: note = Severe acute respiratory syndrome coronavirus 2
TFDNLKTLL

SEQ ID NO: 1929 - protein, 9 aa, Severe acute respiratory syndrome-related coronavirus
  REGION 1..9: note = Table A: HLA-C*15:05H
  source 1..9: note = Severe acute respiratory syndrome coronavirus 2
DNLKTLLSL

SEQ ID NO: 1930 - protein, 9 aa, Severe acute respiratory syndrome-related coronavirus
  REGION 1..9: note = Table A: HLA-A*74:01H HLA-A*33:01H HLA-A*33:03H HLA-A*34:01H
  source 1..9: note = Severe acute respiratory syndrome coronavirus 2
NLKTLLSLR

SEQ ID NO: 1931 - protein, 9 aa, Severe acute respiratory syndrome-related coronavirus
  REGION 1..9: note = Table A: HLA-B*58:02M HLA-A*02:11H HLA-C*15:02M HLA-A*02:06H HLA-A*02:01H HLA-B*57:03H
  source 1..9: note = Severe acute respiratory syndrome coronavirus 2
KTLLSLREV

SEQ ID NO: 1932 - protein, 9 aa, Severe acute respiratory syndrome-related coronavirus
  REGION 1..9: note = Table A: HLA-B*58:02H HLA-B*57:01H HLA-B*57:03M
  source 1..9: note = Severe acute respiratory syndrome coronavirus 2
LSLREVRTI

SEQ ID NO: 1933 - protein, 9 aa, Severe acute respiratory syndrome-related coronavirus
  REGION 1..9: note = Table A: HLA-B*44:03H HLA-B*40:02H HLA-B*40:06M
  source 1..9: note = Severe acute respiratory syndrome coronavirus 2
REVRTIKVF

SEQ ID NO: 1934 - protein, 9 aa, Severe acute respiratory syndrome-related coronavirus
  REGION 1..9: note = Table A: HLA-A*68:02H
  source 1..9: note = Severe acute respiratory syndrome coronavirus 2
EVRTIKVFT

SEQ ID NO: 1935 - protein, 9 aa, Severe acute respiratory syndrome-related coronavirus
  REGION 1..9: note = Table A: HLA-B*58:01H HLA-B*58:02M HLA-A*02:11H HLA-A*68:02M HLA-C*15:05H HLA-C*15:02H HLA-A*02:04H HLA-A*02:05M HLA-A*02:06M HLA-A*02:07H HLA-A*02:08M HLA-A*02:01H HLA-A*02:02H HLA-A*02:03H HLA-C*08:01H HLA-B*38:02H
  REGION 1..9: note = CONT. FROM ABOVE: HLA-B*40:06M HLA-B*57:03M HLA-B*13:02M
  source 1..9: note = Severe acute respiratory syndrome coronavirus 2
RTIKVFTTV

SEQ ID NO: 1936 - protein, 9 aa, Severe acute respiratory syndrome-related coronavirus
  REGION 1..9: note = Table A: HLA-B*58:01H HLA-B*58:02H HLA-A*02:11H HLA-A*68:02H HLA-A*02:05M HLA-A*02:06H HLA-A*02:08H HLA-A*02:02H HLA-B*38:02H HLA-A*32:01H HLA-B*57:03M HLA-B*13:01H HLA-B*13:02H
  source 1..9: note = Severe acute respiratory syndrome coronavirus 2
KVFTTVDNI

SEQ ID NO: 1937 - protein, 9 aa, Severe acute respiratory syndrome-related coronavirus
  REGION 1..9: note = Table A: HLA-C*03:04H HLA-A*68:02H HLA-C*17:01H HLA-C*08:01H
  source 1..9: note = Severe acute respiratory syndrome coronavirus 2
FTTVDNINL

SEQ ID NO: 1938 - protein, 9 aa, Severe acute respiratory syndrome-related coronavirus
  REGION 1..9: note = Table A: HLA-A*11:01H HLA-A*11:02H HLA-A*68:01H HLA-A*34:02M
  source 1..9: note = Severe acute respiratory syndrome coronavirus 2
TTVDNINLH

SEQ ID NO: 1939 - protein, 9 aa, Severe acute respiratory syndrome-related coronavirus
  REGION 1..9: note = Table A: HLA-A*02:07M HLA-B*13:02H
  source 1..9: note = Severe acute respiratory syndrome coronavirus 2
TVDNINLHT

SEQ ID NO: 1940 - protein, 9 aa, Severe acute respiratory syndrome-related coronavirus
  REGION 1..9: note = Table A: HLA-A*68:02M HLA-C*15:05H
  source 1..9: note = Severe acute respiratory syndrome coronavirus 2
DNINLHTQV

SEQ ID NO: 1941 - protein, 9 aa, Severe acute respiratory syndrome-related coronavirus
  REGION 1..9: note = Table A: HLA-B*08:01H HLA-C*15:05H HLA-C*15:02H HLA-B*38:02H
  source 1..9: note = Severe acute respiratory syndrome coronavirus 2
NINLHTQVV

SEQ ID NO: 1942 - protein, 9 aa, Severe acute respiratory syndrome-related coronavirus
  REGION 1..9: note = Table A: HLA-A*11:303H HLA-B*14:01H HLA-B*38:02M HLA-B*15:02M HLA-B*39:01H
  source 1..9: note = Severe acute respiratory syndrome coronavirus 2
NLHTQVVDM

SEQ ID NO: 1943 - protein, 9 aa, Severe acute respiratory syndrome-related coronavirus
  REGION 1..9: note = Table A: HLA-A*11:303H HLA-B*35:03H HLA-C*15:05H HLA-B*35:02H HLA-B*35:12H HLA-B*38:02H HLA-B*57:03H
  source 1..9: note = Severe acute respiratory syndrome coronavirus 2
HTQVVDMSM

SEQ ID NO: 1944 - protein, 9 aa, Severe acute respiratory syndrome-related coronavirus
  REGION 1..9: note = Table A: HLA-B*58:01M HLA-A*11:303H HLA-C*16:04H HLA-A*03:01H HLA-A*11:01H HLA-A*11:02H HLA-A*36:01H HLA-A*25:01M HLA-B*46:01H HLA-A*26:01H HLA-A*26:02M HLA-A*26:03M HLA-A*29:01H HLA-A*29:02M HLA-B*44:03H
  REGION 1..9: note = CONT. FROM ABOVE: HLA-B*18:01H HLA-B*27:02H HLA-B*53:01H HLA- C*03:02H HLA-A*30:02M HLA-A*68:01H HLA-C*15:05H HLA-A*34:01H HLA-A*34:02M HLA-C*07:27H HLA-B*35:01H HLA-B*35:08M HLA-B*35 :07H HLA-B*15:13M HLA-B*38:01H HLA-B*38:02H HLA-B*15:01H
  REGION 1..9: note = CONT. FROM ABOVE: HLA-B*15:02H HLA-B*15:03H HLA-B*39:01M HLA- B*07:05H HLA-B*15:11M HLA-A*66:01H
  source 1..9: note = Severe acute respiratory syndrome coronavirus 2
QVVDMSMTY

SEQ ID NO: 1945 - protein, 9 aa, Severe acute respiratory syndrome-related coronavirus
  REGION 1..9: note = Table A: HLA-B*58:01M HLA-A*11:303H HLA-C*16:01H HLA-B*57:01H HLA-B*46:01H HLA-C*03:02H HLA-C*15:05H HLA-C*12:02H HLA-B*38:02H HLA-B*15:01H HLA-B*07:05H HLA-B*57:03M
  source 1..9: note = Severe acute respiratory syndrome coronavirus 2
MSMTYGQQF

SEQ ID NO: 1946 - protein, 9 aa, Severe acute respiratory syndrome-related coronavirus
  REGION 1..9: note = Table A: HLA-A*68:02H
  source 1..9: note = Severe acute respiratory syndrome coronavirus 2
MTYGQQFGP

SEQ ID NO: 1947 - protein, 9 aa, Severe acute respiratory syndrome-related coronavirus
  REGION 1..9: note = Table A: HLA-C*16:04H HLA-C*03:02H HLA-A*30:02H HLA-B*35:01H HLA-B*38:02H HLA-B*15:02H HLA-B*15:03H HLA-B*39:01H
  source 1..9: note = Severe acute respiratory syndrome coronavirus 2
YGQQFGPTY

SEQ ID NO: 1948 - protein, 9 aa, Severe acute respiratory syndrome-related coronavirus
  REGION 1..9: note = Table A: HLA-B*48:01M HLA-A*02:04H HLA-A*02:03H HLA-C*17:01H HLA-C*08:03H HLA-B*38:02H HLA-B*15:01M HLA-B*15:03H HLA-B*39:01M HLA-B*13:01H HLA-B*13:02H
  source 1..9: note = Severe acute respiratory syndrome coronavirus 2
GQQFGPTYL

SEQ ID NO: 1949 - protein, 9 aa, Severe acute respiratory syndrome-related coronavirus
  REGION 1..9: note = Table A: HLA-A*34:02H
  source 1..9: note = Severe acute respiratory syndrome coronavirus 2
DGADVTKIK

SEQ ID NO: 1950 - protein, 9 aa, Severe acute respiratory syndrome-related coronavirus
  REGION 1..9: note = Table A: HLA-B*15:03H
  source 1..9: note = Severe acute respiratory syndrome coronavirus 2
TKIKPHNSH

SEQ ID NO: 1951 - protein, 9 aa, Severe acute respiratory syndrome-related coronavirus
  REGION 1..9: note = Table A: HLA-B*46:01H HLA-B*15:02H
  source 1..9: note = Severe acute respiratory syndrome coronavirus 2
NSHEGKTFY

SEQ ID NO: 1952 - protein, 9 aa, Severe acute respiratory syndrome-related coronavirus
  REGION 1..9: note = Table A: HLA-B*38:01H HLA-B*38:02H HLA-B*39:01H HLA-B*15:10H
  source 1..9: note = Severe acute respiratory syndrome coronavirus 2
SHEGKTFYV

SEQ ID NO: 1953 - protein, 9 aa, Severe acute respiratory syndrome-related coronavirus
  REGION 1..9: note = Table A: HLA-B*40:01M HLA-B*40:02M HLA-B*40:06H
  source 1..9: note = Severe acute respiratory syndrome coronavirus 2
HEGKTFYVL

SEQ ID NO: 1954 - protein, 9 aa, Severe acute respiratory syndrome-related coronavirus
  REGION 1..9: note = Table A: HLA-A*11:303H HLA-A*02:11H HLA-C*03:04H HLA-B*35:03M HLA-C*15:05H HLA-A*02:04H HLA-A*02:05M HLA-A*02:06M HLA-A*02:07H HLA-A*02:08H HLA-A*02:01H HLA-A*02:02H HLA-B*35:01H HLA-B*35:02H HLA-B*35:08H
  REGION 1..9: note = CONT. FROM ABOVE: HLA-C*08:01M HLA-B*35:12M HLA-B*38:01H HLA- B*38:02M HLA-B*39:01M HLA-B*13:01H
  source 1..9: note = Severe acute respiratory syndrome coronavirus 2
YVLPNDDTL

SEQ ID NO: 1955 - protein, 9 aa, Severe acute respiratory syndrome-related coronavirus
  REGION 1..9: note = Table A: HLA-B*56:01H HLA-B*53:01M HLA-B*35:03M HLA-C*15:05M HLA-B*35:01H HLA-B*35:02M HLA-B*35:08H HLA-B*51:01H HLA-B*35:07H HLA-B*35:12H HLA-B*54:01H
  source 1..9: note = Severe acute respiratory syndrome coronavirus 2
LPNDDTLRV

SEQ ID NO: 1956 - protein, 9 aa, Severe acute respiratory syndrome-related coronavirus
  REGION 1..9: note = Table A: HLA-B*18:01M HLA-B*14:02M HLA-B*37:01M HLA-B*07:05H
  source 1..9: note = Severe acute respiratory syndrome coronavirus 2
DDTLRVEAF

SEQ ID NO: 1957 - protein, 9 aa, Severe acute respiratory syndrome-related coronavirus
  REGION 1..9: note = Table A: HLA-B*46:01H HLA-A*29:02H HLA-A*30:02H HLA-B*35:07H HLA-B*38:02M HLA-B*15:01H HLA-B*15:02H HLA-B*15:03H
  source 1..9: note = Severe acute respiratory syndrome coronavirus 2
TLRVEAFEY

SEQ ID NO: 1958 - protein, 9 aa, Severe acute respiratory syndrome-related coronavirus
  REGION 1..9: note = Table A: HLA-B*27:02H HLA-B*38:02H
  source 1..9: note = Severe acute respiratory syndrome coronavirus 2
LRVEAFEYY

SEQ ID NO: 1959 - protein, 9 aa, Severe acute respiratory syndrome-related coronavirus
  REGION 1..9: note = Table A: HLA-A*68:02M HLA-B*54:01H
  source 1..9: note = Severe acute respiratory syndrome coronavirus 2
EAFEYYHTT

SEQ ID NO: 1960 - protein, 9 aa, Severe acute respiratory syndrome-related coronavirus
  REGION 1..9: note = Table A: HLA-B*45:01H HLA-B*40:06H HLA-B*50:01M
  source 1..9: note = Severe acute respiratory syndrome coronavirus 2
FEYYHTTDP

SEQ ID NO: 1961 - protein, 9 aa, Severe acute respiratory syndrome-related coronavirus
  REGION 1..9: note = Table A: HLA-C*14:02M HLA-C*14:03M HLA-C*04:01H HLA-C*07:02H HLA-B*35:03H HLA-A*24:02M HLA-A*24:07H HLA-C*08:01M HLA-A*23:01M HLA-B*38:02H HLA-B*39:01H
  source 1..9: note = Severe acute respiratory syndrome coronavirus 2
YYHTTDPSF

SEQ ID NO: 1962 - protein, 9 aa, Severe acute respiratory syndrome-related coronavirus
  REGION 1..9: note = Table A: HLA-B*38:01H HLA-B*38:02H HLA-B*39:01M HLA-B*15:10M
  source 1..9: note = Severe acute respiratory syndrome coronavirus 2
YHTTDPSFL

SEQ ID NO: 1963 - protein, 9 aa, Severe acute respiratory syndrome-related coronavirus
  REGION 1..9: note = Table A: HLA-A*34:02H
  source 1..9: note = Severe acute respiratory syndrome coronavirus 2
HTTDPSFLG

SEQ ID NO: 1964 - protein, 9 aa, Severe acute respiratory syndrome-related coronavirus
  REGION 1..9: note = Table A: HLA-A*11:303M HLA-A*74:01H HLA-A*03:01M HLA-A*03:02H HLA-A*11:01H HLA-A*11:02H HLA-A*36:01M HLA-A*33:01H HLA-A*33:03M HLA-A*26:03M HLA-A*01:01H HLA-C*03:03H HLA-A*68:01H HLA-A*34:01M HLA-A*34:02H
  REGION 1..9: note = CONT. FROM ABOVE: HLA-C*07:27M HLA-A*31:01M HLA-A*66:01H
  source 1..9: note = Severe acute respiratory syndrome coronavirus 2
TTDPSFLGR

SEQ ID NO: 1965 - protein, 9 aa, Severe acute respiratory syndrome-related coronavirus
  REGION 1..9: note = Table A: HLA-A*34:01M HLA-A*66:01H
  source 1..9: note = Severe acute respiratory syndrome coronavirus 2
DPSFLGRYM

SEQ ID NO: 1966 - protein, 9 aa, Severe acute respiratory syndrome-related coronavirus
  REGION 1..9: note = Table A: HLA-A*02:02H
  source 1..9: note = Severe acute respiratory syndrome coronavirus 2
FLGRYMSAL

SEQ ID NO: 1967 - protein, 9 aa, Severe acute respiratory syndrome-related coronavirus
  REGION 1..9: note = Table A: HLA-B*27:05M HLA-B*27:02H
  source 1..9: note = Severe acute respiratory syndrome coronavirus 2
GRYMSALNH

SEQ ID NO: 1968 - protein, 9 aa, Severe acute respiratory syndrome-related coronavirus
  REGION 1..9: note = Table A: HLA-A*74:01H HLA-A*03:02H HLA-A*36:01H HLA-A*30:02H HLA-A*02:02H HLA-A*34:02H HLA-B*38:02H
  source 1..9: note = Severe acute respiratory syndrome coronavirus 2
YMSALNHTK

SEQ ID NO: 1969 - protein, 9 aa, Severe acute respiratory syndrome-related coronavirus
  REGION 1..9: note = Table A: HLA-A*34:02H
  source 1..9: note = Severe acute respiratory syndrome coronavirus 2
MSALNHTKK

SEQ ID NO: 1970 - protein, 9 aa, Severe acute respiratory syndrome-related coronavirus
  REGION 1..9: note = Table A: HLA-B*58:01H HLA-B*58:02H HLA-B*57:01H HLA-B*53:01H HLA-B*57:03M
  source 1..9: note = Severe acute respiratory syndrome coronavirus 2
SALNHTKKW

SEQ ID NO: 1971 - protein, 9 aa, Severe acute respiratory syndrome-related coronavirus
  REGION 1..9: note = Table A: HLA-B*48:01H HLA-B*38:02H HLA-B*15:03H
  source 1..9: note = Severe acute respiratory syndrome coronavirus 2
WKYPQVNGL

SEQ ID NO: 1972 - protein, 9 aa, Severe acute respiratory syndrome-related coronavirus
  REGION 1..9: note = Table A: HLA-B*54:01H
  source 1..9: note = Severe acute respiratory syndrome coronavirus 2
YPQVNGLTS

SEQ ID NO: 1973 - protein, 9 aa, Severe acute respiratory syndrome-related coronavirus
  REGION 1..9: note = Table A: HLA-B*13:02H
  source 1..9: note = Severe acute respiratory syndrome coronavirus 2
PQVNGLTSI

SEQ ID NO: 1974 - protein, 9 aa, Severe acute respiratory syndrome-related coronavirus
  REGION 1..9: note = Table A: HLA-A*03:02H HLA-A*11:01H HLA-A*34:02M
  source 1..9: note = Severe acute respiratory syndrome coronavirus 2
QVNGLTSIK

SEQ ID NO: 1975 - protein, 9 aa, Severe acute respiratory syndrome-related coronavirus
  REGION 1..9: note = Table A: HLA-B*15:03M
  source 1..9: note = Severe acute respiratory syndrome coronavirus 2
IKWADNNCY

SEQ ID NO: 1976 - protein, 9 aa, Severe acute respiratory syndrome-related coronavirus
  REGION 1..9: note = Table A: HLA-A*02:02H
  source 1..9: note = Severe acute respiratory syndrome coronavirus 2
KWADNNCYL

SEQ ID NO: 1977 - protein, 9 aa, Severe acute respiratory syndrome-related coronavirus
  REGION 1..9: note = Table A: HLA-A*02:11H HLA-C*15:05H HLA-A*02:04M HLA-A*02:05H HLA-A*02:07H HLA-B*14:01H HLA-A*02:01M HLA-A*02:02M HLA-A*02:03M HLA-B*38:02M HLA-B*13:02H
  source 1..9: note = Severe acute respiratory syndrome coronavirus 2
YLATALLTL

SEQ ID NO: 1978 - protein, 9 aa, Severe acute respiratory syndrome-related coronavirus
  REGION 1..9: note = Table A: HLA-B*53:01H HLA-C*15:05H HLA-B*51:01H HLA-C*08:01H HLA-B*38:02M HLA-B*13:02H
  source 1..9: note = Severe acute respiratory syndrome coronavirus 2
TALLTLQQI

SEQ ID NO: 1979 - protein, 9 aa, Severe acute respiratory syndrome-related coronavirus
  REGION 1..9: note = Table A: HLA-A*02:04H HLA-A*02:01H HLA-A*02:02H
  source 1..9: note = Severe acute respiratory syndrome coronavirus 2
LLTLQQIEL

SEQ ID NO: 1980 - protein, 9 aa, Severe acute respiratory syndrome-related coronavirus
  REGION 1..9: note = Table A: HLA-A*11:01H HLA-A*11:02H HLA-A*36:01H HLA-A*34:02M
  source 1..9: note = Severe acute respiratory syndrome coronavirus 2
LTLQQIELK

SEQ ID NO: 1981 - protein, 9 aa, Severe acute respiratory syndrome-related coronavirus
  REGION 1..9: note = Table A: HLA-A*24:07H HLA-B*38:02M HLA-B*15:01H HLA-B*15:02H HLA-B*13:01H
  source 1..9: note = Severe acute respiratory syndrome coronavirus 2
TLQQIELKF

SEQ ID NO: 1982 - protein, 9 aa, Severe acute respiratory syndrome-related coronavirus
  REGION 1..9: note = Table A: HLA-B*45:01M HLA-B*39:06H HLA-B*40:06M HLA-B*54:01H HLA-B*50:01H
  source 1..9: note = Severe acute respiratory syndrome coronavirus 2
IELKFNPPA

SEQ ID NO: 1983 - protein, 9 aa, Severe acute respiratory syndrome-related coronavirus
  REGION 1..9: note = Table A: HLA-A*25:01H HLA-A*26:03H HLA-B*08:01M HLA-A*68:02H HLA-A*02:04H HLA-A*02:02H HLA-A*02:03H HLA-B*38:02H HLA-B*07:04H
  source 1..9: note = Severe acute respiratory syndrome coronavirus 2
ELKFNPPAL

SEQ ID NO: 1984 - protein, 9 aa, Severe acute respiratory syndrome-related coronavirus
  REGION 1..9: note = Table A: HLA-B*35:01H HLA-B*35:08M HLA-B*35:07M HLA-B*39:01H HLA-B*07:05M
  source 1..9: note = Severe acute respiratory syndrome coronavirus 2
NPPALQDAY

SEQ ID NO: 1985 - protein, 9 aa, Severe acute respiratory syndrome-related coronavirus
  REGION 1..9: note = Table A: HLA-A*02:02H
  source 1..9: note = Severe acute respiratory syndrome coronavirus 2
ALQDAYYRA

SEQ ID NO: 1986 - protein, 9 aa, Severe acute respiratory syndrome-related coronavirus
  REGION 1..9: note = Table A: HLA-A*74:01H
  source 1..9: note = Severe acute respiratory syndrome coronavirus 2
LQDAYYRAR

SEQ ID NO: 1987 - protein, 9 aa, Severe acute respiratory syndrome-related coronavirus
  REGION 1..9: note = Table A: HLA-B*38:02H HLA-B*39:06H
  source 1..9: note = Severe acute respiratory syndrome coronavirus 2
YRARAGEAA

SEQ ID NO: 1988 - protein, 9 aa, Severe acute respiratory syndrome-related coronavirus
  REGION 1..9: note = Table A: HLA-B*27:05H HLA-B*27:02M HLA-B*38:01H HLA-B*38:02H HLA-B*39:01M
  source 1..9: note = Severe acute respiratory syndrome coronavirus 2
ARAGEAANF

SEQ ID NO: 1989 - protein, 9 aa, Severe acute respiratory syndrome-related coronavirus
  REGION 1..9: note = Table A: HLA-B*44:05M HLA-B*45:01H HLA-B*18:01H HLA-B*40:01H HLA-B*40:02H HLA-B*07:05H HLA-B*41:02M HLA-B*49:01M HLA-B*50:01M
  source 1..9: note = Severe acute respiratory syndrome coronavirus 2
GEAANFCAL

SEQ ID NO: 1990 - protein, 9 aa, Severe acute respiratory syndrome-related coronavirus
  REGION 1..9: note = Table A: HLA-A*68:02M
  source 1..9: note = Severe acute respiratory syndrome coronavirus 2
EAANFCALI

SEQ ID NO: 1991 - protein, 9 aa, Severe acute respiratory syndrome-related coronavirus
  REGION 1..9: note = Table A: HLA-C*15:05H HLA-C*15:02H
  source 1..9: note = Severe acute respiratory syndrome coronavirus 2
AANFCALIL

SEQ ID NO: 1992 - protein, 9 aa, Severe acute respiratory syndrome-related coronavirus
  REGION 1..9: note = Table A: HLA-C*14:03H HLA-A*29:01M HLA-A*29:02H HLA-B*35:01H HLA-B*38:02H HLA-B*15:02H HLA-B*07:05H
  source 1..9: note = Severe acute respiratory syndrome coronavirus 2
NFCALILAY

SEQ ID NO: 1993 - protein, 9 aa, Severe acute respiratory syndrome-related coronavirus
  REGION 1..9: note = Table A: HLA-C*15:05H HLA-B*38:02H
  source 1..9: note = Severe acute respiratory syndrome coronavirus 2
YCNKTVGEL

SEQ ID NO: 1994 - protein, 9 aa, Severe acute respiratory syndrome-related coronavirus
  REGION 1..9: note = Table A: HLA-A*02:08H
  source 1..9: note = Severe acute respiratory syndrome coronavirus 2
KTVGELGDV

SEQ ID NO: 1995 - protein, 9 aa, Severe acute respiratory syndrome-related coronavirus
  REGION 1..9: note = Table A: HLA-A*68:01H HLA-A*34:01H HLA-A*66:01H
  source 1..9: note = Severe acute respiratory syndrome coronavirus 2
TVGELGDVR

SEQ ID NO: 1996 - protein, 9 aa, Severe acute respiratory syndrome-related coronavirus
  REGION 1..9: note = Table A: HLA-B*40:02M HLA-B*40:06H HLA-B*41:02H HLA-B*49:01H HLA-B*50:01H
  source 1..9: note = Severe acute respiratory syndrome coronavirus 2
GELGDVRET

SEQ ID NO: 1997 - protein, 9 aa, Severe acute respiratory syndrome-related coronavirus
  REGION 1..9: note = Table A: HLA-A*02:11H HLA-A*68:02H HLA-A*02:02M HLA-A*34:01H HLA-B*38:02H HLA-B*15:02H HLA-B*39:01H
  source 1..9: note = Severe acute respiratory syndrome coronavirus 2
ELGDVRETM

SEQ ID NO: 1998 - protein, 9 aa, Severe acute respiratory syndrome-related coronavirus
  REGION 1..9: note = Table A: HLA-A*33:01H HLA-A*26:01H HLA-A*26:02H HLA-A*26:03H HLA-A*34:01M HLA-A*34:02H HLA-B*38:02H HLA-A*66:01H
  source 1..9: note = Severe acute respiratory syndrome coronavirus 2
DVRETMSYL

SEQ ID NO: 1999 - protein, 9 aa, Severe acute respiratory syndrome-related coronavirus
  REGION 1..9: note = Table A: HLA-A*11:01H HLA-A*11:02H HLA-A*33:03M HLA-A*68:01H HLA-A*68:02H HLA-A*34:02H HLA-A*66:01H
  source 1..9: note = Severe acute respiratory syndrome coronavirus 2
ETMSYLFQH

SEQ ID NO: 2000 - protein, 9 aa, Severe acute respiratory syndrome-related coronavirus
  REGION 1..9: note = Table A: HLA-A*02:02H
  source 1..9: note = Severe acute respiratory syndrome coronavirus 2
TMSYLFQHA

SEQ ID NO: 2001 - protein, 9 aa, Severe acute respiratory syndrome-related coronavirus
  REGION 1..9: note = Table A: HLA-C*14:02M HLA-C*14:03M HLA-A*24:02H HLA-A*24:07H HLA-C*08:01H HLA-A*23:01M
  source 1..9: note = Severe acute respiratory syndrome coronavirus 2
SYLFQHANL

SEQ ID NO: 2002 - protein, 9 aa, Severe acute respiratory syndrome-related coronavirus
  REGION 1..9: note = Table A: HLA-A*02:05H HLA-C*08:01H HLA-B*38:02M HLA-B*39:06H HLA-B*39:01H
  source 1..9: note = Severe acute respiratory syndrome coronavirus 2
FQHANLDSC

SEQ ID NO: 2003 - protein, 9 aa, Severe acute respiratory syndrome-related coronavirus
  REGION 1..9: note = Table A: HLA-A*33:03H
  source 1..9: note = Severe acute respiratory syndrome coronavirus 2
HANLDSCKR

SEQ ID NO: 2004 - protein, 9 aa, Severe acute respiratory syndrome-related coronavirus
  REGION 1..9: note = Table A: HLA-B*51:01H
  source 1..9: note = Severe acute respiratory syndrome coronavirus 2
DSCKRVLNV

SEQ ID NO: 2005 - protein, 9 aa, Severe acute respiratory syndrome-related coronavirus
  REGION 1..9: note = Table A: HLA-B*27:05M
  source 1..9: note = Severe acute respiratory syndrome coronavirus 2
KRVLNVVCK

SEQ ID NO: 2006 - protein, 9 aa, Severe acute respiratory syndrome-related coronavirus
  REGION 1..9: note = Table A: HLA-A*02:11H HLA-A*02:06H HLA-B*13:02H
  source 1..9: note = Severe acute respiratory syndrome coronavirus 2
RVLNVVCKT

SEQ ID NO: 2007 - protein, 9 aa, Severe acute respiratory syndrome-related coronavirus
  REGION 1..9: note = Table A: HLA-C*15:05H
  source 1..9: note = Severe acute respiratory syndrome coronavirus 2
TCGQQQTTL

SEQ ID NO: 2008 - protein, 9 aa, Severe acute respiratory syndrome-related coronavirus
  REGION 1..9: note = Table A: HLA-A*03:02H HLA-A*11:01H
  source 1..9: note = Severe acute respiratory syndrome coronavirus 2
CGQQQTTLK

SEQ ID NO: 2009 - protein, 9 aa, Severe acute respiratory syndrome-related coronavirus
  REGION 1..9: note = Table A: HLA-B*13:02M
  source 1..9: note = Severe acute respiratory syndrome coronavirus 2
GQQQTTLKG

SEQ ID NO: 2010 - protein, 9 aa, Severe acute respiratory syndrome-related coronavirus
  REGION 1..9: note = Table A: HLA-A*02:05H HLA-A*02:06H HLA-A*02:08H HLA-A*02:03H HLA-B*52:01H HLA-B*38:02H HLA-B*13:02H
  source 1..9: note = Severe acute respiratory syndrome coronavirus 2
QQQTTLKGV

SEQ ID NO: 2011 - protein, 9 aa, Severe acute respiratory syndrome-related coronavirus
  REGION 1..9: note = Table A: HLA-A*02:11M HLA-A*68:02M HLA-C*15:05H HLA-A*02:06M HLA-A*02:08M HLA-A*02:01M HLA-A*02:03H HLA-B*38:02H HLA-B*13:02H
  source 1..9: note = Severe acute respiratory syndrome coronavirus 2
TTLKGVEAV

SEQ ID NO: 2012 - protein, 9 aa, Severe acute respiratory syndrome-related coronavirus
  REGION 1..9: note = Table A: HLA-A*11:303H HLA-B*46:01H HLA-B*08:01H HLA-A*30:02H HLA-A*02:02M HLA-A*02:03H HLA-B*38:02H HLA-B*15:01M HLA-B*15:02H
  source 1..9: note = Severe acute respiratory syndrome coronavirus 2
TLKGVEAVM

SEQ ID NO: 2013 - protein, 9 aa, Severe acute respiratory syndrome-related coronavirus
  REGION 1..9: note = Table A: HLA-C*15:02H HLA-C*07:04H
  source 1..9: note = Severe acute respiratory syndrome coronavirus 2
KGVEAVMYM

SEQ ID NO: 2014 - protein, 9 aa, Severe acute respiratory syndrome-related coronavirus
  REGION 1..9: note = Table A: HLA-A*25:01M HLA-A*26:01H HLA-A*26:02H HLA-A*26:03H HLA-A*68:02H HLA-B*35:03H HLA-A*34:01H
  source 1..9: note = Severe acute respiratory syndrome coronavirus 2
EAVMYMGTL

SEQ ID NO: 2015 - protein, 9 aa, Severe acute respiratory syndrome-related coronavirus
  REGION 1..9: note = Table A: HLA-C*14:03H HLA-A*11:303H HLA-A*03:01M HLA-A*36:01H HLA-B*46:01M HLA-A*29:01H HLA-A*29:02H HLA-C*03:02H HLA-A*30:02M HLA-C*15:05H HLA-B*38:02H HLA-B*15:01H HLA-B*15:02H HLA-B*15:03M HLA-B*07:05M
  REGION 1..9: note = CONT. FROM ABOVE: HLA-B*15:11H
  source 1..9: note = Severe acute respiratory syndrome coronavirus 2
VMYMGTLSY

SEQ ID NO: 2016 - protein, 9 aa, Severe acute respiratory syndrome-related coronavirus
  REGION 1..9: note = Table A: HLA-B*35:03H HLA-B*35:01H HLA-B*35:08H HLA-B*38:02H HLA-B*39:01H
  source 1..9: note = Severe acute respiratory syndrome coronavirus 2
MGTLSYEQF

SEQ ID NO: 2017 - protein, 9 aa, Severe acute respiratory syndrome-related coronavirus
  REGION 1..9: note = Table A: HLA-A*11:303H HLA-A*03:01H HLA-A*03:02H HLA-A*11:01H HLA-A*11:02H HLA-A*36:01H HLA-A*30:02H HLA-A*34:02M HLA-C*07:27M
  source 1..9: note = Severe acute respiratory syndrome coronavirus 2
GTLSYEQFK

SEQ ID NO: 2018 - protein, 9 aa, Severe acute respiratory syndrome-related coronavirus
  REGION 1..9: note = Table A: HLA-A*68:02H HLA-B*52:01M HLA-B*38:01H HLA-B*38:02M HLA-B*13:01H HLA-B*13:02M
  source 1..9: note = Severe acute respiratory syndrome coronavirus 2
EQFKKGVQI

SEQ ID NO: 2019 - protein, 9 aa, Severe acute respiratory syndrome-related coronavirus
  REGION 1..9: note = Table A: HLA-A*11:02H
  source 1..9: note = Severe acute respiratory syndrome coronavirus 2
VQIPCTCGK

SEQ ID NO: 2020 - protein, 9 aa, Severe acute respiratory syndrome-related coronavirus
  REGION 1..9: note = Table A: HLA-B*46:01H HLA-B*38:02M HLA-B*15:01H HLA-B*15:02M
  source 1..9: note = Severe acute respiratory syndrome coronavirus 2
YLVQQESPF

SEQ ID NO: 2021 - protein, 9 aa, Severe acute respiratory syndrome-related coronavirus
  REGION 1..9: note = Table A: HLA-A*02:11H HLA-A*68:02H HLA-A*02:04H HLA-A*02:05H HLA-A*02:06H HLA-A*02:07H HLA-A*02:01H HLA-B*38:02H HLA-B*39:01H HLA-B*13:02H
  source 1..9: note = Severe acute respiratory syndrome coronavirus 2
LVQQESPFV

SEQ ID NO: 2022 - protein, 9 aa, Severe acute respiratory syndrome-related coronavirus
  REGION 1..9: note = Table A: HLA-B*48:01H HLA-A*11:303H HLA-C*16:04H HLA-C*12:03H HLA-A*02:04H HLA-C*08:01H HLA-B*38:02M HLA-B*15:01M HLA-B*15:02H HLA-B*15:03H HLA-B*39:01M HLA-B*07:05H HLA-B*13:01H HLA-B*13:02H HLA-C*07:04H
  source 1..9: note = Severe acute respiratory syndrome coronavirus 2
VQQESPFVM

SEQ ID NO: 2023 - protein, 9 aa, Severe acute respiratory syndrome-related coronavirus
  REGION 1..9: note = Table A: HLA-B*38:02H HLA-B*13:01H
  source 1..9: note = Severe acute respiratory syndrome coronavirus 2
QQESPFVMM

SEQ ID NO: 2024 - protein, 9 aa, Severe acute respiratory syndrome-related coronavirus
  REGION 1..9: note = Table A: HLA-B*45:01M
  source 1..9: note = Severe acute respiratory syndrome coronavirus 2
QESPFVMMS

SEQ ID NO: 2025 - protein, 9 aa, Severe acute respiratory syndrome-related coronavirus
  REGION 1..9: note = Table A: HLA-A*11:303H HLA-A*03:02H HLA-A*36:01H HLA-B*46:01H HLA-A*29:01M HLA-A*29:02M HLA-B*18:01H HLA-A*30:02M HLA-B*35:01H HLA-B*38:02M HLA-B*15:01H HLA-B*15:02M HLA-B*39:01H HLA-B*07:05M HLA-B*15:11H
  source 1..9: note = Severe acute respiratory syndrome coronavirus 2
MMSAPPAQY

SEQ ID NO: 2026 - protein, 9 aa, Severe acute respiratory syndrome-related coronavirus
  REGION 1..9: note = Table A: HLA-B*42:01H HLA-B*48:01H HLA-B*58:01H HLA-C*14:03H HLA-A*11:303H HLA-C*16:01H HLA-B*46:01H HLA-C*06:02H HLA-C*04:03M HLA-C*03:03H HLA-C*07:01H HLA-C*07:02H HLA-A*02:11H HLA-B*53:01H HLA-C*03:02H HLA-C*03:04H
  REGION 1..9: note = CONT. FROM ABOVE: HLA-A*68:01H HLA-A*68:02H HLA-B*35:03M HLA- C*15:05M HLA-C*01:02H HLA-C*12:02H HLA-A*02:05M HLA-A*02:06H HLA-A*02:07M HLA-A*02:02H HLA-B*35:01H HLA-B*35:02M HLA-C*17 :01H HLA-C*08:01M HLA-B*35:12M HLA-B*37:01H HLA-B*38:02H
  REGION 1..9: note = CONT. FROM ABOVE: HLA-B*40:02H HLA-B*39:01H HLA-B*07:05H HLA- B*57:03M HLA-C*07:04H
  source 1..9: note = Severe acute respiratory syndrome coronavirus 2
SAPPAQYEL

SEQ ID NO: 2027 - protein, 9 aa, Severe acute respiratory syndrome-related coronavirus
  REGION 1..9: note = Table A: HLA-A*02:11H
  source 1..9: note = Severe acute respiratory syndrome coronavirus 2
AQYELKHGT

SEQ ID NO: 2028 - protein, 9 aa, Severe acute respiratory syndrome-related coronavirus
  REGION 1..9: note = Table A: HLA-A*24:07H
  source 1..9: note = Severe acute respiratory syndrome coronavirus 2
QYELKHGTF

SEQ ID NO: 2029 - protein, 9 aa, Severe acute respiratory syndrome-related coronavirus
  REGION 1..9: note = Table A: HLA-B*49:01H
  source 1..9: note = Severe acute respiratory syndrome coronavirus 2
YELKHGTFT

SEQ ID NO: 2030 - protein, 9 aa, Severe acute respiratory syndrome-related coronavirus
  REGION 1..9: note = Table A: HLA-B*15:01H
  source 1..9: note = Severe acute respiratory syndrome coronavirus 2
GTFTCASEY

SEQ ID NO: 2031 - protein, 9 aa, Severe acute respiratory syndrome-related coronavirus
  REGION 1..9: note = Table A: HLA-B*46:01H HLA-A*30:02H HLA-B*35:01H
  source 1..9: note = Severe acute respiratory syndrome coronavirus 2
CASEYTGNY

SEQ ID NO: 2032 - protein, 9 aa, Severe acute respiratory syndrome-related coronavirus
  REGION 1..9: note = Table A: HLA-B*44:05H HLA-C*16:04H HLA-B*45:01H HLA-B*44:03H HLA-B*18:01H HLA-A*68:02H HLA-A*02:01H HLA-B*39:06H HLA-B*40:01H HLA-B*40:02M HLA-B*40:06H HLA-B*07:05H HLA-B*41:02M HLA-B*49:01H HLA-B*50:01H
  source 1..9: note = Severe acute respiratory syndrome coronavirus 2
SEYTGNYQC

SEQ ID NO: 2033 - protein, 9 aa, Severe acute respiratory syndrome-related coronavirus
  REGION 1..9: note = Table A: HLA-A*33:03H HLA-A*26:03H
  source 1..9: note = Severe acute respiratory syndrome coronavirus 2
EYTGNYQCG

SEQ ID NO: 2034 - protein, 9 aa, Severe acute respiratory syndrome-related coronavirus
  REGION 1..9: note = Table A: HLA-A*30:02H
  source 1..9: note = Severe acute respiratory syndrome coronavirus 2
TGNYQCGHY

SEQ ID NO: 2035 - protein, 9 aa, Severe acute respiratory syndrome-related coronavirus
  REGION 1..9: note = Table A: HLA-A*03:01H HLA-A*11:01H HLA-A*11:02H HLA-B*15:03H
  source 1..9: note = Severe acute respiratory syndrome coronavirus 2
GHYKHITSK

SEQ ID NO: 2036 - protein, 9 aa, Severe acute respiratory syndrome-related coronavirus
  REGION 1..9: note = Table A: HLA-B*48:01H HLA-B*38:01M HLA-B*38:02M HLA-B*15:03H HLA-B*39:01H HLA-B*15:10M
  source 1..9: note = Severe acute respiratory syndrome coronavirus 2
KHITSKETL

SEQ ID NO: 2037 - protein, 9 aa, Severe acute respiratory syndrome-related coronavirus
  REGION 1..9: note = Table A: HLA-A*36:01H HLA-B*38:02M HLA-B*15:01H HLA-B*15:02H
  source 1..9: note = Severe acute respiratory syndrome coronavirus 2
HITSKETLY

SEQ ID NO: 2038 - protein, 9 aa, Severe acute respiratory syndrome-related coronavirus
  REGION 1..9: note = Table A: HLA-A*11:303H HLA-A*03:01M HLA-A*03:02M HLA-A*11:01M HLA-A*11:02M HLA-A*36:01H HLA-A*34:02M HLA-C*07:27H
  source 1..9: note = Severe acute respiratory syndrome coronavirus 2
CIDGALLTK

SEQ ID NO: 2039 - protein, 9 aa, Severe acute respiratory syndrome-related coronavirus
  REGION 1..9: note = Table A: HLA-C*14:03H HLA-A*11:303M HLA-A*03:01H HLA-B*46:01M HLA-A*29:01H HLA-A*29:02H HLA-C*03:02H HLA-A*30:02M HLA-C*07:27H HLA-B*38:02H HLA-B*15:01H HLA-B*15:02H HLA-B*15:03M HLA-B*07:05H
  source 1..9: note = Severe acute respiratory syndrome coronavirus 2
ALLTKSSEY

SEQ ID NO: 2040 - protein, 9 aa, Severe acute respiratory syndrome-related coronavirus
  REGION 1..9: note = Table A: HLA-C*07:02H HLA-B*38:01H HLA-B*38:02M HLA-B*15:03H HLA-B*39:01H
  source 1..9: note = Severe acute respiratory syndrome coronavirus 2
YKGPITDVF

SEQ ID NO: 2041 - protein, 9 aa, Severe acute respiratory syndrome-related coronavirus
  REGION 1..9: note = Table A: HLA-A*36:01H HLA-A*30:02H
  source 1..9: note = Severe acute respiratory syndrome coronavirus 2
KGPITDVFY

SEQ ID NO: 2042 - protein, 9 aa, Severe acute respiratory syndrome-related coronavirus
  REGION 1..9: note = Table A: HLA-B*27:02H HLA-A*34:02H
  source 1..9: note = Severe acute respiratory syndrome coronavirus 2
GPITDVFYK

SEQ ID NO: 2043 - protein, 9 aa, Severe acute respiratory syndrome-related coronavirus
  REGION 1..9: note = Table A: HLA-A*26:01M HLA-A*26:02H HLA-A*26:03H HLA-A*34:01H HLA-B*35:01H HLA-B*35:07H HLA-B*38:02M HLA-B*15:02H
  source 1..9: note = Severe acute respiratory syndrome coronavirus 2
DVFYKENSY

SEQ ID NO: 2044 - protein, 9 aa, Severe acute respiratory syndrome-related coronavirus
  REGION 1..9: note = Table A: HLA-A*33:03H HLA-C*07:02H
  source 1..9: note = Severe acute respiratory syndrome coronavirus 2
FYKENSYTT

SEQ ID NO: 2045 - protein, 9 aa, Severe acute respiratory syndrome-related coronavirus
  REGION 1..9: note = Table A: HLA-B*44:02H HLA-B*44:05M HLA-B*45:01M HLA-B*44:03M HLA-B*52:01H HLA-B*37:01H HLA-B*40:01M HLA-B*40:02M HLA-B*40:06H HLA-B*41:02H HLA-B*13:02H HLA-B*49:01H HLA-B*50:01M
  source 1..9: note = Severe acute respiratory syndrome coronavirus 2
KENSYTTTI

SEQ ID NO: 2046 - protein, 9 aa, Severe acute respiratory syndrome-related coronavirus
  REGION 1..9: note = Table A: HLA-A*34:02M
  source 1..9: note = Severe acute respiratory syndrome coronavirus 2
ENSYTTTIK

SEQ ID NO: 2047 - protein, 9 aa, Severe acute respiratory syndrome-related coronavirus
  REGION 1..9: note = Table A: HLA-C*14:03H
  source 1..9: note = Severe acute respiratory syndrome coronavirus 2
SYTTTIKPV

SEQ ID NO: 2048 - protein, 9 aa, Severe acute respiratory syndrome-related coronavirus
  REGION 1..9: note = Table A: HLA-B*58:01H HLA-C*16:01H HLA-A*68:02H HLA-B*57:03H
  source 1..9: note = Severe acute respiratory syndrome coronavirus 2
YTTTIKPVT

SEQ ID NO: 2049 - protein, 9 aa, Severe acute respiratory syndrome-related coronavirus
  REGION 1..9: note = Table A: HLA-B*58:01H HLA-B*58:02H HLA-C*16:01M HLA-A*36:01H HLA-B*57:01M HLA-A*29:02H HLA-B*18:01H HLA-C*07:01H HLA-A*30:02H HLA-C*15:05H HLA-A*34:02H HLA-B*35:01M HLA-B*38:02H HLA-B*15:01H HLA-B*15:02H HLA-B*39:01H
  REGION 1..9: note = CONT. FROM ABOVE: HLA-B*07:05M HLA-B*57:03M
  source 1..9: note = Severe acute respiratory syndrome coronavirus 2
TTTIKPVTY

SEQ ID NO: 2050 - protein, 9 aa, Severe acute respiratory syndrome-related coronavirus
  REGION 1..9: note = Table A: HLA-A*11:303M HLA-A*74:01H HLA-A*03:01H HLA-A*03:02M HLA-A*11:01H HLA-A*11:02H HLA-A*36:01H HLA-A*33:03H HLA-A*26:03H HLA-A*30:01H HLA-A*68:01M HLA-A*34:01M HLA-A*34:02H HLA-C*07:27M HLA-A*31:01H
  REGION 1..9: note = CONT. FROM ABOVE: HLA-A*66:01H
  source 1..9: note = Severe acute respiratory syndrome coronavirus 2
TTIKPVTYK

SEQ ID NO: 2051 - protein, 9 aa, Severe acute respiratory syndrome-related coronavirus
  REGION 1..9: note = Table A: HLA-B*42:01H HLA-B*08:01H HLA-A*02:11H HLA-A*30:02H HLA-A*02:04H HLA-A*02:05H HLA-A*02:02M HLA-A*02:03H HLA-B*07:04M HLA-B*57:03H
  source 1..9: note = Severe acute respiratory syndrome coronavirus 2
TIKPVTYKL

SEQ ID NO: 2052 - protein, 9 aa, Severe acute respiratory syndrome-related coronavirus
  REGION 1..9: note = Table A: HLA-A*11:303H HLA-A*02:11H HLA-C*03:04H HLA-B*35:03H HLA-A*02:05H HLA-A*02:06M HLA-A*02:01H HLA-A*02:02H HLA-B*35:02M HLA-C*08:01M HLA-B*35:12M HLA-B*38:02M HLA-B*57:03H
  source 1..9: note = Severe acute respiratory syndrome coronavirus 2
VCTEIDPKL

SEQ ID NO: 2053 - protein, 9 aa, Severe acute respiratory syndrome-related coronavirus
  REGION 1..9: note = Table A: HLA-A*36:01M HLA-A*01:01H HLA-B*35:08H HLA-B*39:01H
  source 1..9: note = Severe acute respiratory syndrome coronavirus 2
EIDPKLDNY

SEQ ID NO: 2054 - protein, 9 aa, Severe acute respiratory syndrome-related coronavirus
  REGION 1..9: note = Table A: HLA-A*36:01H
  source 1..9: note = Severe acute respiratory syndrome coronavirus 2
IDPKLDNYY

SEQ ID NO: 2055 - protein, 9 aa, Severe acute respiratory syndrome-related coronavirus
  REGION 1..9: note = Table A: HLA-A*33:01H
  source 1..9: note = Severe acute respiratory syndrome coronavirus 2
DPKLDNYYK

SEQ ID NO: 2056 - protein, 9 aa, Severe acute respiratory syndrome-related coronavirus
  REGION 1..9: note = Table A: HLA-C*14:02H HLA-C*14:03H HLA-B*15:02H
  source 1..9: note = Severe acute respiratory syndrome coronavirus 2
NYYKKDNSY

SEQ ID NO: 2057 - protein, 9 aa, Severe acute respiratory syndrome-related coronavirus
  REGION 1..9: note = Table A: HLA-C*14:02M HLA-C*14:03M HLA-A*33:03H HLA-A*29:02H HLA-A*24:02M HLA-A*24:07H HLA-C*08:01H HLA-A*23:01M
  source 1..9: note = Severe acute respiratory syndrome coronavirus 2
YYKKDNSYF

SEQ ID NO: 2058 - protein, 9 aa, Severe acute respiratory syndrome-related coronavirus
  REGION 1..9: note = Table A: HLA-A*68:02H HLA-C*08:03H
  source 1..9: note = Severe acute respiratory syndrome coronavirus 2
NSYFTEQPI

SEQ ID NO: 2059 - protein, 9 aa, Severe acute respiratory syndrome-related coronavirus
  REGION 1..9: note = Table A: HLA-C*14:02H HLA-C*14:03M HLA-C*04:01H HLA-C*04:03H HLA-A*24:07H HLA-B*39:01H
  source 1..9: note = Severe acute respiratory syndrome coronavirus 2
YFTEQPIDL

SEQ ID NO: 2060 - protein, 9 aa, Severe acute respiratory syndrome-related coronavirus
  REGION 1..9: note = Table A: HLA-A*01:01H HLA-C*04:03M HLA-A*68:02H
  source 1..9: note = Severe acute respiratory syndrome coronavirus 2
FTEQPIDLV

SEQ ID NO: 2061 - protein, 9 aa, Severe acute respiratory syndrome-related coronavirus
  REGION 1..9: note = Table A: HLA-B*45:01M HLA-B*40:06H HLA-B*50:01H
  source 1..9: note = Severe acute respiratory syndrome coronavirus 2
TEQPIDLVP

SEQ ID NO: 2062 - protein, 9 aa, Severe acute respiratory syndrome-related coronavirus
  REGION 1..9: note = Table A: HLA-B*56:01H HLA-B*55:02H HLA-C*15:05H HLA-B*55:01H HLA-B*51:01H HLA-B*54:01H
  source 1..9: note = Severe acute respiratory syndrome coronavirus 2
VPNQPYPNA

SEQ ID NO: 2063 - protein, 9 aa, Severe acute respiratory syndrome-related coronavirus
  REGION 1..9: note = Table A: HLA-C*14:03H HLA-B*38:02H HLA-B*15:01M HLA-B*15:02M HLA-B*15:03H HLA-B*07:05H
  source 1..9: note = Severe acute respiratory syndrome coronavirus 2
NQPYPNASF

SEQ ID NO: 2064 - protein, 9 aa, Severe acute respiratory syndrome-related coronavirus
  REGION 1..9: note = Table A: HLA-B*53:01M HLA-B*35:03M HLA-C*15:05H HLA-B*35:01M HLA-B*35:02H HLA-B*35:08M HLA-B*35:07M HLA-B*35:12M HLA-B*38:01H HLA-B*38:02H HLA-B*07:05H
  source 1..9: note = Severe acute respiratory syndrome coronavirus 2
YPNASFDNF

SEQ ID NO: 2065 - protein, 9 aa, Severe acute respiratory syndrome-related coronavirus
  REGION 1..9: note = Table A: HLA-B*53:01H HLA-B*35:01H HLA-B*35:02H HLA-B*35:08H HLA-B*35:07H
  source 1..9: note = Severe acute respiratory syndrome coronavirus 2
NASFDNFKF

SEQ ID NO: 2066 - protein, 9 aa, Severe acute respiratory syndrome-related coronavirus
  REGION 1..9: note = Table A: HLA-C*06:02H HLA-A*02:11H HLA-A*68:02H HLA-C*12:03H HLA-C*15:02M HLA-A*02:06H HLA-B*40:06H
  source 1..9: note = Severe acute respiratory syndrome coronavirus 2
ASFDNFKFV

SEQ ID NO: 2067 - protein, 9 aa, Severe acute respiratory syndrome-related coronavirus
  REGION 1..9: note = Table A: HLA-A*24:07M
  source 1..9: note = Severe acute respiratory syndrome coronavirus 2
KFVCDNIKF

SEQ ID NO: 2068 - protein, 9 aa, Severe acute respiratory syndrome-related coronavirus
  REGION 1..9: note = Table A: HLA-C*14:02H HLA-C*14:03H HLA-A*02:05H HLA-A*02:08H HLA-A*02:02H HLA-A*24:02H HLA-A*24:07H HLA-C*08:01H HLA-A*23:01H HLA-B*38:02H
  source 1..9: note = Severe acute respiratory syndrome coronavirus 2
KFADDLNQL

SEQ ID NO: 2069 - protein, 9 aa, Severe acute respiratory syndrome-related coronavirus
  REGION 1..9: note = Table A: HLA-B*18:01H HLA-B*38:02H HLA-B*07:05H
  source 1..9: note = Severe acute respiratory syndrome coronavirus 2
DDLNQLTGY

SEQ ID NO: 2070 - protein, 9 aa, Severe acute respiratory syndrome-related coronavirus
  REGION 1..9: note = Table A: HLA-A*34:01H HLA-A*34:02M HLA-A*66:01H
  source 1..9: note = Severe acute respiratory syndrome coronavirus 2
DLNQLTGYK

SEQ ID NO: 2071 - protein, 9 aa, Severe acute respiratory syndrome-related coronavirus
  REGION 1..9: note = Table A: HLA-A*74:01M HLA-A*03:01H HLA-A*33:01H HLA-A*33:03M HLA-B*08:01H HLA-A*68:01H HLA-A*34:01H HLA-A*34:02H HLA-A*31:01H HLA-A*66:01H
  source 1..9: note = Severe acute respiratory syndrome coronavirus 2
TGYKKPASR

SEQ ID NO: 2072 - protein, 9 aa, Severe acute respiratory syndrome-related coronavirus
  REGION 1..9: note = Table A: HLA-B*07:04M HLA-B*15:03M
  source 1..9: note = Severe acute respiratory syndrome coronavirus 2
YKKPASREL

SEQ ID NO: 2073 - protein, 9 aa, Severe acute respiratory syndrome-related coronavirus
  REGION 1..9: note = Table A: HLA-C*15:05H HLA-B*07:02H HLA-B*07:04M
  source 1..9: note = Severe acute respiratory syndrome coronavirus 2
KPASRELKV

SEQ ID NO: 2074 - protein, 9 aa, Severe acute respiratory syndrome-related coronavirus
  REGION 1..9: note = Table A: HLA-B*58:02H HLA-B*57:01H HLA-B*57:03H
  source 1..9: note = Severe acute respiratory syndrome coronavirus 2
ASRELKVTF

SEQ ID NO: 2075 - protein, 9 aa, Severe acute respiratory syndrome-related coronavirus
  REGION 1..9: note = Table A: HLA-B*40:06H
  source 1..9: note = Severe acute respiratory syndrome coronavirus 2
RELKVTFFP

SEQ ID NO: 2076 - protein, 9 aa, Severe acute respiratory syndrome-related coronavirus
  REGION 1..9: note = Table A: HLA-B*55:02H HLA-B*35:03M HLA-C*15:05M HLA-B*35:01H HLA-B*35:02H HLA-B*35:08M HLA-B*51:01H HLA-B*35:07H HLA-C*08:01H HLA-B*35:12H HLA-B*38:02M HLA-B*54:01H HLA-B*39:01M HLA-B*07:05H
  source 1..9: note = Severe acute respiratory syndrome coronavirus 2
FPDLNGDVV

SEQ ID NO: 2077 - protein, 9 aa, Severe acute respiratory syndrome-related coronavirus
  REGION 1..9: note = Table A: HLA-B*38:02H
  source 1..9: note = Severe acute respiratory syndrome coronavirus 2
DLNGDVVAI

SEQ ID NO: 2078 - protein, 9 aa, Severe acute respiratory syndrome-related coronavirus
  REGION 1..9: note = Table A: HLA-A*01:01H HLA-B*35:01H HLA-B*39:01H
  source 1..9: note = Severe acute respiratory syndrome coronavirus 2
NGDVVAIDY

SEQ ID NO: 2079 - protein, 9 aa, Severe acute respiratory syndrome-related coronavirus
  REGION 1..9: note = Table A: HLA-B*27:02H
  source 1..9: note = Severe acute respiratory syndrome coronavirus 2
GDVVAIDYK

SEQ ID NO: 2080 - protein, 9 aa, Severe acute respiratory syndrome-related coronavirus
  REGION 1..9: note = Table A: HLA-A*30:02H
  source 1..9: note = Severe acute respiratory syndrome coronavirus 2
VVAIDYKHY

SEQ ID NO: 2081 - protein, 9 aa, Severe acute respiratory syndrome-related coronavirus
  REGION 1..9: note = Table A: HLA-A*33:01H HLA-A*33:03H HLA-A*26:01H HLA-B*08:01H HLA-C*07:01H HLA-A*24:02M HLA-A*24:07M HLA-A*23:01M
  source 1..9: note = Severe acute respiratory syndrome coronavirus 2
DYKHYTPSF

SEQ ID NO: 2082 - protein, 9 aa, Severe acute respiratory syndrome-related coronavirus
  REGION 1..9: note = Table A: HLA-B*58:01M HLA-B*58:02M HLA-A*74:01H HLA-B*57:01H HLA-A*24:07M HLA-A*23:01H HLA-A*32:01H HLA-B*57:03H HLA-B*13:01M
  source 1..9: note = Severe acute respiratory syndrome coronavirus 2
KLLHKPIVW

SEQ ID NO: 2083 - protein, 9 aa, Severe acute respiratory syndrome-related coronavirus
  REGION 1..9: note = Table A: HLA-A*02:11H HLA-A*30:01H HLA-A*02:02H HLA-B*38:02M
  source 1..9: note = Severe acute respiratory syndrome coronavirus 2
LHKPIVWHV

SEQ ID NO: 2084 - protein, 9 aa, Severe acute respiratory syndrome-related coronavirus
  REGION 1..9: note = Table A: HLA-A*02:05H
  source 1..9: note = Severe acute respiratory syndrome coronavirus 2
PIVWHVNNA

SEQ ID NO: 2085 - protein, 9 aa, Severe acute respiratory syndrome-related coronavirus
  REGION 1..9: note = Table A: HLA-A*02:11H
  source 1..9: note = Severe acute respiratory syndrome coronavirus 2
IVWHVNNAT

SEQ ID NO: 2086 - protein, 9 aa, Severe acute respiratory syndrome-related coronavirus
  REGION 1..9: note = Table A: HLA-A*02:08H HLA-B*38:02H
  source 1..9: note = Severe acute respiratory syndrome coronavirus 2
HVNNATNKA

SEQ ID NO: 2087 - protein, 9 aa, Severe acute respiratory syndrome-related coronavirus
  REGION 1..9: note = Table A: HLA-B*35:01H HLA-B*38:02H HLA-B*15:02H HLA-B*07:05H
  source 1..9: note = Severe acute respiratory syndrome coronavirus 2
NNATNKATY

SEQ ID NO: 2088 - protein, 9 aa, Severe acute respiratory syndrome-related coronavirus
  REGION 1..9: note = Table A: HLA-A*34:02M
  source 1..9: note = Severe acute respiratory syndrome coronavirus 2
NATNKATYK

SEQ ID NO: 2089 - protein, 9 aa, Severe acute respiratory syndrome-related coronavirus
  REGION 1..9: note = Table A: HLA-B*58:01H HLA-B*58:02M HLA-C*16:01H HLA-B*57:01M HLA-B*53:01H HLA-A*32:01H HLA-B*57:03H
  source 1..9: note = Severe acute respiratory syndrome coronavirus 2
KATYKPNTW

SEQ ID NO: 2090 - protein, 9 aa, Severe acute respiratory syndrome-related coronavirus
  REGION 1..9: note = Table A: HLA-A*24:02M HLA-A*24:07H HLA-A*23:01M
  source 1..9: note = Severe acute respiratory syndrome coronavirus 2
TYKPNTWCI

SEQ ID NO: 2091 - protein, 9 aa, Severe acute respiratory syndrome-related coronavirus
  REGION 1..9: note = Table A: HLA-B*42:01H HLA-B*58:01H HLA-B*44:05H HLA-B*56:01H HLA-B*27:02H HLA-B*53:01M HLA-B*55:02H HLA-B*35:03M HLA-C*15:05H HLA-B*35:01H HLA-B*35:02H HLA-B*35:08H HLA-B*35:07M HLA-C*08:01H HLA-B*15:13H HLA-B*35:12H
  REGION 1..9: note = CONT. FROM ABOVE: HLA-B*38:01H HLA-B*38:02M HLA-B*07:02M HLA- B*07:04H HLA-B*15:01H HLA-B*15:02M HLA-B*15:03H HLA-B*07:05H HLA-B*57:03H HLA-B*15:11H
  source 1..9: note = Severe acute respiratory syndrome coronavirus 2
KPVETSNSF

SEQ ID NO: 2092 - protein, 9 aa, Severe acute respiratory syndrome-related coronavirus
  REGION 1..9: note = Table A: HLA-A*68:02M HLA-B*39:01H
  source 1..9: note = Severe acute respiratory syndrome coronavirus 2
ETSNSFDVL

SEQ ID NO: 2093 - protein, 9 aa, Severe acute respiratory syndrome-related coronavirus
  REGION 1..9: note = Table A: HLA-A*11:303H HLA-A*03:02H HLA-A*11:01M HLA-A*11:02M HLA-A*36:01H HLA-A*30:02H HLA-A*68:01H HLA-A*34:02M HLA-C*07:27H
  source 1..9: note = Severe acute respiratory syndrome coronavirus 2
TSNSFDVLK

SEQ ID NO: 2094 - protein, 9 aa, Severe acute respiratory syndrome-related coronavirus
  REGION 1..9: note = Table A: HLA-B*35:02H
  source 1..9: note = Severe acute respiratory syndrome coronavirus 2
DAQGMDNLA

SEQ ID NO: 2095 - protein, 9 aa, Severe acute respiratory syndrome-related coronavirus
  REGION 1..9: note = Table A: HLA-B*08:01H HLA-A*02:11H HLA-A*68:02M HLA-A*02:05H HLA-B*14:01H HLA-A*02:02M HLA-A*02:03H HLA-B*38:02H HLA-B*15:02H HLA-B*13:02H
  source 1..9: note = Severe acute respiratory syndrome coronavirus 2
DLKPVSEEV

SEQ ID NO: 2096 - protein, 9 aa, Severe acute respiratory syndrome-related coronavirus
  REGION 1..9: note = Table A: HLA-B*44:02H HLA-B*44:05H HLA-B*45:01M HLA-B*44:03M HLA-B*38:01H HLA-B*38:02H HLA-B*40:01H HLA-B*40:02M HLA-B*41:02H HLA-B*49:01H
  source 1..9: note = Severe acute respiratory syndrome coronavirus 2
EEVVENPTI

SEQ ID NO: 2097 - protein, 9 aa, Severe acute respiratory syndrome-related coronavirus
  REGION 1..9: note = Table A: HLA-A*11:303M HLA-A*03:01M HLA-A*03:02H HLA-A*11:01H HLA-A*11:02H HLA-A*36:01H HLA-A*30:02H HLA-A*68:01M HLA-A*34:01H HLA-A*34:02H HLA-C*07:27M HLA-A*66:01H
  source 1..9: note = Severe acute respiratory syndrome coronavirus 2
VVENPTIQK

SEQ ID NO: 2098 - protein, 9 aa, Severe acute respiratory syndrome-related coronavirus
  REGION 1..9: note = Table A: HLA-B*35:03M HLA-C*15:05H HLA-B*35:01H HLA-B*35:02M HLA-B*35:12H HLA-B*07:02H HLA-B*07:05H
  source 1..9: note = Severe acute respiratory syndrome coronavirus 2
NPTIQKDVL

SEQ ID NO: 2099 - protein, 9 aa, Severe acute respiratory syndrome-related coronavirus
  REGION 1..9: note = Table A: HLA-B*58:01H HLA-B*58:02H HLA-A*02:08H HLA-B*57:03M
  source 1..9: note = Severe acute respiratory syndrome coronavirus 2
KTTEVVGDI

SEQ ID NO: 2100 - protein, 9 aa, Severe acute respiratory syndrome-related coronavirus
  REGION 1..9: note = Table A: HLA-B*44:05H HLA-B*35:03H HLA-B*40:01H HLA-B*40:02M HLA-B*41:02M HLA-B*49:01H
  source 1..9: note = Severe acute respiratory syndrome coronavirus 2
TEVVGDIIL

SEQ ID NO: 2101 - protein, 9 aa, Severe acute respiratory syndrome-related coronavirus
  REGION 1..9: note = Table A: HLA-A*11:01H HLA-A*11:02H HLA-A*33:03H HLA-A*26:03M HLA-A*68:01H HLA-A*68:02M HLA-A*34:01H HLA-A*34:02H HLA-A*66:01M
  source 1..9: note = Severe acute respiratory syndrome coronavirus 2
EVVGDIILK

SEQ ID NO: 2102 - protein, 9 aa, Severe acute respiratory syndrome-related coronavirus
  REGION 1..9: note = Table A: HLA-A*11:01H HLA-A*34:02H
  source 1..9: note = Severe acute respiratory syndrome coronavirus 2
VVGDIILKP

SEQ ID NO: 2103 - protein, 9 aa, Severe acute respiratory syndrome-related coronavirus
  REGION 1..9: note = Table A: HLA-A*11:303H HLA-B*46:01H HLA-B*08:01M HLA-C*01:02H HLA-A*02:05H HLA-B*14:01H HLA-A*02:02H HLA-A*02:03M HLA-B*38:02M HLA-B*07:02H HLA-B*07:04M HLA-B*15:01M HLA-B*15:02M HLA-B*41:02H
  source 1..9: note = Severe acute respiratory syndrome coronavirus 2
ILKPANNSL

SEQ ID NO: 2104 - protein, 9 aa, Severe acute respiratory syndrome-related coronavirus
  REGION 1..9: note = Table A: HLA-B*53:01H HLA-C*15:05M HLA-B*51:01H HLA-B*07:02H HLA-B*07:04H HLA-B*07:05H
  source 1..9: note = Severe acute respiratory syndrome coronavirus 2
KPANNSLKI

SEQ ID NO: 2105 - protein, 9 aa, Severe acute respiratory syndrome-related coronavirus
  REGION 1..9: note = Table A: HLA-A*02:11H HLA-A*68:02H HLA-C*15:05H HLA-A*02:06H
  source 1..9: note = Severe acute respiratory syndrome coronavirus 2
NSLKITEEV

SEQ ID NO: 2106 - protein, 9 aa, Severe acute respiratory syndrome-related coronavirus
  REGION 1..9: note = Table A: HLA-B*44:05H HLA-B*40:01H HLA-B*40:02H HLA-B*39:01H HLA-B*41:02M
  source 1..9: note = Severe acute respiratory syndrome coronavirus 2
TEEVGHTDL

SEQ ID NO: 2107 - protein, 9 aa, Severe acute respiratory syndrome-related coronavirus
  REGION 1..9: note = Table A: HLA-B*44:02H HLA-B*44:05M HLA-B*44:03M HLA-B*18:01H HLA-A*68:02H HLA-B*40:01H HLA-B*40:02H HLA-B*39:01H HLA-B*49:01H
  source 1..9: note = Severe acute respiratory syndrome coronavirus 2
EEVGHTDLM

SEQ ID NO: 2108 - protein, 9 aa, Severe acute respiratory syndrome-related coronavirus
  REGION 1..9: note = Table A: HLA-B*27:02H HLA-A*30:02H HLA-B*38:02H HLA-B*15:03H HLA-B*39:01H
  source 1..9: note = Severe acute respiratory syndrome coronavirus 2
GHTDLMAAY

SEQ ID NO: 2109 - protein, 9 aa, Severe acute respiratory syndrome-related coronavirus
  REGION 1..9: note = Table A: HLA-A*36:01H HLA-C*04:01H HLA-C*04:03M HLA-A*68:02H
  source 1..9: note = Severe acute respiratory syndrome coronavirus 2
HTDLMAAYV

SEQ ID NO: 2110 - protein, 9 aa, Severe acute respiratory syndrome-related coronavirus
  REGION 1..9: note = Table A: HLA-B*48:01M HLA-C*14:02H HLA-C*14:03H HLA-A*11:303H HLA-C*16:01H HLA-C*16:04H HLA-B*46:01M HLA-C*03:03H HLA-C*12:05H HLA-C*03:02M HLA-C*03:04H HLA-B*35:03M HLA-C*15:05H HLA-C*01:02M HLA-C*12:02M
  REGION 1..9: note = CONT. FROM ABOVE: HLA-C*12:03H HLA-A*02:05H HLA-A*02:08H HLA- B*14:01H HLA-C*07:27M HLA-B*35:01H HLA-B*35:02H HLA-C*17:01M HLA-C*08:01H HLA-C*08:02M HLA-C*08:03H HLA-B*35:12H HLA-B*38 :02M HLA-B*40:01H HLA-B*40:02H HLA-B*07:02M HLA-B*15:01H
  REGION 1..9: note = CONT. FROM ABOVE: HLA-B*15:02H HLA-B*15:03H HLA-B*39:01H HLA- B*07:05H HLA-B*41:02H HLA-B*57:03H HLA-B*15:10H
  source 1..9: note = Severe acute respiratory syndrome coronavirus 2
AAYVDNSSL

SEQ ID NO: 2111 - protein, 9 aa, Severe acute respiratory syndrome-related coronavirus
  REGION 1..9: note = Table A: HLA-A*11:303H HLA-A*01:01H HLA-C*04:03H HLA-C*03:03H HLA-B*53:01H HLA-C*03:04H HLA-A*68:02H HLA-B*35:03H HLA-C*15:05M HLA-C*15:02H HLA-A*02:06M HLA-A*02:07H HLA-A*02:01H HLA-B*35:02H HLA-B*51:01H
  REGION 1..9: note = CONT. FROM ABOVE: HLA-C*08:01M HLA-C*08:02M HLA-B*38:01M HLA- B*38:02H HLA-B*39:01H HLA-C*05:01H HLA-B*13:01M HLA-B*13:02H HLA-B*49:01H
  source 1..9: note = Severe acute respiratory syndrome coronavirus 2
YVDNSSLTI

SEQ ID NO: 2112 - protein, 9 aa, Severe acute respiratory syndrome-related coronavirus
  REGION 1..9: note = Table A: HLA-A*11:01H HLA-A*34:02H
  source 1..9: note = Severe acute respiratory syndrome coronavirus 2
VDNSSLTIK

SEQ ID NO: 2113 - protein, 9 aa, Severe acute respiratory syndrome-related coronavirus
  REGION 1..9: note = Table A: HLA-A*33:01H HLA-A*68:01H HLA-A*34:02M
  source 1..9: note = Severe acute respiratory syndrome coronavirus 2
DNSSLTIKK

SEQ ID NO: 2114 - protein, 9 aa, Severe acute respiratory syndrome-related coronavirus
  REGION 1..9: note = Table A: HLA-B*58:02H HLA-C*03:03H HLA-C*03:04H HLA-C*15:05H HLA-C*15:02H HLA-A*02:05H HLA-A*02:08H HLA-A*02:02H HLA-C*17:01H HLA-B*57:03M
  source 1..9: note = Severe acute respiratory syndrome coronavirus 2
LTIKKPNEL

SEQ ID NO: 2115 - protein, 9 aa, Severe acute respiratory syndrome-related coronavirus
  REGION 1..9: note = Table A: HLA-B*42:01M HLA-B*58:02H HLA-B*56:01H HLA-B*08:01H HLA-C*07:01H HLA-B*53:01H HLA-B*55:02H HLA-B*35:03H HLA-C*15:05M HLA-B*55:01M HLA-B*07:02H HLA-B*07:04H HLA-B*07:05M
  source 1..9: note = Severe acute respiratory syndrome coronavirus 2
KPNELSRVL

SEQ ID NO: 2116 - protein, 9 aa, Severe acute respiratory syndrome-related coronavirus
  REGION 1..9: note = Table A: HLA-B*44:05H HLA-B*44:03H HLA-B*14:02H HLA-B*14:01H HLA-B*37:01M HLA-B*40:02H HLA-B*41:02H HLA-C*07:04H
  source 1..9: note = Severe acute respiratory syndrome coronavirus 2
NELSRVLGL

SEQ ID NO: 2117 - protein, 9 aa, Severe acute respiratory syndrome-related coronavirus
  REGION 1..9: note = Table A: HLA-A*34:01H HLA-A*34:02M
  source 1..9: note = Severe acute respiratory syndrome coronavirus 2
ELSRVLGLK

SEQ ID NO: 2118 - protein, 9 aa, Severe acute respiratory syndrome-related coronavirus
  REGION 1..9: note = Table A: HLA-C*06:02H HLA-B*27:05H HLA-B*14:02H HLA-B*14:01H
  source 1..9: note = Severe acute respiratory syndrome coronavirus 2
SRVLGLKTL

SEQ ID NO: 2119 - protein, 9 aa, Severe acute respiratory syndrome-related coronavirus
  REGION 1..9: note = Table A: HLA-B*08:01H
  source 1..9: note = Severe acute respiratory syndrome coronavirus 2
VLGLKTLAT

SEQ ID NO: 2120 - protein, 9 aa, Severe acute respiratory syndrome-related coronavirus
  REGION 1..9: note = Table A: HLA-C*15:05H HLA-A*02:02H HLA-A*02:03M HLA-B*38:02M HLA-B*39:06H HLA-B*15:02M HLA-B*13:02H
  source 1..9: note = Severe acute respiratory syndrome coronavirus 2
TLATHGLAA

SEQ ID NO: 2121 - protein, 9 aa, Severe acute respiratory syndrome-related coronavirus
  REGION 1..9: note = Table A: HLA-A*11:303H HLA-C*03:02H HLA-A*68:02H HLA-A*02:06H
  source 1..9: note = Severe acute respiratory syndrome coronavirus 2
LATHGLAAV

SEQ ID NO: 2122 - protein, 9 aa, Severe acute respiratory syndrome-related coronavirus
  REGION 1..9: note = Table A: HLA-C*15:05H HLA-A*02:06H HLA-B*14:01H HLA-B*51:01M HLA-B*52:01M HLA-B*38:02H HLA-B*39:06H HLA-B*54:01H HLA-B*13:02H
  source 1..9: note = Severe acute respiratory syndrome coronavirus 2
HGLAAVNSV

SEQ ID NO: 2123 - protein, 9 aa, Severe acute respiratory syndrome-related coronavirus
  REGION 1..9: note = Table A: HLA-B*58:01H HLA-B*53:01H
  source 1..9: note = Severe acute respiratory syndrome coronavirus 2
LAAVNSVPW

SEQ ID NO: 2124 - protein, 9 aa, Severe acute respiratory syndrome-related coronavirus
  REGION 1..9: note = Table A: HLA-B*56:01H HLA-A*29:01M HLA-A*29:02M HLA-B*18:01H HLA-B*53:01M HLA-B*55:02H HLA-A*30:02M HLA-B*35:03H HLA-C*15:05H HLA-A*34:02H HLA-B*35:01H HLA-B*35:08M HLA-B*51:01H HLA-B*35:07H HLA-B*38:02M HLA-B*54:01H
  REGION 1..9: note = CONT. FROM ABOVE: HLA-B*15:02M HLA-B*15:03H HLA-B*39:01H HLA- B*07:05M HLA-B*15:11M
  source 1..9: note = Severe acute respiratory syndrome coronavirus 2
VPWDTIANY

SEQ ID NO: 2125 - protein, 9 aa, Severe acute respiratory syndrome-related coronavirus
  REGION 1..9: note = Table A: HLA-A*26:01H HLA-A*26:03M HLA-A*68:01H HLA-A*68:02H HLA-A*66:01M
  source 1..9: note = Severe acute respiratory syndrome coronavirus 2
DTIANYAKP

SEQ ID NO: 2126 - protein, 9 aa, Severe acute respiratory syndrome-related coronavirus
  REGION 1..9: note = Table A: HLA-B*58:02H HLA-C*16:01M HLA-C*03:03H HLA-C*03:04H HLA-C*15:02H HLA-C*08:01H HLA-B*07:04H HLA-B*57:03H
  source 1..9: note = Severe acute respiratory syndrome coronavirus 2
IANYAKPFL

SEQ ID NO: 2127 - protein, 9 aa, Severe acute respiratory syndrome-related coronavirus
  REGION 1..9: note = Table A: HLA-A*03:01H HLA-A*11:01H HLA-A*11:02H HLA-A*36:01H HLA-A*33:01M HLA-A*33:03M HLA-A*34:02M HLA-A*23:01H HLA-A*31:01H
  source 1..9: note = Severe acute respiratory syndrome coronavirus 2
NYAKPFLNK

SEQ ID NO: 2128 - protein, 9 aa, Severe acute respiratory syndrome-related coronavirus
  REGION 1..9: note = Table A: HLA-C*16:01H HLA-B*46:01H HLA-C*06:02H HLA-B*08:01H HLA-C*12:05H HLA-A*02:11H HLA-C*03:02H HLA-A*68:02H HLA-B*55:01H HLA-C*12:02H HLA-C*12:03M HLA-C*15:02H HLA-A*02:04H HLA-A*02:05M HLA-A*02:06H HLA-A*02:02M
  REGION 1..9: note = CONT. FROM ABOVE: HLA-A*02:03M HLA-B*51:01M HLA-B*52:01H HLA- B*38:02H HLA-B*54:01H HLA-B*07:04H HLA-C*02:02M
  source 1..9: note = Severe acute respiratory syndrome coronavirus 2
YAKPFLNKV

SEQ ID NO: 2129 - protein, 9 aa, Severe acute respiratory syndrome-related coronavirus
  REGION 1..9: note = Table A: HLA-B*56:01M HLA-B*55:02M HLA-B*55:01H HLA-B*54:01H
  source 1..9: note = Severe acute respiratory syndrome coronavirus 2
KPFLNKVVS

SEQ ID NO: 2130 - protein, 9 aa, Severe acute respiratory syndrome-related coronavirus
  REGION 1..9: note = Table A: HLA-A*02:11M HLA-A*02:02M HLA-A*02:03M HLA-B*38:02H
  source 1..9: note = Severe acute respiratory syndrome coronavirus 2
FLNKVVSTT

SEQ ID NO: 2131 - protein, 9 aa, Severe acute respiratory syndrome-related coronavirus
  REGION 1..9: note = Table A: HLA-B*58:01H HLA-B*58:02H HLA-A*02:11H HLA-C*15:05H HLA-A*02:05M HLA-A*02:06H HLA-A*02:08H HLA-A*02:03H HLA-B*38:02H HLA-B*57:03M HLA-B*13:02M
  source 1..9: note = Severe acute respiratory syndrome coronavirus 2
KVVSTTTNI

SEQ ID NO: 2132 - protein, 9 aa, Severe acute respiratory syndrome-related coronavirus
  REGION 1..9: note = Table A: HLA-A*02:05H HLA-A*02:08H HLA-A*02:03H HLA-B*38:02H
  source 1..9: note = Severe acute respiratory syndrome coronavirus 2
VVSTTTNIV

SEQ ID NO: 2133 - protein, 9 aa, Severe acute respiratory syndrome-related coronavirus
  REGION 1..9: note = Table A: HLA-A*11:303H HLA-A*74:01H HLA-A*03:01M HLA-A*03:02M HLA-A*11:01H HLA-A*11:02H HLA-A*36:01H HLA-B*57:01H HLA-A*33:01H HLA-A*33:03H HLA-A*26:03M HLA-A*30:02H HLA-A*68:01H HLA-A*68:02M HLA-A*34:01M
  REGION 1..9: note = CONT. FROM ABOVE: HLA-A*34:02H HLA-C*07:27H HLA-A*31:01H HLA- A*66:01H
  source 1..9: note = Severe acute respiratory syndrome coronavirus 2
STTTNIVTR

SEQ ID NO: 2134 - protein, 9 aa, Severe acute respiratory syndrome-related coronavirus
  REGION 1..9: note = Table A: HLA-A*68:01H HLA-A*68:02H HLA-A*02:05H HLA-A*02:06H HLA-A*02:08M HLA-A*34:02H
  source 1..9: note = Severe acute respiratory syndrome coronavirus 2
TTTNIVTRC

SEQ ID NO: 2135 - protein, 9 aa, Severe acute respiratory syndrome-related coronavirus
  REGION 1..9: note = Table A: HLA-B*58:02H HLA-C*15:05H HLA-C*15:02H
  source 1..9: note = Severe acute respiratory syndrome coronavirus 2
TTNIVTRCL

SEQ ID NO: 2136 - protein, 9 aa, Severe acute respiratory syndrome-related coronavirus
  REGION 1..9: note = Table A: HLA-C*14:02H HLA-C*14:03M HLA-A*29:02H HLA-C*07:01H HLA-C*07:02M HLA-A*02:04M HLA-A*24:02H HLA-A*24:07H HLA-C*08:01M HLA-A*23:01H HLA-B*40:06M HLA-C*07:04H
  source 1..9: note = Severe acute respiratory syndrome coronavirus 2
NYMPYFFTL

SEQ ID NO: 2137 - protein, 9 aa, Severe acute respiratory syndrome-related coronavirus
  REGION 1..9: note = Table A: HLA-C*04:03H HLA-A*02:07H HLA-A*02:02H HLA-A*24:07H HLA-C*08:01H
  source 1..9: note = Severe acute respiratory syndrome coronavirus 2
YMPYFFTLL

SEQ ID NO: 2138 - protein, 9 aa, Severe acute respiratory syndrome-related coronavirus
  REGION 1..9: note = Table A: HLA-B*53:01H HLA-B*35:03H HLA-C*15:05H HLA-A*34:02H HLA-B*51:01M HLA-B*35:07H HLA-B*38:02H HLA-B*54:01H
  source 1..9: note = Severe acute respiratory syndrome coronavirus 2
MPYFFTLLL

SEQ ID NO: 2139 - protein, 9 aa, Severe acute respiratory syndrome-related coronavirus
  REGION 1..9: note = Table A: HLA-C*14:03H
  source 1..9: note = Severe acute respiratory syndrome coronavirus 2
YFFTLLLQL

SEQ ID NO: 2140 - protein, 9 aa, Severe acute respiratory syndrome-related coronavirus
  REGION 1..9: note = Table A: HLA-B*38:02H HLA-B*15:02H
  source 1..9: note = Severe acute respiratory syndrome coronavirus 2
TLLLQLCTF

SEQ ID NO: 2141 - protein, 9 aa, Severe acute respiratory syndrome-related coronavirus
  REGION 1..9: note = Table A: HLA-A*74:01H
  source 1..9: note = Severe acute respiratory syndrome coronavirus 2
LLQLCTFTR

SEQ ID NO: 2142 - protein, 9 aa, Severe acute respiratory syndrome-related coronavirus
  REGION 1..9: note = Table A: HLA-A*33:03H
  source 1..9: note = Severe acute respiratory syndrome coronavirus 2
TFTRSTNSR

SEQ ID NO: 2143 - protein, 9 aa, Severe acute respiratory syndrome-related coronavirus
  REGION 1..9: note = Table A: HLA-B*07:05H
  source 1..9: note = Severe acute respiratory syndrome coronavirus 2
TNSRIKASM

SEQ ID NO: 2144 - protein, 9 aa, Severe acute respiratory syndrome-related coronavirus
  REGION 1..9: note = Table A: HLA-B*07:04H
  source 1..9: note = Severe acute respiratory syndrome coronavirus 2
RIKASMPTT

SEQ ID NO: 2145 - protein, 9 aa, Severe acute respiratory syndrome-related coronavirus
  REGION 1..9: note = Table A: HLA-B*38:02H HLA-B*15:03H
  source 1..9: note = Severe acute respiratory syndrome coronavirus 2
IKASMPTTI

SEQ ID NO: 2146 - protein, 9 aa, Severe acute respiratory syndrome-related coronavirus
  REGION 1..9: note = Table A: HLA-B*56:01H HLA-B*55:02H HLA-B*55:01H
  source 1..9: note = Severe acute respiratory syndrome coronavirus 2
KASMPTTIA

SEQ ID NO: 2147 - protein, 9 aa, Severe acute respiratory syndrome-related coronavirus
  REGION 1..9: note = Table A: HLA-A*11:303H HLA-A*74:01H HLA-A*03:01H HLA-A*03:02H HLA-A*11:01H HLA-A*11:02H HLA-A*36:01H HLA-B*46:01H HLA-B*27:05H HLA-A*30:01M HLA-A*30:02M HLA-A*68:01M HLA-C*15:05H HLA-A*34:01H HLA-A*34:02H
  REGION 1..9: note = CONT. FROM ABOVE: HLA-C*07:27H HLA-B*37:01H HLA-A*31:01H HLA- B*57:03H HLA-A*66:01M
  source 1..9: note = Severe acute respiratory syndrome coronavirus 2
ASMPTTIAK

SEQ ID NO: 2148 - protein, 9 aa, Severe acute respiratory syndrome-related coronavirus
  REGION 1..9: note = Table A: HLA-B*54:01H
  source 1..9: note = Severe acute respiratory syndrome coronavirus 2
MPTTIAKNT

SEQ ID NO: 2149 - protein, 9 aa, Severe acute respiratory syndrome-related coronavirus
  REGION 1..9: note = Table A: HLA-A*11:303H HLA-A*03:01H HLA-A*03:02H HLA-A*11:01M HLA-A*11:02M HLA-A*33:03H HLA-A*26:03H HLA-A*68:01H HLA-A*34:01H HLA-A*34:02H HLA-C*07:27H HLA-A*66:01M
  source 1..9: note = Severe acute respiratory syndrome coronavirus 2
TTIAKNTVK

SEQ ID NO: 2150 - protein, 9 aa, Severe acute respiratory syndrome-related coronavirus
  REGION 1..9: note = Table A: HLA-C*16:01H HLA-B*08:01H HLA-C*12:05H HLA-C*12:03H HLA-A*02:03M HLA-B*51:01H HLA-B*38:02H HLA-B*07:04M HLA-C*02:02H
  source 1..9: note = Severe acute respiratory syndrome coronavirus 2
IAKNTVKSV

SEQ ID NO: 2151 - protein, 9 aa, Severe acute respiratory syndrome-related coronavirus
  REGION 1..9: note = Table A: HLA-B*58:01H HLA-A*25:01M HLA-A*26:01M HLA-A*26:02H HLA-A*26:03H HLA-A*68:01H HLA-A*34:01H HLA-A*34:02M HLA-B*57:03H HLA-A*66:01M
  source 1..9: note = Severe acute respiratory syndrome coronavirus 2
NTVKSVGKF

SEQ ID NO: 2152 - protein, 9 aa, Severe acute respiratory syndrome-related coronavirus
  REGION 1..9: note = Table A: HLA-B*07:04H
  source 1..9: note = Severe acute respiratory syndrome coronavirus 2
TVKSVGKFC

SEQ ID NO: 2153 - protein, 9 aa, Severe acute respiratory syndrome-related coronavirus
  REGION 1..9: note = Table A: HLA-B*15:03M
  source 1..9: note = Severe acute respiratory syndrome coronavirus 2
GKFCLEASF

SEQ ID NO: 2154 - protein, 9 aa, Severe acute respiratory syndrome-related coronavirus
  REGION 1..9: note = Table A: HLA-A*29:02H
  source 1..9: note = Severe acute respiratory syndrome coronavirus 2
FCLEASFNY

SEQ ID NO: 2155 - protein, 9 aa, Severe acute respiratory syndrome-related coronavirus
  REGION 1..9: note = Table A: HLA-C*03:02H HLA-C*03:04H HLA-C*15:02H HLA-B*38:02H
  source 1..9: note = Severe acute respiratory syndrome coronavirus 2
FNYLKSPNF

SEQ ID NO: 2156 - protein, 9 aa, Severe acute respiratory syndrome-related coronavirus
  REGION 1..9: note = Table A: HLA-A*74:01H HLA-A*34:02H HLA-A*66:01H
  source 1..9: note = Severe acute respiratory syndrome coronavirus 2
YLKSPNFSK

SEQ ID NO: 2157 - protein, 9 aa, Severe acute respiratory syndrome-related coronavirus
  REGION 1..9: note = Table A: HLA-B*15:03H
  source 1..9: note = Severe acute respiratory syndrome coronavirus 2
LKSPNFSKL

SEQ ID NO: 2158 - protein, 9 aa, Severe acute respiratory syndrome-related coronavirus
  REGION 1..9: note = Table A: HLA-B*58:02M HLA-B*57:03M
  source 1..9: note = Severe acute respiratory syndrome coronavirus 2
KSPNFSKLI

SEQ ID NO: 2159 - protein, 9 aa, Severe acute respiratory syndrome-related coronavirus
  REGION 1..9: note = Table A: HLA-B*57:03H
  source 1..9: note = Severe acute respiratory syndrome coronavirus 2
KLINIIIWF

SEQ ID NO: 2160 - protein, 9 aa, Severe acute respiratory syndrome-related coronavirus
  REGION 1..9: note = Table A: HLA-A*02:04M
  source 1..9: note = Severe acute respiratory syndrome coronavirus 2
LINIIIWFL

SEQ ID NO: 2161 - protein, 9 aa, Severe acute respiratory syndrome-related coronavirus
  REGION 1..9: note = Table A: HLA-C*15:02H HLA-A*02:04H
  source 1..9: note = Severe acute respiratory syndrome coronavirus 2
NIIIWFLLL

SEQ ID NO: 2162 - protein, 9 aa, Severe acute respiratory syndrome-related coronavirus
  REGION 1..9: note = Table A: HLA-A*02:11H
  source 1..9: note = Severe acute respiratory syndrome coronavirus 2
IIWFLLLSV

SEQ ID NO: 2163 - protein, 9 aa, Severe acute respiratory syndrome-related coronavirus
  REGION 1..9: note = Table A: HLA-B*15:02H
  source 1..9: note = Severe acute respiratory syndrome coronavirus 2
SVCLGSLIY

SEQ ID NO: 2164 - protein, 9 aa, Severe acute respiratory syndrome-related coronavirus
  REGION 1..9: note = Table A: HLA-B*56:01H HLA-B*55:02H HLA-B*54:01H
  source 1..9: note = Severe acute respiratory syndrome coronavirus 2
LGSLIYSTA

SEQ ID NO: 2165 - protein, 9 aa, Severe acute respiratory syndrome-related coronavirus
  REGION 1..9: note = Table A: HLA-B*39:06M HLA-B*50:01H
  source 1..9: note = Severe acute respiratory syndrome coronavirus 2
GSLIYSTAA

SEQ ID NO: 2166 - protein, 9 aa, Severe acute respiratory syndrome-related coronavirus
  REGION 1..9: note = Table A: HLA-C*14:03H HLA-A*11:303M HLA-B*46:01M HLA-A*26:03M HLA-C*03:03H HLA-A*02:11H HLA-C*03:04H HLA-C*15:05H HLA-C*01:02M HLA-A*02:04M HLA-A*02:05H HLA-B*14:01H HLA-A*02:01H HLA-A*02:02M HLA-A*02:03M
  REGION 1..9: note = CONT. FROM ABOVE: HLA-A*34:01H HLA-C*08:01H HLA-B*38:02M HLA- B*15:01H HLA-B*15:02M HLA-B*07:05H HLA-B*15:10H
  source 1..9: note = Severe acute respiratory syndrome coronavirus 2
SLIYSTAAL

SEQ ID NO: 2167 - protein, 9 aa, Severe acute respiratory syndrome-related coronavirus
  REGION 1..9: note = Table A: HLA-C*14:03H
  source 1..9: note = Severe acute respiratory syndrome coronavirus 2
IYSTAALGV

SEQ ID NO: 2168 - protein, 9 aa, Severe acute respiratory syndrome-related coronavirus
  REGION 1..9: note = Table A: HLA-A*68:02H HLA-C*15:05H HLA-B*57:03H
  source 1..9: note = Severe acute respiratory syndrome coronavirus 2
STAALGVLM

SEQ ID NO: 2169 - protein, 9 aa, Severe acute respiratory syndrome-related coronavirus
  REGION 1..9: note = Table A: HLA-A*02:02M HLA-A*02:03H
  source 1..9: note = Severe acute respiratory syndrome coronavirus 2
ALGVLMSNL

SEQ ID NO: 2170 - protein, 9 aa, Severe acute respiratory syndrome-related coronavirus
  REGION 1..9: note = Table A: HLA-B*58:01H HLA-A*36:01H HLA-B*46:01H HLA-A*01:01H HLA-A*30:02M HLA-B*35:01H HLA-B*15:01H
  source 1..9: note = Severe acute respiratory syndrome coronavirus 2
MSNLGMPSY

SEQ ID NO: 2171 - protein, 9 aa, Severe acute respiratory syndrome-related coronavirus
  REGION 1..9: note = Table A: HLA-B*15:01H
  source 1..9: note = Severe acute respiratory syndrome coronavirus 2
GMPSYCTGY

SEQ ID NO: 2172 - protein, 9 aa, Severe acute respiratory syndrome-related coronavirus
  REGION 1..9: note = Table A: HLA-A*34:01M HLA-A*34:02H HLA-A*66:01H
  source 1..9: note = Severe acute respiratory syndrome coronavirus 2
MPSYCTGYR

SEQ ID NO: 2173 - protein, 9 aa, Severe acute respiratory syndrome-related coronavirus
  REGION 1..9: note = Table A: HLA-A*68:02H HLA-C*15:05H HLA-B*51:01M HLA-B*52:01H HLA-B*39:01H
  source 1..9: note = Severe acute respiratory syndrome coronavirus 2
EGYLNSTNV

SEQ ID NO: 2174 - protein, 9 aa, Severe acute respiratory syndrome-related coronavirus
  REGION 1..9: note = Table A: HLA-A*02:11H HLA-C*15:05H HLA-A*02:04M HLA-B*14:01H HLA-A*02:01M HLA-A*02:02M HLA-A*02:03M HLA-B*38:01H HLA-B*38:02H HLA-B*13:02M
  source 1..9: note = Severe acute respiratory syndrome coronavirus 2
YLNSTNVTI

SEQ ID NO: 2175 - protein, 9 aa, Severe acute respiratory syndrome-related coronavirus
  REGION 1..9: note = Table A: HLA-A*68:02H
  source 1..9: note = Severe acute respiratory syndrome coronavirus 2
NSTNVTIAT

SEQ ID NO: 2176 - protein, 9 aa, Severe acute respiratory syndrome-related coronavirus
  REGION 1..9: note = Table A: HLA-B*58:01H HLA-B*58:02H HLA-C*14:03H HLA-A*11:303H HLA-B*44:02H HLA-C*16:01H HLA-C*16:04H HLA-A*03:01H HLA-A*03:02H HLA-A*11:01M HLA-A*11:02H HLA-A*36:01H HLA-B*57:01M HLA-A*25:01M HLA-B*46:01M
  REGION 1..9: note = CONT. FROM ABOVE: HLA-A*26:01M HLA-A*26:02M HLA-A*26:03H HLA- A*29:01M HLA-A*29:02M HLA-B*44:03H HLA-B*18:01H HLA-C*07:01H HLA-C*03:02H HLA-A*30:02H HLA-A*68:01H HLA-C*15:05M HLA-C*12 :02H HLA-A*02:03H HLA-A*34:02M HLA-C*07:27H HLA-B*35:01H
  REGION 1..9: note = CONT. FROM ABOVE: HLA-B*35:08H HLA-B*35:07H HLA-B*38:02M HLA- A*32:01H HLA-B*15:01H HLA-B*15:02M HLA-B*15:03H HLA-B*39:01H HLA-A*31:01H HLA-B*07:05H HLA-B*57:03H HLA-C*02:02H HLA-B*15 :11H
  source 1..9: note = Severe acute respiratory syndrome coronavirus 2
STNVTIATY

SEQ ID NO: 2177 - protein, 9 aa, Severe acute respiratory syndrome-related coronavirus
  REGION 1..9: note = Table A: HLA-A*68:02H
  source 1..9: note = Severe acute respiratory syndrome coronavirus 2
TNVTIATYC

SEQ ID NO: 2178 - protein, 9 aa, Severe acute respiratory syndrome-related coronavirus
  REGION 1..9: note = Table A: HLA-A*68:02H HLA-C*15:05H HLA-A*02:03H
  source 1..9: note = Severe acute respiratory syndrome coronavirus 2
CTGSIPCSV

SEQ ID NO: 2179 - protein, 9 aa, Severe acute respiratory syndrome-related coronavirus
  REGION 1..9: note = Table A: HLA-C*15:05H
  source 1..9: note = Severe acute respiratory syndrome coronavirus 2
GSIPCSVCL

SEQ ID NO: 2180 - protein, 9 aa, Severe acute respiratory syndrome-related coronavirus
  REGION 1..9: note = Table A: HLA-B*35:01H HLA-B*39:01H
  source 1..9: note = Severe acute respiratory syndrome coronavirus 2
SGLDSLDTY

SEQ ID NO: 2181 - protein, 9 aa, Severe acute respiratory syndrome-related coronavirus
  REGION 1..9: note = Table A: HLA-A*25:01H HLA-A*68:02H HLA-B*35:03H HLA-C*15:05H HLA-B*35:01H HLA-C*08:01H HLA-B*38:02H HLA-B*39:01H HLA-B*07:05H
  source 1..9: note = Severe acute respiratory syndrome coronavirus 2
DSLDTYPSL

SEQ ID NO: 2182 - protein, 9 aa, Severe acute respiratory syndrome-related coronavirus
  REGION 1..9: note = Table A: HLA-A*25:01M HLA-A*26:02H HLA-A*68:02H HLA-C*15:05M HLA-A*02:05H HLA-B*51:01H HLA-C*08:01H HLA-B*38:02M
  source 1..9: note = Severe acute respiratory syndrome coronavirus 2
DTYPSLETI

SEQ ID NO: 2183 - protein, 9 aa, Severe acute respiratory syndrome-related coronavirus
  REGION 1..9: note = Table A: HLA-B*53:01M HLA-B*35:03H HLA-C*15:05H HLA-B*35:02H HLA-B*51:01M HLA-B*35:12H HLA-B*38:02H HLA-B*54:01H
  source 1..9: note = Severe acute respiratory syndrome coronavirus 2
YPSLETIQI

SEQ ID NO: 2184 - protein, 9 aa, Severe acute respiratory syndrome-related coronavirus
  REGION 1..9: note = Table A: HLA-A*26:03H
  source 1..9: note = Severe acute respiratory syndrome coronavirus 2
ETIQITISS

SEQ ID NO: 2185 - protein, 9 aa, Severe acute respiratory syndrome-related coronavirus
  REGION 1..9: note = Table A: HLA-A*25:01H HLA-B*46:01H HLA-A*26:02H HLA-B*38:02H HLA-B*15:01M HLA-B*15:02M HLA-B*07:05H
  source 1..9: note = Severe acute respiratory syndrome coronavirus 2
TIQITISSF

SEQ ID NO: 2186 - protein, 9 aa, Severe acute respiratory syndrome-related coronavirus
  REGION 1..9: note = Table A: HLA-B*58:01H HLA-B*53:01H HLA-B*15:13H HLA-B*57:03H
  source 1..9: note = Severe acute respiratory syndrome coronavirus 2
QITISSFKW

SEQ ID NO: 2187 - protein, 9 aa, Severe acute respiratory syndrome-related coronavirus
  REGION 1..9: note = Table A: HLA-C*14:02M HLA-C*14:03M HLA-B*46:01M HLA-A*24:02H HLA-A*24:07H HLA-A*23:01H HLA-B*15:02H
  source 1..9: note = Severe acute respiratory syndrome coronavirus 2
SFKWDLTAF

SEQ ID NO: 2188 - protein, 9 aa, Severe acute respiratory syndrome-related coronavirus
  REGION 1..9: note = Table A: HLA-C*04:03H
  source 1..9: note = Severe acute respiratory syndrome coronavirus 2
KWDLTAFGL

SEQ ID NO: 2189 - protein, 9 aa, Severe acute respiratory syndrome-related coronavirus
  REGION 1..9: note = Table A: HLA-B*58:01M HLA-C*16:04H HLA-B*57:01M HLA-A*25:01H HLA-B*53:01H HLA-A*68:02H HLA-B*35:03H HLA-C*12:03H HLA-B*35:01M HLA-B*35:07H HLA-B*38:02M HLA-B*57:03M
  source 1..9: note = Severe acute respiratory syndrome coronavirus 2
TAFGLVAEW

SEQ ID NO: 2190 - protein, 9 aa, Severe acute respiratory syndrome-related coronavirus
  REGION 1..9: note = Table A: HLA-A*36:01H HLA-A*29:01H HLA-A*29:02M HLA-C*03:02H HLA-A*34:02H
  source 1..9: note = Severe acute respiratory syndrome coronavirus 2
LVAEWFLAY

SEQ ID NO: 2191 - protein, 9 aa, Severe acute respiratory syndrome-related coronavirus
  REGION 1..9: note = Table A: HLA-C*04:03H
  source 1..9: note = Severe acute respiratory syndrome coronavirus 2
VAEWFLAYI

SEQ ID NO: 2192 - protein, 9 aa, Severe acute respiratory syndrome-related coronavirus
  REGION 1..9: note = Table A: HLA-A*74:01M HLA-A*34:01H HLA-A*66:01H
  source 1..9: note = Severe acute respiratory syndrome coronavirus 2
FLAYILFTR

SEQ ID NO: 2193 - protein, 9 aa, Severe acute respiratory syndrome-related coronavirus
  REGION 1..9: note = Table A: HLA-B*57:03H
  source 1..9: note = Severe acute respiratory syndrome coronavirus 2
LAYILFTRF

SEQ ID NO: 2194 - protein, 9 aa, Severe acute respiratory syndrome-related coronavirus
  REGION 1..9: note = Table A: HLA-C*14:02H HLA-C*14:03H HLA-C*06:02H HLA-A*24:02H HLA-A*24:07M HLA-A*23:01H
  source 1..9: note = Severe acute respiratory syndrome coronavirus 2
AYILFTRFF

SEQ ID NO: 2195 - protein, 9 aa, Severe acute respiratory syndrome-related coronavirus
  REGION 1..9: note = Table A: HLA-A*29:02M
  source 1..9: note = Severe acute respiratory syndrome coronavirus 2
YILFTRFFY

SEQ ID NO: 2196 - protein, 9 aa, Severe acute respiratory syndrome-related coronavirus
  REGION 1..9: note = Table A: HLA-A*02:11H HLA-A*68:02H HLA-C*15:02H HLA-A*02:04H HLA-A*02:06H HLA-A*02:07M HLA-A*02:02M HLA-A*02:03H HLA-C*08:01H HLA-B*40:06H
  source 1..9: note = Severe acute respiratory syndrome coronavirus 2
ILFTRFFYV

SEQ ID NO: 2197 - protein, 9 aa, Severe acute respiratory syndrome-related coronavirus
  REGION 1..9: note = Table A: HLA-A*24:07M
  source 1..9: note = Severe acute respiratory syndrome coronavirus 2
LFTRFFYVL

SEQ ID NO: 2198 - protein, 9 aa, Severe acute respiratory syndrome-related coronavirus
  REGION 1..9: note = Table A: HLA-C*06:02M HLA-B*27:05M HLA-C*07:01H HLA-C*07:02H HLA-B*27:02H HLA-B*14:02H HLA-B*14:01H HLA-B*38:02H
  source 1..9: note = Severe acute respiratory syndrome coronavirus 2
TRFFYVLGL

SEQ ID NO: 2199 - protein, 9 aa, Severe acute respiratory syndrome-related coronavirus
  REGION 1..9: note = Table A: HLA-C*14:03H
  source 1..9: note = Severe acute respiratory syndrome coronavirus 2
FFYVLGLAA

SEQ ID NO: 2200 - protein, 9 aa, Severe acute respiratory syndrome-related coronavirus
  REGION 1..9: note = Table A: HLA-C*14:03H HLA-A*24:02H
  source 1..9: note = Severe acute respiratory syndrome coronavirus 2
FYVLGLAAI

SEQ ID NO: 2201 - protein, 9 aa, Severe acute respiratory syndrome-related coronavirus
  REGION 1..9: note = Table A: HLA-B*35:03H HLA-B*35:01H HLA-B*38:02H HLA-B*15:02H
  source 1..9: note = Severe acute respiratory syndrome coronavirus 2
YVLGLAAIM

SEQ ID NO: 2202 - protein, 9 aa, Severe acute respiratory syndrome-related coronavirus
  REGION 1..9: note = Table A: HLA-A*02:02H HLA-B*38:02H HLA-B*15:01H HLA-B*13:02H
  source 1..9: note = Severe acute respiratory syndrome coronavirus 2
GLAAIMQLF

SEQ ID NO: 2203 - protein, 9 aa, Severe acute respiratory syndrome-related coronavirus
  REGION 1..9: note = Table A: HLA-B*58:01H HLA-B*57:03H
  source 1..9: note = Severe acute respiratory syndrome coronavirus 2
LAAIMQLFF

SEQ ID NO: 2204 - protein, 9 aa, Severe acute respiratory syndrome-related coronavirus
  REGION 1..9: note = Table A: HLA-A*11:01H HLA-A*11:02H HLA-A*29:01H HLA-A*29:02M HLA-A*30:02M
  source 1..9: note = Severe acute respiratory syndrome coronavirus 2
AIMQLFFSY

SEQ ID NO: 2205 - protein, 9 aa, Severe acute respiratory syndrome-related coronavirus
  REGION 1..9: note = Table A: HLA-C*14:02M HLA-C*14:03M HLA-A*29:02H HLA-C*04:03H HLA-A*24:07M HLA-A*23:01H
  source 1..9: note = Severe acute respiratory syndrome coronavirus 2
FFSYFAVHF

SEQ ID NO: 2206 - protein, 9 aa, Severe acute respiratory syndrome-related coronavirus
  REGION 1..9: note = Table A: HLA-B*58:02M HLA-A*02:11M HLA-A*68:02M HLA-C*15:02M HLA-A*02:02H HLA-C*17:01H HLA-C*08:01H HLA-B*38:02H HLA-B*57:03M
  source 1..9: note = Severe acute respiratory syndrome coronavirus 2
FSYFAVHFI

SEQ ID NO: 2207 - protein, 9 aa, Severe acute respiratory syndrome-related coronavirus
  REGION 1..9: note = Table A: HLA-B*58:01H HLA-B*57:01M HLA-A*25:01M HLA-B*44:03H HLA-B*53:01H HLA-B*15:13M HLA-B*38:02H HLA-A*32:01H HLA-B*57:03H HLA-B*13:01M
  source 1..9: note = Severe acute respiratory syndrome coronavirus 2
AVHFISNSW

SEQ ID NO: 2208 - protein, 9 aa, Severe acute respiratory syndrome-related coronavirus
  REGION 1..9: note = Table A: HLA-B*38:02H HLA-B*15:10H
  source 1..9: note = Severe acute respiratory syndrome coronavirus 2
VHFISNSWL

SEQ ID NO: 2209 - protein, 9 aa, Severe acute respiratory syndrome-related coronavirus
  REGION 1..9: note = Table A: HLA-C*14:03H HLA-A*29:02H HLA-A*24:07M
  source 1..9: note = Severe acute respiratory syndrome coronavirus 2
HFISNSWLM

SEQ ID NO: 2210 - protein, 9 aa, Severe acute respiratory syndrome-related coronavirus
  REGION 1..9: note = Table A: HLA-C*15:02H
  source 1..9: note = Severe acute respiratory syndrome coronavirus 2
ISNSWLMWL

SEQ ID NO: 2211 - protein, 9 aa, Severe acute respiratory syndrome-related coronavirus
  REGION 1..9: note = Table A: HLA-A*02:11H HLA-A*02:04M HLA-A*02:02H
  source 1..9: note = Severe acute respiratory syndrome coronavirus 2
WLMWLIINL

SEQ ID NO: 2212 - protein, 9 aa, Severe acute respiratory syndrome-related coronavirus
  REGION 1..9: note = Table A: HLA-A*02:11H HLA-A*02:04H HLA-A*02:07H
  source 1..9: note = Severe acute respiratory syndrome coronavirus 2
LMWLIINLV

SEQ ID NO: 2213 - protein, 9 aa, Severe acute respiratory syndrome-related coronavirus
  REGION 1..9: note = Table A: HLA-A*02:04H
  source 1..9: note = Severe acute respiratory syndrome coronavirus 2
WLIINLVQM

SEQ ID NO: 2214 - protein, 9 aa, Severe acute respiratory syndrome-related coronavirus
  REGION 1..9: note = Table A: HLA-B*54:01H
  source 1..9: note = Severe acute respiratory syndrome coronavirus 2
LVQMAPISA

SEQ ID NO: 2215 - protein, 9 aa, Severe acute respiratory syndrome-related coronavirus
  REGION 1..9: note = Table A: HLA-B*48:01M HLA-C*14:03H HLA-A*11:303M HLA-B*46:01M HLA-C*03:02H HLA-C*03:04H HLA-C*15:05M HLA-C*12:02H HLA-B*14:01H HLA-C*07:27H HLA-B*52:01H HLA-B*37:01H HLA-B*38:02M HLA-B*40:02H HLA-B*15:01H
  REGION 1..9: note = CONT. FROM ABOVE: HLA-B*15:02H HLA-B*15:03H HLA-B*39:01H HLA- B*07:05M HLA-B*41:02H HLA-B*13:01H HLA-B*13:02M HLA-B*15:11H
  source 1..9: note = Severe acute respiratory syndrome coronavirus 2
VQMAPISAM

SEQ ID NO: 2216 - protein, 9 aa, Severe acute respiratory syndrome-related coronavirus
  REGION 1..9: note = Table A: HLA-A*02:11H HLA-A*68:02M HLA-C*15:05H HLA-A*02:04H HLA-A*02:05M HLA-A*02:06H HLA-A*02:07H HLA-A*02:08M HLA-A*02:01M HLA-A*02:02H HLA-A*02:03H HLA-B*52:01M HLA-B*38:02H HLA-B*39:01H HLA-B*07:05H HLA-B*13:02M
  source 1..9: note = Severe acute respiratory syndrome coronavirus 2
QMAPISAMV

SEQ ID NO: 2217 - protein, 9 aa, Severe acute respiratory syndrome-related coronavirus
  REGION 1..9: note = Table A: HLA-A*34:01H
  source 1..9: note = Severe acute respiratory syndrome coronavirus 2
MAPISAMVR

SEQ ID NO: 2218 - protein, 9 aa, Severe acute respiratory syndrome-related coronavirus
  REGION 1..9: note = Table A: HLA-B*42:01H HLA-B*56:01H HLA-B*53:01M HLA-B*55:02H HLA-B*35:03M HLA-C*15:05H HLA-B*55:01H HLA-A*34:01H HLA-B*35:01M HLA-B*35:02H HLA-B*35:07M HLA-B*35:12H HLA-B*07:02M HLA-B*07:04M HLA-B*07:05H
  source 1..9: note = Severe acute respiratory syndrome coronavirus 2
APISAMVRM

SEQ ID NO: 2219 - protein, 9 aa, Severe acute respiratory syndrome-related coronavirus
  REGION 1..9: note = Table A: HLA-C*16:01H
  source 1..9: note = Severe acute respiratory syndrome coronavirus 2
SAMVRMYIF

SEQ ID NO: 2220 - protein, 9 aa, Severe acute respiratory syndrome-related coronavirus
  REGION 1..9: note = Table A: HLA-A*32:01H HLA-B*15:03H
  source 1..9: note = Severe acute respiratory syndrome coronavirus 2
RMYIFFASF

SEQ ID NO: 2221 - protein, 9 aa, Severe acute respiratory syndrome-related coronavirus
  REGION 1..9: note = Table A: HLA-C*14:03H HLA-A*29:02M
  source 1..9: note = Severe acute respiratory syndrome coronavirus 2
MYIFFASFY

SEQ ID NO: 2222 - protein, 9 aa, Severe acute respiratory syndrome-related coronavirus
  REGION 1..9: note = Table A: HLA-A*29:02M
  source 1..9: note = Severe acute respiratory syndrome coronavirus 2
YIFFASFYY

SEQ ID NO: 2223 - protein, 9 aa, Severe acute respiratory syndrome-related coronavirus
  REGION 1..9: note = Table A: HLA-A*24:07H
  source 1..9: note = Severe acute respiratory syndrome coronavirus 2
FFASFYYVW

SEQ ID NO: 2224 - protein, 9 aa, Severe acute respiratory syndrome-related coronavirus
  REGION 1..9: note = Table A: HLA-A*34:02H
  source 1..9: note = Severe acute respiratory syndrome coronavirus 2
FASFYYVWK

SEQ ID NO: 2225 - protein, 9 aa, Severe acute respiratory syndrome-related coronavirus
  REGION 1..9: note = Table A: HLA-C*14:02H HLA-C*14:03M HLA-A*29:02H HLA-A*30:02H
  source 1..9: note = Severe acute respiratory syndrome coronavirus 2
SFYYVWKSY

SEQ ID NO: 2226 - protein, 9 aa, Severe acute respiratory syndrome-related coronavirus
  REGION 1..9: note = Table A: HLA-C*14:03H HLA-C*06:02H
  source 1..9: note = Severe acute respiratory syndrome coronavirus 2
FYYVWKSYV

SEQ ID NO: 2227 - protein, 9 aa, Severe acute respiratory syndrome-related coronavirus
  REGION 1..9: note = Table A: HLA-C*14:03H
  source 1..9: note = Severe acute respiratory syndrome coronavirus 2
YYVWKSYVH

SEQ ID NO: 2228 - protein, 9 aa, Severe acute respiratory syndrome-related coronavirus
  REGION 1..9: note = Table A: HLA-A*02:11H HLA-A*68:02H HLA-A*02:04H HLA-A*02:06M HLA-A*02:07M HLA-A*02:02H HLA-C*08:01H HLA-B*40:06H HLA-B*13:02H
  source 1..9: note = Severe acute respiratory syndrome coronavirus 2
YVWKSYVHV

SEQ ID NO: 2229 - protein, 9 aa, Severe acute respiratory syndrome-related coronavirus
  REGION 1..9: note = Table A: HLA-A*24:07H
  source 1..9: note = Severe acute respiratory syndrome coronavirus 2
VWKSYVHVV

SEQ ID NO: 2230 - protein, 9 aa, Severe acute respiratory syndrome-related coronavirus
  REGION 1..9: note = Table A: HLA-B*57:03H
  source 1..9: note = Severe acute respiratory syndrome coronavirus 2
KSYVHVVDG

SEQ ID NO: 2231 - protein, 9 aa, Severe acute respiratory syndrome-related coronavirus
  REGION 1..9: note = Table A: HLA-C*15:05H HLA-B*57:03H
  source 1..9: note = Severe acute respiratory syndrome coronavirus 2
ATRVECTTI

SEQ ID NO: 2232 - protein, 9 aa, Severe acute respiratory syndrome-related coronavirus
  REGION 1..9: note = Table A: HLA-A*68:02M HLA-B*38:02H
  source 1..9: note = Severe acute respiratory syndrome coronavirus 2
ECTTIVNGV

SEQ ID NO: 2233 - protein, 9 aa, Severe acute respiratory syndrome-related coronavirus
  REGION 1..9: note = Table A: HLA-A*34:02H HLA-A*66:01H
  source 1..9: note = Severe acute respiratory syndrome coronavirus 2
CTTIVNGVR

SEQ ID NO: 2234 - protein, 9 aa, Severe acute respiratory syndrome-related coronavirus
  REGION 1..9: note = Table A: HLA-A*74:01M HLA-A*11:01H HLA-A*33:01H HLA-A*33:03M HLA-A*26:03H HLA-A*68:01H HLA-A*34:01H HLA-A*34:02M HLA-A*31:01H HLA-A*66:01H
  source 1..9: note = Severe acute respiratory syndrome coronavirus 2
TTIVNGVRR

SEQ ID NO: 2235 - protein, 9 aa, Severe acute respiratory syndrome-related coronavirus
  REGION 1..9: note = Table A: HLA-A*32:01H HLA-B*07:04H
  source 1..9: note = Severe acute respiratory syndrome coronavirus 2
IVNGVRRSF

SEQ ID NO: 2236 - protein, 9 aa, Severe acute respiratory syndrome-related coronavirus
  REGION 1..9: note = Table A: HLA-A*30:01H HLA-A*30:02H HLA-B*38:02H
  source 1..9: note = Severe acute respiratory syndrome coronavirus 2
GVRRSFYVY

SEQ ID NO: 2237 - protein, 9 aa, Severe acute respiratory syndrome-related coronavirus
  REGION 1..9: note = Table A: HLA-C*14:03H
  source 1..9: note = Severe acute respiratory syndrome coronavirus 2
SFYVYANGG

SEQ ID NO: 2238 - protein, 9 aa, Severe acute respiratory syndrome-related coronavirus
  REGION 1..9: note = Table A: HLA-A*66:01H
  source 1..9: note = Severe acute respiratory syndrome coronavirus 2
YVYANGGKG

SEQ ID NO: 2239 - protein, 9 aa, Severe acute respiratory syndrome-related coronavirus
  REGION 1..9: note = Table A: HLA-C*14:02M HLA-C*14:03M HLA-A*24:02H HLA-A*24:07M HLA-A*23:01H
  source 1..9: note = Severe acute respiratory syndrome coronavirus 2
VYANGGKGF

SEQ ID NO: 2240 - protein, 9 aa, Severe acute respiratory syndrome-related coronavirus
  REGION 1..9: note = Table A: HLA-B*58:02H HLA-B*57:03M
  source 1..9: note = Severe acute respiratory syndrome coronavirus 2
KGFCKLHNW

SEQ ID NO: 2241 - protein, 9 aa, Severe acute respiratory syndrome-related coronavirus
  REGION 1..9: note = Table A: HLA-A*25:01M HLA-A*26:01H HLA-A*26:02H HLA-A*34:01H HLA-B*38:02H HLA-B*15:02M HLA-B*07:05H HLA-A*66:01H
  source 1..9: note = Severe acute respiratory syndrome coronavirus 2
DTFCAGSTF

SEQ ID NO: 2242 - protein, 9 aa, Severe acute respiratory syndrome-related coronavirus
  REGION 1..9: note = Table A: HLA-A*68:02H HLA-C*08:03H HLA-B*13:02M
  source 1..9: note = Severe acute respiratory syndrome coronavirus 2
GSTFISDEV

SEQ ID NO: 2243 - protein, 9 aa, Severe acute respiratory syndrome-related coronavirus
  REGION 1..9: note = Table A: HLA-A*33:03H HLA-A*68:01H HLA-A*34:01H HLA-A*66:01H
  source 1..9: note = Severe acute respiratory syndrome coronavirus 2
TFISDEVAR

SEQ ID NO: 2244 - protein, 9 aa, Severe acute respiratory syndrome-related coronavirus
  REGION 1..9: note = Table A: HLA-B*58:02H HLA-A*11:303M HLA-C*04:01H HLA-C*04:03H HLA-C*03:03M HLA-C*03:04M HLA-C*15:05M HLA-C*15:02H HLA-A*02:07M HLA-B*35:02H HLA-C*08:01H HLA-C*08:02H HLA-B*38:02H HLA-C*05:01M
  source 1..9: note = Severe acute respiratory syndrome coronavirus 2
ISDEVARDL

SEQ ID NO: 2245 - protein, 9 aa, Severe acute respiratory syndrome-related coronavirus
  REGION 1..9: note = Table A: HLA-B*44:05H HLA-B*44:03H HLA-B*18:01M HLA-B*14:02H HLA-B*14:01M HLA-B*40:01H HLA-B*40:02H HLA-B*07:05M HLA-B*41:02H
  source 1..9: note = Severe acute respiratory syndrome coronavirus 2
DEVARDLSL

SEQ ID NO: 2246 - protein, 9 aa, Severe acute respiratory syndrome-related coronavirus
  REGION 1..9: note = Table A: HLA-A*11:303H HLA-C*16:01H HLA-B*57:01H HLA-B*46:01M HLA-C*03:02M HLA-C*15:05H HLA-C*12:02M HLA-B*35:07H HLA-B*38:02H HLA-B*15:01H HLA-B*15:02H HLA-B*15:03H HLA-B*57:03M HLA-C*02:02H
  source 1..9: note = Severe acute respiratory syndrome coronavirus 2
VARDLSLQF

SEQ ID NO: 2247 - protein, 9 aa, Severe acute respiratory syndrome-related coronavirus
  REGION 1..9: note = Table A: HLA-B*58:02M
  source 1..9: note = Severe acute respiratory syndrome coronavirus 2
LSLQFKRPI

SEQ ID NO: 2248 - protein, 9 aa, Severe acute respiratory syndrome-related coronavirus
  REGION 1..9: note = Table A: HLA-A*02:11H
  source 1..9: note = Severe acute respiratory syndrome coronavirus 2
LQFKRPINP

SEQ ID NO: 2249 - protein, 9 aa, Severe acute respiratory syndrome-related coronavirus
  REGION 1..9: note = Table A: HLA-B*55:02H HLA-C*15:05H HLA-B*07:05H
  source 1..9: note = Severe acute respiratory syndrome coronavirus 2
RPINPTDQS

SEQ ID NO: 2250 - protein, 9 aa, Severe acute respiratory syndrome-related coronavirus
  REGION 1..9: note = Table A: HLA-B*53:01H HLA-B*51:01H
  source 1..9: note = Severe acute respiratory syndrome coronavirus 2
NPTDQSSYI

SEQ ID NO: 2251 - protein, 9 aa, Severe acute respiratory syndrome-related coronavirus
  REGION 1..9: note = Table A: HLA-A*68:02M HLA-A*02:08H HLA-B*38:02H HLA-B*13:02H
  source 1..9: note = Severe acute respiratory syndrome coronavirus 2
QSSYIVDSV

SEQ ID NO: 2252 - protein, 9 aa, Severe acute respiratory syndrome-related coronavirus
  REGION 1..9: note = Table A: HLA-C*14:02H HLA-C*14:03M HLA-C*04:01H HLA-A*68:02H HLA-C*15:05H HLA-A*24:02H HLA-A*24:07H HLA-C*08:01M HLA-A*23:01M HLA-B*38:02H HLA-B*39:01M HLA-B*49:01H
  source 1..9: note = Severe acute respiratory syndrome coronavirus 2
SYIVDSVTV

SEQ ID NO: 2253 - protein, 9 aa, Severe acute respiratory syndrome-related coronavirus
  REGION 1..9: note = Table A: HLA-A*11:303H HLA-A*03:01H HLA-A*03:02H HLA-A*11:01H HLA-A*11:02H HLA-A*36:01H HLA-B*46:01H HLA-A*26:03H HLA-C*03:03H HLA-B*27:02H HLA-A*68:01M HLA-A*68:02H HLA-A*02:03H HLA-A*34:01M HLA-A*34:02H
  REGION 1..9: note = CONT. FROM ABOVE: HLA-C*07:27H HLA-C*17:01H HLA-B*38:02M HLA- B*15:02H HLA-A*66:01M
  source 1..9: note = Severe acute respiratory syndrome coronavirus 2
YIVDSVTVK

SEQ ID NO: 2254 - protein, 9 aa, Severe acute respiratory syndrome-related coronavirus
  REGION 1..9: note = Table A: HLA-C*04:03H HLA-A*02:07H
  source 1..9: note = Severe acute respiratory syndrome coronavirus 2
IVDSVTVKN

SEQ ID NO: 2255 - protein, 9 aa, Severe acute respiratory syndrome-related coronavirus
  REGION 1..9: note = Table A: HLA-B*42:01H HLA-A*02:05H HLA-A*02:08M HLA-A*02:02H HLA-A*02:03H HLA-A*34:01H HLA-B*38:02H HLA-B*07:04M HLA-B*15:01H HLA-B*15:02H HLA-A*66:01H
  source 1..9: note = Severe acute respiratory syndrome coronavirus 2
TVKNGSIHL

SEQ ID NO: 2256 - protein, 9 aa, Severe acute respiratory syndrome-related coronavirus
  REGION 1..9: note = Table A: HLA-A*30:02H HLA-B*15:03M
  source 1..9: note = Severe acute respiratory syndrome coronavirus 2
VKNGSIHLY

SEQ ID NO: 2257 - protein, 9 aa, Severe acute respiratory syndrome-related coronavirus
  REGION 1..9: note = Table A: HLA-B*57:03H
  source 1..9: note = Severe acute respiratory syndrome coronavirus 2
KNGSIHLYF

SEQ ID NO: 2258 - protein, 9 aa, Severe acute respiratory syndrome-related coronavirus
  REGION 1..9: note = Table A: HLA-A*11:01H HLA-A*11:02H HLA-A*36:01H
  source 1..9: note = Severe acute respiratory syndrome coronavirus 2
GSIHLYFDK

SEQ ID NO: 2259 - protein, 9 aa, Severe acute respiratory syndrome-related coronavirus
  REGION 1..9: note = Table A: HLA-A*33:03H HLA-A*34:02H
  source 1..9: note = Severe acute respiratory syndrome coronavirus 2
LYFDKAGQK

SEQ ID NO: 2260 - protein, 9 aa, Severe acute respiratory syndrome-related coronavirus
  REGION 1..9: note = Table A: HLA-B*46:01H HLA-B*38:02H HLA-B*15:11H
  source 1..9: note = Severe acute respiratory syndrome coronavirus 2
FDKAGQKTY

SEQ ID NO: 2261 - protein, 9 aa, Severe acute respiratory syndrome-related coronavirus
  REGION 1..9: note = Table A: HLA-A*74:01H
  source 1..9: note = Severe acute respiratory syndrome coronavirus 2
KAGQKTYER

SEQ ID NO: 2262 - protein, 9 aa, Severe acute respiratory syndrome-related coronavirus
  REGION 1..9: note = Table A: HLA-A*68:02H
  source 1..9: note = Severe acute respiratory syndrome coronavirus 2
ERHSLSHFV

SEQ ID NO: 2263 - protein, 9 aa, Severe acute respiratory syndrome-related coronavirus
  REGION 1..9: note = Table A: HLA-B*58:02M HLA-C*03:03H HLA-A*02:11H HLA-C*03:04H HLA-A*68:02H HLA-C*15:05H HLA-C*15:02H HLA-A*02:04H HLA-A*02:06H HLA-A*34:02H HLA-C*17:01H HLA-C*08:01H HLA-B*38:02H HLA-B*57:03M HLA-C*07:04M
  source 1..9: note = Severe acute respiratory syndrome coronavirus 2
HSLSHFVNL

SEQ ID NO: 2264 - protein, 9 aa, Severe acute respiratory syndrome-related coronavirus
  REGION 1..9: note = Table A: HLA-B*48:01H HLA-C*08:01H HLA-B*38:01H HLA-B*38:02H HLA-B*39:06H HLA-B*39:01H HLA-B*15:10M
  source 1..9: note = Severe acute respiratory syndrome coronavirus 2
SHFVNLDNL

SEQ ID NO: 2265 - protein, 9 aa, Severe acute respiratory syndrome-related coronavirus
  REGION 1..9: note = Table A: HLA-A*33:03H
  source 1..9: note = Severe acute respiratory syndrome coronavirus 2
HFVNLDNLR

SEQ ID NO: 2266 - protein, 9 aa, Severe acute respiratory syndrome-related coronavirus
  REGION 1..9: note = Table A: HLA-B*54:01H
  source 1..9: note = Severe acute respiratory syndrome coronavirus 2
FVNLDNLRA

SEQ ID NO: 2267 - protein, 9 aa, Severe acute respiratory syndrome-related coronavirus
  REGION 1..9: note = Table A: HLA-B*37:01H
  source 1..9: note = Severe acute respiratory syndrome coronavirus 2
LDNLRANNT

SEQ ID NO: 2268 - protein, 9 aa, Severe acute respiratory syndrome-related coronavirus
  REGION 1..9: note = Table A: HLA-C*03:04H HLA-C*15:05H HLA-B*07:02M HLA-B*07:04M
  source 1..9: note = Severe acute respiratory syndrome coronavirus 2
RANNTKGSL

SEQ ID NO: 2269 - protein, 9 aa, Severe acute respiratory syndrome-related coronavirus
  REGION 1..9: note = Table A: HLA-B*13:02H
  source 1..9: note = Severe acute respiratory syndrome coronavirus 2
GSLPINVIV

SEQ ID NO: 2270 - protein, 9 aa, Severe acute respiratory syndrome-related coronavirus
  REGION 1..9: note = Table A: HLA-A*24:07H HLA-B*15:02H
  source 1..9: note = Severe acute respiratory syndrome coronavirus 2
SLPINVIVF

SEQ ID NO: 2271 - protein, 9 aa, Severe acute respiratory syndrome-related coronavirus
  REGION 1..9: note = Table A: HLA-B*45:01M HLA-B*50:01M
  source 1..9: note = Severe acute respiratory syndrome coronavirus 2
CEESSAKSA

SEQ ID NO: 2272 - protein, 9 aa, Severe acute respiratory syndrome-related coronavirus
  REGION 1..9: note = Table A: HLA-B*58:01H HLA-A*30:02H HLA-B*38:02H HLA-B*15:01M HLA-B*15:02H HLA-B*15:03H
  source 1..9: note = Severe acute respiratory syndrome coronavirus 2
SSAKSASVY

SEQ ID NO: 2273 - protein, 9 aa, Severe acute respiratory syndrome-related coronavirus
  REGION 1..9: note = Table A: HLA-B*58:02H HLA-A*11:303H HLA-C*16:01H HLA-C*16:04H HLA-B*57:01H HLA-B*46:01H HLA-A*26:01H HLA-C*03:02H HLA-A*30:02M HLA-C*12:02H HLA-C*12:03M HLA-A*34:01H HLA-C*07:27H HLA-B*35:01H HLA-B*35:07M
  REGION 1..9: note = CONT. FROM ABOVE: HLA-B*38:02M HLA-B*15:01H HLA-B*15:02M HLA- B*15:03H HLA-B*57:03H HLA-C*02:02H HLA-B*15:11H
  source 1..9: note = Severe acute respiratory syndrome coronavirus 2
SAKSASVYY

SEQ ID NO: 2274 - protein, 9 aa, Severe acute respiratory syndrome-related coronavirus
  REGION 1..9: note = Table A: HLA-A*11:303H HLA-C*16:01H HLA-B*53:01H HLA-C*03:04H HLA-B*35:03M HLA-C*15:05M HLA-C*17:01H HLA-C*08:01H HLA-B*38:02H HLA-C*07:04H
  source 1..9: note = Severe acute respiratory syndrome coronavirus 2
SASVYYSQL

SEQ ID NO: 2275 - protein, 9 aa, Severe acute respiratory syndrome-related coronavirus
  REGION 1..9: note = Table A: HLA-C*15:02H
  source 1..9: note = Severe acute respiratory syndrome coronavirus 2
ASVYYSQLM

SEQ ID NO: 2276 - protein, 9 aa, Severe acute respiratory syndrome-related coronavirus
  REGION 1..9: note = Table A: HLA-B*48:01H HLA-B*15:10H
  source 1..9: note = Severe acute respiratory syndrome coronavirus 2
SQLMCQPIL

SEQ ID NO: 2277 - protein, 9 aa, Severe acute respiratory syndrome-related coronavirus
  REGION 1..9: note = Table A: HLA-A*02:01H HLA-B*38:02H
  source 1..9: note = Severe acute respiratory syndrome coronavirus 2
QLMCQPILL

SEQ ID NO: 2278 - protein, 9 aa, Severe acute respiratory syndrome-related coronavirus
  REGION 1..9: note = Table A: HLA-B*56:01M HLA-B*55:02H HLA-B*55:01H HLA-B*39:06H HLA-B*54:01M
  source 1..9: note = Severe acute respiratory syndrome coronavirus 2
QPILLLDQA

SEQ ID NO: 2279 - protein, 9 aa, Severe acute respiratory syndrome-related coronavirus
  REGION 1..9: note = Table A: HLA-B*39:01H
  source 1..9: note = Severe acute respiratory syndrome coronavirus 2
DQALVSDVG

SEQ ID NO: 2280 - protein, 9 aa, Severe acute respiratory syndrome-related coronavirus
  REGION 1..9: note = Table A: HLA-A*68:02H HLA-A*02:05H HLA-A*02:08H HLA-C*08:01H HLA-B*38:02H HLA-B*39:01H
  source 1..9: note = Severe acute respiratory syndrome coronavirus 2
LVSDVGDSA

SEQ ID NO: 2281 - protein, 9 aa, Severe acute respiratory syndrome-related coronavirus
  REGION 1..9: note = Table A: HLA-B*35:02H HLA-C*08:02M HLA-B*39:01H HLA-C*05:01H
  source 1..9: note = Severe acute respiratory syndrome coronavirus 2
VGDSAEVAV

SEQ ID NO: 2282 - protein, 9 aa, Severe acute respiratory syndrome-related coronavirus
  REGION 1..9: note = Table A: HLA-A*26:01H HLA-A*26:02M HLA-A*68:01M HLA-A*68:02M HLA-B*35:03H HLA-C*15:05H HLA-A*34:01H HLA-A*34:02H HLA-B*35:01M HLA-B*35:02H HLA-B*51:01H HLA-B*35:12H HLA-B*38:02H HLA-B*15:02H HLA-B*07:05M HLA-A*66:01H
  source 1..9: note = Severe acute respiratory syndrome coronavirus 2
DSAEVAVKM

SEQ ID NO: 2283 - protein, 9 aa, Severe acute respiratory syndrome-related coronavirus
  REGION 1..9: note = Table A: HLA-C*04:03H HLA-B*35:01H
  source 1..9: note = Severe acute respiratory syndrome coronavirus 2
SAEVAVKMF

SEQ ID NO: 2284 - protein, 9 aa, Severe acute respiratory syndrome-related coronavirus
  REGION 1..9: note = Table A: HLA-B*58:01H HLA-C*16:04H HLA-A*36:01H HLA-C*03:02H HLA-B*35:01M HLA-B*35:08H HLA-B*35:07M HLA-C*08:01H HLA-B*38:02H HLA-B*07:05H
  source 1..9: note = Severe acute respiratory syndrome coronavirus 2
VAVKMFDAY

SEQ ID NO: 2285 - protein, 9 aa, Severe acute respiratory syndrome-related coronavirus
  REGION 1..9: note = Table A: HLA-A*68:02H HLA-B*38:02H
  source 1..9: note = Severe acute respiratory syndrome coronavirus 2
AVKMFDAYV

SEQ ID NO: 2286 - protein, 9 aa, Severe acute respiratory syndrome-related coronavirus
  REGION 1..9: note = Table A: HLA-A*02:11M HLA-A*02:02H
  source 1..9: note = Severe acute respiratory syndrome coronavirus 2
KMFDAYVNT

SEQ ID NO: 2287 - protein, 9 aa, Severe acute respiratory syndrome-related coronavirus
  REGION 1..9: note = Table A: HLA-C*14:02H HLA-C*14:03M HLA-C*04:01H HLA-C*04:03H HLA-B*18:01H HLA-A*02:07H HLA-A*24:02H HLA-B*35:01H HLA-B*35:08H HLA-A*24:07H HLA-C*08:02H HLA-A*23:01H HLA-B*38:01H HLA-B*38:02M HLA-B*15:02H HLA-B*39:01H
  REGION 1..9: note = CONT. FROM ABOVE: HLA-B*07:05H HLA-C*05:01H
  source 1..9: note = Severe acute respiratory syndrome coronavirus 2
MFDAYVNTF

SEQ ID NO: 2288 - protein, 9 aa, Severe acute respiratory syndrome-related coronavirus
  REGION 1..9: note = Table A: HLA-B*58:01H HLA-A*11:303H HLA-A*25:01M HLA-B*46:01M HLA-A*26:01M HLA-A*26:02H HLA-A*26:03H HLA-B*53:01H HLA-C*03:02M HLA-C*03:04H HLA-C*15:05M HLA-C*12:02M HLA-A*34:01H HLA-B*35:01M HLA-B*35:07H
  REGION 1..9: note = CONT. FROM ABOVE: HLA-B*15:13H HLA-B*38:02M HLA-B*15:01M HLA- B*15:02H HLA-B*15:03H HLA-B*07:05H HLA-B*57:03H HLA-C*02:02H HLA-B*15:11H HLA-C*07:04H HLA-A*66:01H
  source 1..9: note = Severe acute respiratory syndrome coronavirus 2
YVNTFSSTF

SEQ ID NO: 2289 - protein, 9 aa, Severe acute respiratory syndrome-related coronavirus
  REGION 1..9: note = Table A: HLA-A*02:11H HLA-A*68:02H HLA-A*02:06H
  source 1..9: note = Severe acute respiratory syndrome coronavirus 2
NTFSSTFNV

SEQ ID NO: 2290 - protein, 9 aa, Severe acute respiratory syndrome-related coronavirus
  REGION 1..9: note = Table A: HLA-C*07:04H
  source 1..9: note = Severe acute respiratory syndrome coronavirus 2
FSSTFNVPM

SEQ ID NO: 2291 - protein, 9 aa, Severe acute respiratory syndrome-related coronavirus
  REGION 1..9: note = Table A: HLA-A*11:303H HLA-A*74:01H HLA-A*03:01H HLA-A*03:02H HLA-A*11:01H HLA-A*11:02H HLA-A*36:01H HLA-B*57:01H HLA-A*33:03H HLA-A*30:01H HLA-A*30:02H HLA-A*68:01M HLA-A*68:02H HLA-A*34:02H HLA-C*07:27H
  REGION 1..9: note = CONT. FROM ABOVE: HLA-A*31:01H HLA-B*13:02H HLA-A*66:01M
  source 1..9: note = Severe acute respiratory syndrome coronavirus 2
STFNVPMEK

SEQ ID NO: 2292 - protein, 9 aa, Severe acute respiratory syndrome-related coronavirus
  REGION 1..9: note = Table A: HLA-B*07:05H
  source 1..9: note = Severe acute respiratory syndrome coronavirus 2
TFNVPMEKL

SEQ ID NO: 2293 - protein, 9 aa, Severe acute respiratory syndrome-related coronavirus
  REGION 1..9: note = Table A: HLA-B*42:01H HLA-B*56:01H HLA-B*08:01H HLA-B*53:01H HLA-B*55:02M HLA-B*35:03H HLA-C*15:05H HLA-B*14:02H HLA-B*55:01M HLA-B*51:01M HLA-C*08:01H HLA-B*38:02H HLA-B*54:01H HLA-B*07:02H HLA-B*07:04H HLA-B*07:05M
  source 1..9: note = Severe acute respiratory syndrome coronavirus 2
VPMEKLKTL

SEQ ID NO: 2294 - protein, 9 aa, Severe acute respiratory syndrome-related coronavirus
  REGION 1..9: note = Table A: HLA-B*45:01M HLA-B*40:06H HLA-B*50:01M
  source 1..9: note = Severe acute respiratory syndrome coronavirus 2
MEKLKTLVA

SEQ ID NO: 2295 - protein, 9 aa, Severe acute respiratory syndrome-related coronavirus
  REGION 1..9: note = Table A: HLA-A*02:11H HLA-A*02:05H HLA-A*02:08H HLA-A*02:02M HLA-A*02:03M HLA-B*38:02H
  source 1..9: note = Severe acute respiratory syndrome coronavirus 2
KLKTLVATA

SEQ ID NO: 2296 - protein, 9 aa, Severe acute respiratory syndrome-related coronavirus
  REGION 1..9: note = Table A: HLA-A*02:11H HLA-C*15:05H HLA-A*02:06H HLA-A*02:08H
  source 1..9: note = Severe acute respiratory syndrome coronavirus 2
KTLVATAEA

SEQ ID NO: 2297 - protein, 9 aa, Severe acute respiratory syndrome-related coronavirus
  REGION 1..9: note = Table A: HLA-B*35:03H HLA-C*15:05H HLA-A*02:05M HLA-A*02:08H HLA-A*02:02H HLA-B*35:02M HLA-B*35:12M HLA-B*38:02H HLA-B*39:01H
  source 1..9: note = Severe acute respiratory syndrome coronavirus 2
LVATAEAEL

SEQ ID NO: 2298 - protein, 9 aa, Severe acute respiratory syndrome-related coronavirus
  REGION 1..9: note = Table A: HLA-A*11:303H HLA-A*03:02H HLA-A*11:01M HLA-A*11:02H HLA-A*36:01H HLA-A*34:02H HLA-C*07:27H
  source 1..9: note = Severe acute respiratory syndrome coronavirus 2
ATAEAELAK

SEQ ID NO: 2299 - protein, 9 aa, Severe acute respiratory syndrome-related coronavirus
  REGION 1..9: note = Table A: HLA-B*44:02M HLA-B*44:05M HLA-C*16:04M HLA-B*45:01H HLA-B*44:03H HLA-A*68:02H HLA-A*02:05H HLA-B*37:01H HLA-B*40:02M HLA-B*40:06H HLA-B*41:02H HLA-B*49:01H HLA-B*50:01M
  source 1..9: note = Severe acute respiratory syndrome coronavirus 2
AEAELAKNV

SEQ ID NO: 2300 - protein, 9 aa, Severe acute respiratory syndrome-related coronavirus
  REGION 1..9: note = Table A: HLA-B*48:01H HLA-B*44:02M HLA-B*44:05H HLA-C*16:04H HLA-B*45:01M HLA-B*44:03M HLA-B*14:02H HLA-B*14:01H HLA-B*37:01H HLA-B*40:01H HLA-B*40:02H HLA-B*40:06H HLA-B*07:05H HLA-B*41:02H HLA-B*49:01M HLA-C*07:04H
  REGION 1..9: note = CONT. FROM ABOVE: HLA-B*50:01H
  source 1..9: note = Severe acute respiratory syndrome coronavirus 2
AELAKNVSL

SEQ ID NO: 2301 - protein, 9 aa, Severe acute respiratory syndrome-related coronavirus
  REGION 1..9: note = Table A: HLA-A*11:303H HLA-B*46:01H HLA-C*04:03H HLA-A*02:07H HLA-C*08:02H HLA-B*38:02M HLA-B*15:01H HLA-B*15:02H HLA-B*07:05H HLA-C*05:01H
  source 1..9: note = Severe acute respiratory syndrome coronavirus 2
SLDNVLSTF

SEQ ID NO: 2302 - protein, 9 aa, Severe acute respiratory syndrome-related coronavirus
  REGION 1..9: note = Table A: HLA-B*56:01H HLA-B*55:02M HLA-A*68:02H HLA-B*55:01H HLA-A*02:06M HLA-A*02:07H HLA-A*02:01H HLA-C*08:01H HLA-B*38:02H HLA-B*39:06H HLA-B*40:06H HLA-B*54:01H HLA-B*07:05H
  source 1..9: note = Severe acute respiratory syndrome coronavirus 2
NVLSTFISA

SEQ ID NO: 2303 - protein, 9 aa, Severe acute respiratory syndrome-related coronavirus
  REGION 1..9: note = Table A: HLA-A*02:11H HLA-B*55:02H HLA-A*02:04H HLA-A*02:05H HLA-B*14:01H HLA-A*02:01M HLA-A*02:02M HLA-A*02:03M HLA-B*38:02M HLA-B*39:06H
  source 1..9: note = Severe acute respiratory syndrome coronavirus 2
VLSTFISAA

SEQ ID NO: 2304 - protein, 9 aa, Severe acute respiratory syndrome-related coronavirus
  REGION 1..9: note = Table A: HLA-A*74:01M HLA-A*36:01H HLA-A*33:03H HLA-A*26:03H HLA-A*68:01M HLA-A*68:02H HLA-A*34:01M HLA-A*34:02M HLA-A*31:01H HLA-A*66:01H
  source 1..9: note = Severe acute respiratory syndrome coronavirus 2
LSTFISAAR

SEQ ID NO: 2305 - protein, 9 aa, Severe acute respiratory syndrome-related coronavirus
  REGION 1..9: note = Table A: HLA-B*38:02H HLA-B*15:02H
  source 1..9: note = Severe acute respiratory syndrome coronavirus 2
FISAARQGF

SEQ ID NO: 2306 - protein, 9 aa, Severe acute respiratory syndrome-related coronavirus
  REGION 1..9: note = Table A: HLA-B*13:01H HLA-B*13:02H
  source 1..9: note = Severe acute respiratory syndrome coronavirus 2
RQGFVDSDV

SEQ ID NO: 2307 - protein, 9 aa, Severe acute respiratory syndrome-related coronavirus
  REGION 1..9: note = Table A: HLA-A*03:02H HLA-A*36:01H HLA-C*04:03H HLA-A*02:07H HLA-A*34:02H
  source 1..9: note = Severe acute respiratory syndrome coronavirus 2
FVDSDVETK

SEQ ID NO: 2308 - protein, 9 aa, Severe acute respiratory syndrome-related coronavirus
  REGION 1..9: note = Table A: HLA-B*40:02H HLA-B*41:02H
  source 1..9: note = Severe acute respiratory syndrome coronavirus 2
SDVETKDVV

SEQ ID NO: 2309 - protein, 9 aa, Severe acute respiratory syndrome-related coronavirus
  REGION 1..9: note = Table A: HLA-B*45:01H HLA-B*49:01H HLA-B*50:01H
  source 1..9: note = Severe acute respiratory syndrome coronavirus 2
VETKDVVEC

SEQ ID NO: 2310 - protein, 9 aa, Severe acute respiratory syndrome-related coronavirus
  REGION 1..9: note = Table A: HLA-A*25:01M HLA-A*26:01M HLA-A*26:02M HLA-A*26:03H HLA-A*68:02H HLA-A*02:05H HLA-A*02:02H HLA-B*38:02H
  source 1..9: note = Severe acute respiratory syndrome coronavirus 2
ETKDVVECL

SEQ ID NO: 2311 - protein, 9 aa, Severe acute respiratory syndrome-related coronavirus
  REGION 1..9: note = Table A: HLA-B*39:06H HLA-B*39:01H
  source 1..9: note = Severe acute respiratory syndrome coronavirus 2
SHQSDIEVT

SEQ ID NO: 2312 - protein, 9 aa, Severe acute respiratory syndrome-related coronavirus
  REGION 1..9: note = Table A: HLA-B*38:01H HLA-B*38:02H HLA-B*39:01H HLA-B*13:01H HLA-B*13:02H
  source 1..9: note = Severe acute respiratory syndrome coronavirus 2
HQSDIEVTG

SEQ ID NO: 2313 - protein, 9 aa, Severe acute respiratory syndrome-related coronavirus
  REGION 1..9: note = Table A: HLA-A*03:01H HLA-A*11:01H HLA-A*29:01H HLA-A*29:02H HLA-B*35:01H HLA-B*38:02H HLA-B*07:05H
  source 1..9: note = Severe acute respiratory syndrome coronavirus 2
SCNNYMLTY

SEQ ID NO: 2314 - protein, 9 aa, Severe acute respiratory syndrome-related coronavirus
  REGION 1..9: note = Table A: HLA-A*24:02H
  source 1..9: note = Severe acute respiratory syndrome coronavirus 2
NYMLTYNKV

SEQ ID NO: 2315 - protein, 9 aa, Severe acute respiratory syndrome-related coronavirus
  REGION 1..9: note = Table A: HLA-A*02:11M HLA-A*68:02H HLA-A*02:05H HLA-A*02:08H HLA-A*02:02H HLA-B*57:03H
  source 1..9: note = Severe acute respiratory syndrome coronavirus 2
LTYNKVENM

SEQ ID NO: 2316 - protein, 9 aa, Severe acute respiratory syndrome-related coronavirus
  REGION 1..9: note = Table A: HLA-A*34:01H
  source 1..9: note = Severe acute respiratory syndrome coronavirus 2
NKVENMTPR

SEQ ID NO: 2317 - protein, 9 aa, Severe acute respiratory syndrome-related coronavirus
  REGION 1..9: note = Table A: HLA-B*44:05M HLA-B*44:03H HLA-B*40:02H HLA-B*41:02M
  source 1..9: note = Severe acute respiratory syndrome coronavirus 2
VENMTPRDL

SEQ ID NO: 2318 - protein, 9 aa, Severe acute respiratory syndrome-related coronavirus
  REGION 1..9: note = Table A: HLA-C*15:05M HLA-B*51:01H HLA-B*07:02H HLA-B*07:04H
  source 1..9: note = Severe acute respiratory syndrome coronavirus 2
TPRDLGACI

SEQ ID NO: 2319 - protein, 9 aa, Severe acute respiratory syndrome-related coronavirus
  REGION 1..9: note = Table A: HLA-C*12:05H HLA-A*02:11H HLA-A*30:01H HLA-A*68:02H HLA-C*15:05M HLA-B*55:01H HLA-A*02:03H HLA-B*51:01H HLA-B*38:02H HLA-B*07:02H HLA-B*07:04M
  source 1..9: note = Severe acute respiratory syndrome coronavirus 2
SARHINAQV

SEQ ID NO: 2320 - protein, 9 aa, Severe acute respiratory syndrome-related coronavirus
  REGION 1..9: note = Table A: HLA-B*45:01H HLA-B*39:06M
  source 1..9: note = Severe acute respiratory syndrome coronavirus 2
ARHINAQVA

SEQ ID NO: 2321 - protein, 9 aa, Severe acute respiratory syndrome-related coronavirus
  REGION 1..9: note = Table A: HLA-B*27:05H HLA-B*15:10H
  source 1..9: note = Severe acute respiratory syndrome coronavirus 2
RHINAQVAK

SEQ ID NO: 2322 - protein, 9 aa, Severe acute respiratory syndrome-related coronavirus
  REGION 1..9: note = Table A: HLA-A*02:05M HLA-A*02:06H HLA-A*02:08H HLA-B*52:01H HLA-B*38:01H HLA-B*38:02M HLA-B*13:01H HLA-B*13:02H HLA-B*49:01H
  source 1..9: note = Severe acute respiratory syndrome coronavirus 2
AQVAKSHNI

SEQ ID NO: 2323 - protein, 9 aa, Severe acute respiratory syndrome-related coronavirus
  REGION 1..9: note = Table A: HLA-B*42:01H HLA-A*11:303M HLA-C*16:01M HLA-B*46:01M HLA-B*08:01M HLA-C*03:03H HLA-C*12:05H HLA-C*03:02H HLA-C*03:04M HLA-C*15:05H HLA-C*12:02M HLA-C*12:03H HLA-C*07:27H HLA-C*17:01H HLA-C*08:01H
  REGION 1..9: note = CONT. FROM ABOVE: HLA-B*38:02H HLA-B*07:02H HLA-B*07:04H HLA- B*15:01H HLA-B*41:02H HLA-B*57:03H HLA-C*02:02H HLA-C*07:04H
  source 1..9: note = Severe acute respiratory syndrome coronavirus 2
VAKSHNIAL

SEQ ID NO: 2324 - protein, 9 aa, Severe acute respiratory syndrome-related coronavirus
  REGION 1..9: note = Table A: HLA-B*58:01H HLA-B*58:02H HLA-B*57:01H HLA-B*53:01H HLA-C*15:02H HLA-A*32:01M HLA-B*57:03H HLA-B*13:01H
  source 1..9: note = Severe acute respiratory syndrome coronavirus 2
KSHNIALIW

SEQ ID NO: 2325 - protein, 9 aa, Severe acute respiratory syndrome-related coronavirus
  REGION 1..9: note = Table A: HLA-A*02:11H HLA-A*68:02H HLA-C*15:02H HLA-A*02:04H HLA-A*02:07H HLA-B*40:06H HLA-B*13:02H
  source 1..9: note = Severe acute respiratory syndrome coronavirus 2
HNIALIWNV

SEQ ID NO: 2326 - protein, 9 aa, Severe acute respiratory syndrome-related coronavirus
  REGION 1..9: note = Table A: HLA-A*02:11M HLA-A*02:07H
  source 1..9: note = Severe acute respiratory syndrome coronavirus 2
LIWNVKDFM

SEQ ID NO: 2327 - protein, 9 aa, Severe acute respiratory syndrome-related coronavirus
  REGION 1..9: note = Table A: HLA-B*38:02H HLA-B*39:01H HLA-B*07:05H
  source 1..9: note = Severe acute respiratory syndrome coronavirus 2
DFMSLSEQL

SEQ ID NO: 2328 - protein, 9 aa, Severe acute respiratory syndrome-related coronavirus
  REGION 1..9: note = Table A: HLA-A*11:02H HLA-A*34:02M
  source 1..9: note = Severe acute respiratory syndrome coronavirus 2
MSLSEQLRK

SEQ ID NO: 2329 - protein, 9 aa, Severe acute respiratory syndrome-related coronavirus
  REGION 1..9: note = Table A: HLA-B*08:01H HLA-B*55:01H HLA-A*02:03M HLA-B*38:02H HLA-B*07:04H
  source 1..9: note = Severe acute respiratory syndrome coronavirus 2
QLRKQIRSA

SEQ ID NO: 2330 - protein, 9 aa, Severe acute respiratory syndrome-related coronavirus
  REGION 1..9: note = Table A: HLA-B*42:01H HLA-B*46:01M HLA-C*03:02H HLA-C*15:05H HLA-C*12:02H HLA-B*07:04M HLA-B*15:01H HLA-B*57:03H HLA-C*02:02H
  source 1..9: note = Severe acute respiratory syndrome coronavirus 2
AAKKNNLPF

SEQ ID NO: 2331 - protein, 9 aa, Severe acute respiratory syndrome-related coronavirus
  REGION 1..9: note = Table A: HLA-B*48:01H HLA-C*07:01H HLA-C*07:02H HLA-B*15:03H
  source 1..9: note = Severe acute respiratory syndrome coronavirus 2
KKNNLPFKL

SEQ ID NO: 2332 - protein, 9 aa, Severe acute respiratory syndrome-related coronavirus
  REGION 1..9: note = Table A: HLA-A*02:03H
  source 1..9: note = Severe acute respiratory syndrome coronavirus 2
NLPFKLTCA

SEQ ID NO: 2333 - protein, 9 aa, Severe acute respiratory syndrome-related coronavirus
  REGION 1..9: note = Table A: HLA-B*56:01H HLA-B*55:02H HLA-B*54:01H
  source 1..9: note = Severe acute respiratory syndrome coronavirus 2
LPFKLTCAT

SEQ ID NO: 2334 - protein, 9 aa, Severe acute respiratory syndrome-related coronavirus
  REGION 1..9: note = Table A: HLA-A*02:11H HLA-A*68:02M HLA-C*15:05H HLA-C*15:02M HLA-A*02:05H HLA-A*02:06H HLA-A*02:08M HLA-B*57:03H HLA-B*13:02H
  source 1..9: note = Severe acute respiratory syndrome coronavirus 2
ATTRQVVNV

SEQ ID NO: 2335 - protein, 9 aa, Severe acute respiratory syndrome-related coronavirus
  REGION 1..9: note = Table A: HLA-A*30:01H HLA-A*68:02M HLA-C*15:05H HLA-C*15:02H HLA-A*02:03H HLA-B*51:01H HLA-B*52:01H HLA-B*38:02M HLA-B*07:04H HLA-B*57:03H HLA-B*13:02H
  source 1..9: note = Severe acute respiratory syndrome coronavirus 2
TTRQVVNVV

SEQ ID NO: 2336 - protein, 9 aa, Severe acute respiratory syndrome-related coronavirus
  REGION 1..9: note = Table A: HLA-B*39:06H HLA-B*39:01H
  source 1..9: note = Severe acute respiratory syndrome coronavirus 2
TRQVVNVVT

SEQ ID NO: 2337 - protein, 9 aa, Severe acute respiratory syndrome-related coronavirus
  REGION 1..9: note = Table A: HLA-B*48:01H HLA-A*02:08H HLA-B*15:01H HLA-B*13:02H
  source 1..9: note = Severe acute respiratory syndrome coronavirus 2
RQVVNVVTT

SEQ ID NO: 2338 - protein, 9 aa, Severe acute respiratory syndrome-related coronavirus
  REGION 1..9: note = Table A: HLA-A*11:303H HLA-A*74:01H HLA-A*03:01H HLA-A*03:02H HLA-A*11:01H HLA-A*11:02H HLA-B*57:01H HLA-A*33:03H HLA-A*26:03M HLA-B*27:02M HLA-A*30:02H HLA-A*68:01H HLA-A*68:02M HLA-A*02:05H HLA-A*34:01M
  REGION 1..9: note = CONT. FROM ABOVE: HLA-A*34:02H HLA-C*07:27H HLA-B*35:01H HLA- A*23:01H HLA-B*38:02H HLA-A*66:01M
  source 1..9: note = Severe acute respiratory syndrome coronavirus 2
QVVNVVTTK

SEQ ID NO: 2339 - protein, 9 aa, Severe acute respiratory syndrome-related coronavirus
  REGION 1..9: note = Table A: HLA-B*58:01M HLA-B*58:02H HLA-A*03:01H HLA-B*57:01H HLA-A*02:11M HLA-A*68:02H HLA-C*15:05M HLA-C*15:02H HLA-A*02:05H HLA-A*02:06H HLA-A*02:07H HLA-A*02:08H HLA-A*02:02H HLA-A*02:03H HLA-A*24:02H HLA-B*51:01H
  REGION 1..9: note = CONT. FROM ABOVE: HLA-B*52:01H HLA-C*08:01H HLA-A*23:01H HLA- B*38:02M HLA-B*07:05M HLA-B*57:03M HLA-B*13:02M
  source 1..9: note = Severe acute respiratory syndrome coronavirus 2
VVNVVTTKI

SEQ ID NO: 2340 - protein, 9 aa, Severe acute respiratory syndrome-related coronavirus
  REGION 1..9: note = Table A: HLA-A*11:303H HLA-C*03:04H HLA-A*68:02H HLA-B*35:03M HLA-C*15:05H HLA-B*14:02H HLA-A*02:05H HLA-A*02:06H HLA-A*02:08H HLA-B*14:01H HLA-B*35:01H HLA-B*35:02H HLA-C*08:01M HLA-B*35:12H HLA-B*38:02H
  REGION 1..9: note = CONT. FROM ABOVE: HLA-B*15:02M HLA-B*39:01H HLA-B*07:05H HLA- C*07:04H
  source 1..9: note = Severe acute respiratory syndrome coronavirus 2
NVVTTKIAL

SEQ ID NO: 2341 - protein, 9 aa, Severe acute respiratory syndrome-related coronavirus
  REGION 1..9: note = Table A: HLA-A*11:303M HLA-A*74:01M HLA-A*03:01H HLA-A*03:02M HLA-A*11:01H HLA-A*11:02H HLA-A*36:01H HLA-A*33:03H HLA-A*26:03H HLA-A*30:01M HLA-A*30:02M HLA-A*68:01H HLA-A*68:02H HLA-A*34:01H HLA-A*34:02H
  REGION 1..9: note = CONT. FROM ABOVE: HLA-C*07:27M HLA-A*23:01H HLA-A*31:01H HLA- A*66:01H
  source 1..9: note = Severe acute respiratory syndrome coronavirus 2
VVTTKIALK

SEQ ID NO: 2342 - protein, 9 aa, Severe acute respiratory syndrome-related coronavirus
  REGION 1..9: note = Table A: HLA-B*58:01H HLA-B*57:03H
  source 1..9: note = Severe acute respiratory syndrome coronavirus 2
VTTKIALKG

SEQ ID NO: 2343 - protein, 9 aa, Severe acute respiratory syndrome-related coronavirus
  REGION 1..9: note = Table A: HLA-B*58:01M HLA-B*58:02H HLA-B*57:01H HLA-B*57:03H
  source 1..9: note = Severe acute respiratory syndrome coronavirus 2
KGGKIVNNW

SEQ ID NO: 2344 - protein, 9 aa, Severe acute respiratory syndrome-related coronavirus
  REGION 1..9: note = Table A: HLA-C*15:02H HLA-A*02:04H HLA-A*02:02H HLA-B*07:04H
  source 1..9: note = Severe acute respiratory syndrome coronavirus 2
IVNNWLKQL

SEQ ID NO: 2345 - protein, 9 aa, Severe acute respiratory syndrome-related coronavirus
  REGION 1..9: note = Table A: HLA-C*15:02H
  source 1..9: note = Severe acute respiratory syndrome coronavirus 2
VNNWLKQLI

SEQ ID NO: 2346 - protein, 9 aa, Severe acute respiratory syndrome-related coronavirus
  REGION 1..9: note = Table A: HLA-A*02:11H HLA-A*02:06H HLA-A*02:08H HLA-B*52:01H HLA-B*13:02M
  source 1..9: note = Severe acute respiratory syndrome coronavirus 2
KQLIKVTLV

SEQ ID NO: 2347 - protein, 9 aa, Severe acute respiratory syndrome-related coronavirus
  REGION 1..9: note = Table A: HLA-A*24:07H HLA-B*38:02M HLA-B*15:01H HLA-B*15:02M HLA-B*57:03H
  source 1..9: note = Severe acute respiratory syndrome coronavirus 2
QLIKVTLVF

SEQ ID NO: 2348 - protein, 9 aa, Severe acute respiratory syndrome-related coronavirus
  REGION 1..9: note = Table A: HLA-B*08:01H HLA-A*02:04H
  source 1..9: note = Severe acute respiratory syndrome coronavirus 2
LIKVTLVFL

SEQ ID NO: 2349 - protein, 9 aa, Severe acute respiratory syndrome-related coronavirus
  REGION 1..9: note = Table A: HLA-A*36:01H HLA-A*02:11H HLA-A*68:02H HLA-C*15:02H HLA-A*02:06M HLA-A*02:07H HLA-C*08:01H HLA-B*40:06H HLA-B*13:02M
  source 1..9: note = Severe acute respiratory syndrome coronavirus 2
KVTLVFLFV

SEQ ID NO: 2350 - protein, 9 aa, Severe acute respiratory syndrome-related coronavirus
  REGION 1..9: note = Table A: HLA-B*54:01H
  source 1..9: note = Severe acute respiratory syndrome coronavirus 2
TLVFLFVAA

SEQ ID NO: 2351 - protein, 9 aa, Severe acute respiratory syndrome-related coronavirus
  REGION 1..9: note = Table A: HLA-A*68:02H
  source 1..9: note = Severe acute respiratory syndrome coronavirus 2
LVFLFVAAI

SEQ ID NO: 2352 - protein, 9 aa, Severe acute respiratory syndrome-related coronavirus
  REGION 1..9: note = Table A: HLA-C*14:02H HLA-C*14:03H HLA-A*29:02H HLA-A*24:02H HLA-A*24:07M HLA-A*23:01H
  source 1..9: note = Severe acute respiratory syndrome coronavirus 2
VFLFVAAIF

SEQ ID NO: 2353 - protein, 9 aa, Severe acute respiratory syndrome-related coronavirus
  REGION 1..9: note = Table A: HLA-A*29:02H HLA-B*38:02H HLA-B*15:02H
  source 1..9: note = Severe acute respiratory syndrome coronavirus 2
FLFVAAIFY

SEQ ID NO: 2354 - protein, 9 aa, Severe acute respiratory syndrome-related coronavirus
  REGION 1..9: note = Table A: HLA-A*02:11H HLA-A*68:02M HLA-A*02:02H HLA-C*08:01H HLA-B*38:02H HLA-B*13:02H
  source 1..9: note = Severe acute respiratory syndrome coronavirus 2
FVAAIFYLI

SEQ ID NO: 2355 - protein, 9 aa, Severe acute respiratory syndrome-related coronavirus
  REGION 1..9: note = Table A: HLA-A*02:11H HLA-A*68:02H
  source 1..9: note = Severe acute respiratory syndrome coronavirus 2
AIFYLITPV

SEQ ID NO: 2356 - protein, 9 aa, Severe acute respiratory syndrome-related coronavirus
  REGION 1..9: note = Table A: HLA-C*14:03H
  source 1..9: note = Severe acute respiratory syndrome coronavirus 2
IFYLITPVH

SEQ ID NO: 2357 - protein, 9 aa, Severe acute respiratory syndrome-related coronavirus
  REGION 1..9: note = Table A: HLA-C*14:02H HLA-C*14:03M HLA-A*29:02H HLA-C*04:01H HLA-C*04:03M HLA-A*02:11H HLA-A*24:02H HLA-A*24:07M HLA-C*08:01H HLA-A*23:01H
  source 1..9: note = Severe acute respiratory syndrome coronavirus 2
FYLITPVHV

SEQ ID NO: 2358 - protein, 9 aa, Severe acute respiratory syndrome-related coronavirus
  REGION 1..9: note = Table A: HLA-C*14:02H HLA-C*14:03M HLA-A*11:303M HLA-C*16:01H HLA-B*46:01M HLA-A*26:01H HLA-A*26:03M HLA-B*08:01H HLA-C*03:03M HLA-A*02:11H HLA-C*03:02M HLA-C*03:04M HLA-A*68:02H HLA-B*35:03H HLA-C*12:02M
  REGION 1..9: note = CONT. FROM ABOVE: HLA-C*12:03H HLA-A*02:04M HLA-A*02:05H HLA- A*02:06H HLA-A*02:07H HLA-B*14:01H HLA-A*02:01H HLA-A*02:02H HLA-A*02:03M HLA-A*34:01H HLA-C*07:27H HLA-B*35:01H HLA-C*17 :01H HLA-B*35:07H HLA-C*08:01H HLA-B*38:02M HLA-B*07:04H
  REGION 1..9: note = CONT. FROM ABOVE: HLA-B*15:01M HLA-B*15:02H HLA-C*02:02H HLA- C*07:04H HLA-A*66:01H
  source 1..9: note = Severe acute respiratory syndrome coronavirus 2
YLITPVHVM

SEQ ID NO: 2359 - protein, 9 aa, Severe acute respiratory syndrome-related coronavirus
  REGION 1..9: note = Table A: HLA-A*03:01H HLA-A*11:01H HLA-A*11:02H HLA-A*36:01H HLA-A*34:02M
  source 1..9: note = Severe acute respiratory syndrome coronavirus 2
ITPVHVMSK

SEQ ID NO: 2360 - protein, 9 aa, Severe acute respiratory syndrome-related coronavirus
  REGION 1..9: note = Table A: HLA-A*34:01H HLA-B*38:02H HLA-B*15:02M
  source 1..9: note = Severe acute respiratory syndrome coronavirus 2
HVMSKHTDF

SEQ ID NO: 2361 - protein, 9 aa, Severe acute respiratory syndrome-related coronavirus
  REGION 1..9: note = Table A: HLA-B*38:01H HLA-B*38:02M HLA-B*39:01H HLA-B*15:10H
  source 1..9: note = Severe acute respiratory syndrome coronavirus 2
KHTDFSSEI

SEQ ID NO: 2362 - protein, 9 aa, Severe acute respiratory syndrome-related coronavirus
  REGION 1..9: note = Table A: HLA-C*08:02H
  source 1..9: note = Severe acute respiratory syndrome coronavirus 2
HTDFSSEII

SEQ ID NO: 2363 - protein, 9 aa, Severe acute respiratory syndrome-related coronavirus
  REGION 1..9: note = Table A: HLA-B*38:02H HLA-B*39:01H HLA-B*07:05H
  source 1..9: note = Severe acute respiratory syndrome coronavirus 2
DFSSEIIGY

SEQ ID NO: 2364 - protein, 9 aa, Severe acute respiratory syndrome-related coronavirus
  REGION 1..9: note = Table A: HLA-A*11:01H HLA-A*11:02H HLA-A*36:01H HLA-A*33:03H HLA-A*30:02H HLA-A*68:01H HLA-A*68:02H HLA-A*34:01H HLA-A*34:02H HLA-A*66:01M
  source 1..9: note = Severe acute respiratory syndrome coronavirus 2
FSSEIIGYK

SEQ ID NO: 2365 - protein, 9 aa, Severe acute respiratory syndrome-related coronavirus
  REGION 1..9: note = Table A: HLA-B*44:02M HLA-B*44:05H HLA-B*45:01M HLA-B*44:03H HLA-B*40:01H HLA-B*40:02M HLA-B*40:06H HLA-B*41:02M HLA-B*49:01H HLA-B*50:01M
  source 1..9: note = Severe acute respiratory syndrome coronavirus 2
SEIIGYKAI

SEQ ID NO: 2366 - protein, 9 aa, Severe acute respiratory syndrome-related coronavirus
  REGION 1..9: note = Table A: HLA-B*58:01H HLA-A*11:303H HLA-A*74:01M HLA-A*11:01H HLA-A*11:02H HLA-B*57:01H HLA-A*33:03H HLA-B*46:01H HLA-A*26:03H HLA-C*03:03H HLA-A*30:02H HLA-A*68:01M HLA-C*12:02H HLA-A*34:01M HLA-A*34:02H
  REGION 1..9: note = CONT. FROM ABOVE: HLA-C*07:27H HLA-B*38:02H HLA-A*31:01H HLA- B*57:03H HLA-A*66:01H
  source 1..9: note = Severe acute respiratory syndrome coronavirus 2
KAIDGGVTR

SEQ ID NO: 2367 - protein, 9 aa, Severe acute respiratory syndrome-related coronavirus
  REGION 1..9: note = Table A: HLA-A*02:08H
  source 1..9: note = Severe acute respiratory syndrome coronavirus 2
GVTRDIAST

SEQ ID NO: 2368 - protein, 9 aa, Severe acute respiratory syndrome-related coronavirus
  REGION 1..9: note = Table A: HLA-A*26:01H HLA-A*26:02M HLA-B*35:03H HLA-B*35:01H HLA-B*35:02M HLA-B*35:08H HLA-B*35:12H HLA-B*38:01H HLA-B*38:02M HLA-B*15:02H HLA-B*39:01H HLA-B*07:05H
  source 1..9: note = Severe acute respiratory syndrome coronavirus 2
DIASTDTCF

SEQ ID NO: 2369 - protein, 9 aa, Severe acute respiratory syndrome-related coronavirus
  REGION 1..9: note = Table A: HLA-A*11:303M HLA-A*03:01M HLA-A*03:02H HLA-A*11:01H HLA-A*11:02M HLA-A*36:01H HLA-A*34:02H HLA-C*07:27M
  source 1..9: note = Severe acute respiratory syndrome coronavirus 2
STDTCFANK

SEQ ID NO: 2370 - protein, 9 aa, Severe acute respiratory syndrome-related coronavirus
  REGION 1..9: note = Table A: HLA-B*38:02H
  source 1..9: note = Severe acute respiratory syndrome coronavirus 2
NKHADFDTW

SEQ ID NO: 2371 - protein, 9 aa, Severe acute respiratory syndrome-related coronavirus
  REGION 1..9: note = Table A: HLA-B*38:01H HLA-B*38:02M HLA-B*15:03H
  source 1..9: note = Severe acute respiratory syndrome coronavirus 2
KHADFDTWF

SEQ ID NO: 2372 - protein, 9 aa, Severe acute respiratory syndrome-related coronavirus
  REGION 1..9: note = Table A: HLA-A*36:01H HLA-A*33:01H HLA-A*33:03H HLA-A*34:02H HLA-A*66:01H
  source 1..9: note = Severe acute respiratory syndrome coronavirus 2
DFDTWFSQR

SEQ ID NO: 2373 - protein, 9 aa, Severe acute respiratory syndrome-related coronavirus
  REGION 1..9: note = Table A: HLA-C*03:03H HLA-C*03:04M HLA-A*68:02H HLA-A*02:02H
  source 1..9: note = Severe acute respiratory syndrome coronavirus 2
YTNDKACPL

SEQ ID NO: 2374 - protein, 9 aa, Severe acute respiratory syndrome-related coronavirus
  REGION 1..9: note = Table A: HLA-B*39:06H
  source 1..9: note = Severe acute respiratory syndrome coronavirus 2
DKACPLIAA

SEQ ID NO: 2375 - protein, 9 aa, Severe acute respiratory syndrome-related coronavirus
  REGION 1..9: note = Table A: HLA-A*02:11M HLA-B*55:02H HLA-A*68:02H HLA-C*15:05H HLA-A*02:06H HLA-B*13:02H
  source 1..9: note = Severe acute respiratory syndrome coronavirus 2
KACPLIAAV

SEQ ID NO: 2376 - protein, 9 aa, Severe acute respiratory syndrome-related coronavirus
  REGION 1..9: note = Table A: HLA-A*74:01H HLA-A*26:03H HLA-A*68:01H HLA-A*34:01H HLA-A*66:01H
  source 1..9: note = Severe acute respiratory syndrome coronavirus 2
PLIAAVITR

SEQ ID NO: 2377 - protein, 9 aa, Severe acute respiratory syndrome-related coronavirus
  REGION 1..9: note = Table A: HLA-B*58:02H HLA-A*11:303H HLA-C*16:01M HLA-C*16:04H HLA-B*46:01H HLA-C*06:02H HLA-C*12:05M HLA-A*02:11M HLA-C*03:02H HLA-C*03:04H HLA-A*68:02H HLA-C*15:05H HLA-C*12:03M HLA-C*15:02H HLA-A*02:05H
  REGION 1..9: note = CONT. FROM ABOVE: HLA-A*02:06H HLA-A*02:02H HLA-A*02:03H HLA- B*51:01M HLA-C*08:01H HLA-B*38:02H HLA-B*07:04H HLA-C*02:02H
  source 1..9: note = Severe acute respiratory syndrome coronavirus 2
IAAVITREV

SEQ ID NO: 2378 - protein, 9 aa, Severe acute respiratory syndrome-related coronavirus
  REGION 1..9: note = Table A: HLA-B*58:01H HLA-A*25:01H HLA-A*26:01H HLA-A*26:02H HLA-B*38:02H HLA-B*15:01M HLA-B*15:02H HLA-B*57:03M HLA-B*13:01H HLA-C*07:04H
  source 1..9: note = Severe acute respiratory syndrome coronavirus 2
AVITREVGF

SEQ ID NO: 2379 - protein, 9 aa, Severe acute respiratory syndrome-related coronavirus
  REGION 1..9: note = Table A: HLA-A*30:01H HLA-A*68:02H HLA-C*15:02H HLA-B*57:03H
  source 1..9: note = Severe acute respiratory syndrome coronavirus 2
ITREVGFVV

SEQ ID NO: 2380 - protein, 9 aa, Severe acute respiratory syndrome-related coronavirus
  REGION 1..9: note = Table A: HLA-A*25:01H HLA-A*26:01H HLA-A*26:02M HLA-A*26:03M HLA-A*68:01H HLA-A*68:02M HLA-A*34:01M
  source 1..9: note = Severe acute respiratory syndrome coronavirus 2
EVGFVVPGL

SEQ ID NO: 2381 - protein, 9 aa, Severe acute respiratory syndrome-related coronavirus
  REGION 1..9: note = Table A: HLA-A*02:05H HLA-A*02:06M
  source 1..9: note = Severe acute respiratory syndrome coronavirus 2
FVVPGLPGT

SEQ ID NO: 2382 - protein, 9 aa, Severe acute respiratory syndrome-related coronavirus
  REGION 1..9: note = Table A: HLA-B*42:01H HLA-B*35:03H HLA-C*15:05H HLA-B*07:02M HLA-B*07:04M HLA-B*07:05H
  source 1..9: note = Severe acute respiratory syndrome coronavirus 2
VPGLPGTIL

SEQ ID NO: 2383 - protein, 9 aa, Severe acute respiratory syndrome-related coronavirus
  REGION 1..9: note = Table A: HLA-B*13:02H
  source 1..9: note = Severe acute respiratory syndrome coronavirus 2
GLPGTILRT

SEQ ID NO: 2384 - protein, 9 aa, Severe acute respiratory syndrome-related coronavirus
  REGION 1..9: note = Table A: HLA-B*39:01H
  source 1..9: note = Severe acute respiratory syndrome coronavirus 2
LRTTNGDFL

SEQ ID NO: 2385 - protein, 9 aa, Severe acute respiratory syndrome-related coronavirus
  REGION 1..9: note = Table A: HLA-B*58:01M HLA-B*57:01H HLA-A*25:01H HLA-A*33:03H HLA-A*29:02H HLA-B*53:01H HLA-C*15:05H HLA-C*15:02H HLA-A*34:02M HLA-A*24:07H HLA-B*57:03M HLA-A*66:01H
  source 1..9: note = Severe acute respiratory syndrome coronavirus 2
TTNGDFLHF

SEQ ID NO: 2386 - protein, 9 aa, Severe acute respiratory syndrome-related coronavirus
  REGION 1..9: note = Table A: HLA-C*16:01H HLA-A*02:11H HLA-C*03:02H HLA-A*24:07H HLA-B*38:02H
  source 1..9: note = Severe acute respiratory syndrome coronavirus 2
FLHFLPRVF

SEQ ID NO: 2387 - protein, 9 aa, Severe acute respiratory syndrome-related coronavirus
  REGION 1..9: note = Table A: HLA-C*14:02H HLA-C*14:03M HLA-B*08:01H HLA-A*02:11H HLA-B*39:06H HLA-B*40:06H HLA-B*54:01H
  source 1..9: note = Severe acute respiratory syndrome coronavirus 2
HFLPRVFSA

SEQ ID NO: 2388 - protein, 9 aa, Severe acute respiratory syndrome-related coronavirus
  REGION 1..9: note = Table A: HLA-A*02:11M HLA-A*68:02H HLA-C*01:02H HLA-A*02:04H HLA-A*02:06H HLA-A*02:07M HLA-A*02:01H HLA-A*02:02H HLA-A*02:03H HLA-B*38:02H HLA-B*13:02H
  source 1..9: note = Severe acute respiratory syndrome coronavirus 2
FLPRVFSAV

SEQ ID NO: 2389 - protein, 9 aa, Severe acute respiratory syndrome-related coronavirus
  REGION 1..9: note = Table A: HLA-A*02:11H HLA-A*02:08H
  source 1..9: note = Severe acute respiratory syndrome coronavirus 2
RVFSAVGNI

SEQ ID NO: 2390 - protein, 9 aa, Severe acute respiratory syndrome-related coronavirus
  REGION 1..9: note = Table A: HLA-A*01:01H HLA-B*38:02H HLA-B*15:01H HLA-B*15:02H
  source 1..9: note = Severe acute respiratory syndrome coronavirus 2
FSAVGNICY

SEQ ID NO: 2391 - protein, 9 aa, Severe acute respiratory syndrome-related coronavirus
  REGION 1..9: note = Table A: HLA-A*68:02H
  source 1..9: note = Severe acute respiratory syndrome coronavirus 2
SAVGNICYT

SEQ ID NO: 2392 - protein, 9 aa, Severe acute respiratory syndrome-related coronavirus
  REGION 1..9: note = Table A: HLA-C*14:02H HLA-C*14:03M HLA-C*16:01H HLA-A*36:01H HLA-B*46:01M HLA-C*06:02H HLA-A*26:01H HLA-A*29:02H HLA-C*03:02M HLA-C*12:02H HLA-C*12:03H HLA-A*34:02H HLA-C*02:02H
  source 1..9: note = Severe acute respiratory syndrome coronavirus 2
YTPSKLIEY

SEQ ID NO: 2393 - protein, 9 aa, Severe acute respiratory syndrome-related coronavirus
  REGION 1..9: note = Table A: HLA-B*15:03M
  source 1..9: note = Severe acute respiratory syndrome coronavirus 2
SKLIEYTDF

SEQ ID NO: 2394 - protein, 9 aa, Severe acute respiratory syndrome-related coronavirus
  REGION 1..9: note = Table A: HLA-A*02:11M HLA-A*02:05M HLA-A*02:08H HLA-A*02:01H HLA-A*02:02M HLA-A*02:03H HLA-B*38:02H
  source 1..9: note = Severe acute respiratory syndrome coronavirus 2
KLIEYTDFA

SEQ ID NO: 2395 - protein, 9 aa, Severe acute respiratory syndrome-related coronavirus
  REGION 1..9: note = Table A: HLA-B*49:01M HLA-B*50:01H
  source 1..9: note = Severe acute respiratory syndrome coronavirus 2
IEYTDFATS

SEQ ID NO: 2396 - protein, 9 aa, Severe acute respiratory syndrome-related coronavirus
  REGION 1..9: note = Table A: HLA-B*38:02H
  source 1..9: note = Severe acute respiratory syndrome coronavirus 2
TDFATSACV

SEQ ID NO: 2397 - protein, 9 aa, Severe acute respiratory syndrome-related coronavirus
  REGION 1..9: note = Table A: HLA-C*15:05H
  source 1..9: note = Severe acute respiratory syndrome coronavirus 2
ATSACVLAA

SEQ ID NO: 2398 - protein, 9 aa, Severe acute respiratory syndrome-related coronavirus
  REGION 1..9: note = Table A: HLA-B*15:01H
  source 1..9: note = Severe acute respiratory syndrome coronavirus 2
VLAAECTIF

SEQ ID NO: 2399 - protein, 9 aa, Severe acute respiratory syndrome-related coronavirus
  REGION 1..9: note = Table A: HLA-A*11:01H HLA-A*11:02H HLA-A*34:02M
  source 1..9: note = Severe acute respiratory syndrome coronavirus 2
LAAECTIFK

SEQ ID NO: 2400 - protein, 9 aa, Severe acute respiratory syndrome-related coronavirus
  REGION 1..9: note = Table A: HLA-B*45:01H HLA-B*40:06M HLA-B*50:01H
  source 1..9: note = Severe acute respiratory syndrome coronavirus 2
AECTIFKDA

SEQ ID NO: 2401 - protein, 9 aa, Severe acute respiratory syndrome-related coronavirus
  REGION 1..9: note = Table A: HLA-A*03:02H HLA-A*34:02H
  source 1..9: note = Severe acute respiratory syndrome coronavirus 2
TIFKDASGK

SEQ ID NO: 2402 - protein, 9 aa, Severe acute respiratory syndrome-related coronavirus
  REGION 1..9: note = Table A: HLA-A*68:01H HLA-A*34:01H HLA-B*35:01M HLA-B*35:02H HLA-B*35:08H HLA-B*35:07H HLA-B*38:02H HLA-A*66:01H
  source 1..9: note = Severe acute respiratory syndrome coronavirus 2
DASGKPVPY

SEQ ID NO: 2403 - protein, 9 aa, Severe acute respiratory syndrome-related coronavirus
  REGION 1..9: note = Table A: HLA-A*30:02M
  source 1..9: note = Severe acute respiratory syndrome coronavirus 2
SGKPVPYCY

SEQ ID NO: 2404 - protein, 9 aa, Severe acute respiratory syndrome-related coronavirus
  REGION 1..9: note = Table A: HLA-B*51:01H
  source 1..9: note = Severe acute respiratory syndrome coronavirus 2
VPYCYDTNV

SEQ ID NO: 2405 - protein, 9 aa, Severe acute respiratory syndrome-related coronavirus
  REGION 1..9: note = Table A: HLA-C*14:03H HLA-A*11:303M HLA-A*25:01H HLA-B*46:01M HLA-A*26:01H HLA-A*26:02H HLA-A*26:03H HLA-A*29:01M HLA-A*29:02H HLA-B*18:01H HLA-C*03:02H HLA-A*34:01H HLA-A*34:02H HLA-B*35:01H HLA-B*35:08H
  REGION 1..9: note = CONT. FROM ABOVE: HLA-B*35:07H HLA-B*15:13H HLA-B*38:02H HLA- B*15:01M HLA-B*15:02H HLA-B*15:03H HLA-B*39:01M HLA-B*07:05H HLA-B*15:11H
  source 1..9: note = Severe acute respiratory syndrome coronavirus 2
NVLEGSVAY

SEQ ID NO: 2406 - protein, 9 aa, Severe acute respiratory syndrome-related coronavirus
  REGION 1..9: note = Table A: HLA-B*35:03H HLA-B*38:02H HLA-B*39:01H
  source 1..9: note = Severe acute respiratory syndrome coronavirus 2
EGSVAYESL

SEQ ID NO: 2407 - protein, 9 aa, Severe acute respiratory syndrome-related coronavirus
  REGION 1..9: note = Table A: HLA-A*34:02H
  source 1..9: note = Severe acute respiratory syndrome coronavirus 2
ESLRPDTRY

SEQ ID NO: 2408 - protein, 9 aa, Severe acute respiratory syndrome-related coronavirus
  REGION 1..9: note = Table A: HLA-A*02:02H HLA-A*02:03M HLA-B*38:02M HLA-B*07:04H
  source 1..9: note = Severe acute respiratory syndrome coronavirus 2
SLRPDTRYV

SEQ ID NO: 2409 - protein, 9 aa, Severe acute respiratory syndrome-related coronavirus
  REGION 1..9: note = Table A: HLA-C*06:02H HLA-C*07:01M HLA-C*07:02M HLA-B*14:02H
  source 1..9: note = Severe acute respiratory syndrome coronavirus 2
LRPDTRYVL

SEQ ID NO: 2410 - protein, 9 aa, Severe acute respiratory syndrome-related coronavirus
  REGION 1..9: note = Table A: HLA-B*42:01H HLA-C*04:01H HLA-C*04:03H HLA-B*53:01H HLA-B*35:03H HLA-C*15:05M HLA-B*35:02H HLA-B*35:07H HLA-B*35:12M HLA-B*07:02M HLA-B*07:04M HLA-B*07:05H
  source 1..9: note = Severe acute respiratory syndrome coronavirus 2
RPDTRYVLM

SEQ ID NO: 2411 - protein, 9 aa, Severe acute respiratory syndrome-related coronavirus
  REGION 1..9: note = Table A: HLA-C*04:01H HLA-C*04:03M HLA-A*02:07M HLA-B*38:02H HLA-B*13:01H
  source 1..9: note = Severe acute respiratory syndrome coronavirus 2
LMDGSIIQF

SEQ ID NO: 2412 - protein, 9 aa, Severe acute respiratory syndrome-related coronavirus
  REGION 1..9: note = Table A: HLA-C*16:04H HLA-B*46:01H HLA-A*29:02H HLA-C*03:02H HLA-A*30:02M HLA-C*12:02H HLA-B*35:01H HLA-B*38:02M HLA-B*15:01M HLA-B*15:02M HLA-B*15:03H HLA-B*07:05M HLA-C*02:02H
  source 1..9: note = Severe acute respiratory syndrome coronavirus 2
SIIQFPNTY

SEQ ID NO: 2413 - protein, 9 aa, Severe acute respiratory syndrome-related coronavirus
  REGION 1..9: note = Table A: HLA-A*11:303H HLA-C*04:03H HLA-C*03:03H HLA-C*03:04H HLA-C*08:01H HLA-C*08:02H
  source 1..9: note = Severe acute respiratory syndrome coronavirus 2
IIQFPNTYL

SEQ ID NO: 2414 - protein, 9 aa, Severe acute respiratory syndrome-related coronavirus
  REGION 1..9: note = Table A: HLA-A*33:03H HLA-A*68:01M HLA-A*34:01M HLA-A*34:02M HLA-A*66:01M
  source 1..9: note = Severe acute respiratory syndrome coronavirus 2
NTYLEGSVR

SEQ ID NO: 2415 - protein, 9 aa, Severe acute respiratory syndrome-related coronavirus
  REGION 1..9: note = Table A: HLA-C*14:03H HLA-A*33:03H HLA-A*24:02M HLA-A*24:07H HLA-C*08:01H HLA-A*23:01M HLA-B*39:01H
  source 1..9: note = Severe acute respiratory syndrome coronavirus 2
TYLEGSVRV

SEQ ID NO: 2416 - protein, 9 aa, Severe acute respiratory syndrome-related coronavirus
  REGION 1..9: note = Table A: HLA-A*11:303H HLA-A*02:11M HLA-C*03:02H HLA-C*03:04H HLA-C*15:02H HLA-A*02:04M HLA-A*02:05H HLA-A*02:06H HLA-A*02:07H HLA-B*14:01H HLA-A*02:01H HLA-A*02:02M HLA-A*02:03M HLA-B*38:02M HLA-B*15:02H
  REGION 1..9: note = CONT. FROM ABOVE: HLA-B*15:10H HLA-B*49:01H
  source 1..9: note = Severe acute respiratory syndrome coronavirus 2
YLEGSVRVV

SEQ ID NO: 2417 - protein, 9 aa, Severe acute respiratory syndrome-related coronavirus
  REGION 1..9: note = Table A: HLA-B*41:02H
  source 1..9: note = Severe acute respiratory syndrome coronavirus 2
LEGSVRVVT

SEQ ID NO: 2418 - protein, 9 aa, Severe acute respiratory syndrome-related coronavirus
  REGION 1..9: note = Table A: HLA-B*58:01H HLA-B*58:02M HLA-B*57:01M HLA-C*15:05H HLA-C*12:02H HLA-B*15:01H HLA-B*15:03H HLA-B*07:05H HLA-B*57:03H
  source 1..9: note = Severe acute respiratory syndrome coronavirus 2
GSVRVVTTF

SEQ ID NO: 2419 - protein, 9 aa, Severe acute respiratory syndrome-related coronavirus
  REGION 1..9: note = Table A: HLA-B*46:01H HLA-A*29:01H HLA-A*29:02H HLA-B*27:02H HLA-A*30:02H HLA-B*35:01H HLA-B*38:02H HLA-B*15:01H HLA-B*15:02H HLA-B*07:05H
  source 1..9: note = Severe acute respiratory syndrome coronavirus 2
VVTTFDSEY

SEQ ID NO: 2420 - protein, 9 aa, Severe acute respiratory syndrome-related coronavirus
  REGION 1..9: note = Table A: HLA-A*74:01H HLA-A*11:01H HLA-A*11:02H HLA-A*33:03H HLA-A*68:01M HLA-A*68:02H HLA-A*34:01H HLA-A*34:02H HLA-A*66:01H
  source 1..9: note = Severe acute respiratory syndrome coronavirus 2
TTFDSEYCR

SEQ ID NO: 2421 - protein, 9 aa, Severe acute respiratory syndrome-related coronavirus
  REGION 1..9: note = Table A: HLA-B*38:02H HLA-B*39:01M
  source 1..9: note = Severe acute respiratory syndrome coronavirus 2
ERSEAGVCV

SEQ ID NO: 2422 - protein, 9 aa, Severe acute respiratory syndrome-related coronavirus
  REGION 1..9: note = Table A: HLA-B*45:01H HLA-B*40:02H HLA-B*41:02H
  source 1..9: note = Severe acute respiratory syndrome coronavirus 2
SEAGVCVST

SEQ ID NO: 2423 - protein, 9 aa, Severe acute respiratory syndrome-related coronavirus
  REGION 1..9: note = Table A: HLA-B*58:02H HLA-C*16:01M HLA-C*15:02H HLA-B*57:03H
  source 1..9: note = Severe acute respiratory syndrome coronavirus 2
VSTSGRWVL

SEQ ID NO: 2424 - protein, 9 aa, Severe acute respiratory syndrome-related coronavirus
  REGION 1..9: note = Table A: HLA-B*27:05H HLA-B*27:02M
  source 1..9: note = Severe acute respiratory syndrome coronavirus 2
GRWVLNNDY

SEQ ID NO: 2425 - protein, 9 aa, Severe acute respiratory syndrome-related coronavirus
  REGION 1..9: note = Table A: HLA-A*34:01H HLA-A*66:01H
  source 1..9: note = Severe acute respiratory syndrome coronavirus 2
WVLNNDYYR

SEQ ID NO: 2426 - protein, 9 aa, Severe acute respiratory syndrome-related coronavirus
  REGION 1..9: note = Table A: HLA-C*14:02H HLA-C*14:03H HLA-C*07:02H HLA-A*24:07M
  source 1..9: note = Severe acute respiratory syndrome coronavirus 2
YYRSLPGVF

SEQ ID NO: 2427 - protein, 9 aa, Severe acute respiratory syndrome-related coronavirus
  REGION 1..9: note = Table A: HLA-A*02:11M HLA-A*68:02H HLA-A*02:04H HLA-A*02:05H HLA-A*02:06M HLA-A*02:07H HLA-A*02:01H HLA-A*02:02H HLA-A*02:03H HLA-B*38:02H HLA-B*13:02H
  source 1..9: note = Severe acute respiratory syndrome coronavirus 2
SLPGVFCGV

SEQ ID NO: 2428 - protein, 9 aa, Severe acute respiratory syndrome-related coronavirus
  REGION 1..9: note = Table A: HLA-A*02:11H HLA-A*68:02H HLA-A*02:05H HLA-A*02:06H HLA-A*02:08H HLA-B*38:02H
  source 1..9: note = Severe acute respiratory syndrome coronavirus 2
GVFCGVDAV

SEQ ID NO: 2429 - protein, 9 aa, Severe acute respiratory syndrome-related coronavirus
  REGION 1..9: note = Table A: HLA-B*13:02H
  source 1..9: note = Severe acute respiratory syndrome coronavirus 2
GVDAVNLLT

SEQ ID NO: 2430 - protein, 9 aa, Severe acute respiratory syndrome-related coronavirus
  REGION 1..9: note = Table A: HLA-A*26:02M HLA-A*26:03H HLA-A*68:02H HLA-B*35:03H HLA-C*15:05H HLA-A*34:01H HLA-B*35:01M HLA-B*35:02H HLA-B*51:01H HLA-B*35:07H HLA-B*38:02H HLA-A*66:01H
  source 1..9: note = Severe acute respiratory syndrome coronavirus 2
DAVNLLTNM

SEQ ID NO: 2431 - protein, 9 aa, Severe acute respiratory syndrome-related coronavirus
  REGION 1..9: note = Table A: HLA-C*15:05H HLA-B*15:01H HLA-B*07:05H
  source 1..9: note = Severe acute respiratory syndrome coronavirus 2
AVNLLTNMF

SEQ ID NO: 2432 - protein, 9 aa, Severe acute respiratory syndrome-related coronavirus
  REGION 1..9: note = Table A: HLA-A*02:04H HLA-B*57:03H
  source 1..9: note = Severe acute respiratory syndrome coronavirus 2
LTNMFTPLI

SEQ ID NO: 2433 - protein, 9 aa, Severe acute respiratory syndrome-related coronavirus
  REGION 1..9: note = Table A: HLA-A*68:02H
  source 1..9: note = Severe acute respiratory syndrome coronavirus 2
MFTPLIQPI

SEQ ID NO: 2434 - protein, 9 aa, Severe acute respiratory syndrome-related coronavirus
  REGION 1..9: note = Table A: HLA-B*56:01H HLA-B*55:02H HLA-C*15:05H HLA-B*55:01M HLA-B*39:06M HLA-B*54:01H HLA-B*07:05H
  source 1..9: note = Severe acute respiratory syndrome coronavirus 2
TPLIQPIGA

SEQ ID NO: 2435 - protein, 9 aa, Severe acute respiratory syndrome-related coronavirus
  REGION 1..9: note = Table A: HLA-B*13:02H
  source 1..9: note = Severe acute respiratory syndrome coronavirus 2
IQPIGALDI

SEQ ID NO: 2436 - protein, 9 aa, Severe acute respiratory syndrome-related coronavirus
  REGION 1..9: note = Table A: HLA-A*11:303H HLA-C*15:05H HLA-B*38:02H HLA-B*13:02H
  source 1..9: note = Severe acute respiratory syndrome coronavirus 2
GALDISASI

SEQ ID NO: 2437 - protein, 9 aa, Severe acute respiratory syndrome-related coronavirus
  REGION 1..9: note = Table A: HLA-B*50:01H
  source 1..9: note = Severe acute respiratory syndrome coronavirus 2
LDISASIVA

SEQ ID NO: 2438 - protein, 9 aa, Severe acute respiratory syndrome-related coronavirus
  REGION 1..9: note = Table A: HLA-C*15:05H
  source 1..9: note = Severe acute respiratory syndrome coronavirus 2
ASIVAGGIV

SEQ ID NO: 2439 - protein, 9 aa, Severe acute respiratory syndrome-related coronavirus
  REGION 1..9: note = Table A: HLA-A*25:01H HLA-A*02:11H HLA-A*68:02M HLA-C*15:05M HLA-A*02:04H HLA-A*02:05M HLA-A*02:06M HLA-A*02:08H HLA-B*14:01H HLA-A*02:01H HLA-A*02:02H HLA-A*02:03M HLA-C*08:01H HLA-B*38:02M HLA-B*15:01H HLA-B*07:05H
  REGION 1..9: note = CONT. FROM ABOVE: HLA-B*57:03H HLA-B*13:02H
  source 1..9: note = Severe acute respiratory syndrome coronavirus 2
IVAGGIVAI

SEQ ID NO: 2440 - protein, 9 aa, Severe acute respiratory syndrome-related coronavirus
  REGION 1..9: note = Table A: HLA-C*12:05H HLA-A*68:02H HLA-C*15:05H HLA-C*12:03H
  source 1..9: note = Severe acute respiratory syndrome coronavirus 2
VAGGIVAIV

SEQ ID NO: 2441 - protein, 9 aa, Severe acute respiratory syndrome-related coronavirus
  REGION 1..9: note = Table A: HLA-A*02:05H HLA-A*02:08H HLA-A*02:01H HLA-A*02:03H HLA-B*40:06H
  source 1..9: note = Severe acute respiratory syndrome coronavirus 2
GIVAIVVTC

SEQ ID NO: 2442 - protein, 9 aa, Severe acute respiratory syndrome-related coronavirus
  REGION 1..9: note = Table A: HLA-A*68:02H HLA-C*15:05H HLA-A*02:05M HLA-A*02:06H HLA-A*02:08M HLA-A*02:02H HLA-A*02:03H HLA-B*38:02H HLA-B*07:05H
  source 1..9: note = Severe acute respiratory syndrome coronavirus 2
IVAIVVTCL

SEQ ID NO: 2443 - protein, 9 aa, Severe acute respiratory syndrome-related coronavirus
  REGION 1..9: note = Table A: HLA-B*15:02H
  source 1..9: note = Severe acute respiratory syndrome coronavirus 2
AIVVTCLAY

SEQ ID NO: 2444 - protein, 9 aa, Severe acute respiratory syndrome-related coronavirus
  REGION 1..9: note = Table A: HLA-A*74:01H HLA-A*66:01H
  source 1..9: note = Severe acute respiratory syndrome coronavirus 2
LAYYFMRFR

SEQ ID NO: 2445 - protein, 9 aa, Severe acute respiratory syndrome-related coronavirus
  REGION 1..9: note = Table A: HLA-C*14:02H HLA-A*24:07H
  source 1..9: note = Severe acute respiratory syndrome coronavirus 2
YFMRFRRAF

SEQ ID NO: 2446 - protein, 9 aa, Severe acute respiratory syndrome-related coronavirus
  REGION 1..9: note = Table A: HLA-A*30:02H
  source 1..9: note = Severe acute respiratory syndrome coronavirus 2
RFRRAFGEY

SEQ ID NO: 2447 - protein, 9 aa, Severe acute respiratory syndrome-related coronavirus
  REGION 1..9: note = Table A: HLA-C*16:04M HLA-C*06:02H HLA-C*12:05H HLA-A*02:11M HLA-A*68:02H HLA-C*15:05H HLA-C*12:03M HLA-C*15:02M HLA-A*02:05M HLA-A*02:06H HLA-A*02:08H HLA-A*02:02H HLA-A*02:03H HLA-C*17:01H HLA-C*08:01M HLA-B*38:02H
  REGION 1..9: note = CONT. FROM ABOVE: HLA-B*57:03H HLA-C*02:02H HLA-B*13:02M HLA- B*49:01H
  source 1..9: note = Severe acute respiratory syndrome coronavirus 2
RAFGEYSHV

SEQ ID NO: 2448 - protein, 9 aa, Severe acute respiratory syndrome-related coronavirus
  REGION 1..9: note = Table A: HLA-C*14:03H HLA-A*02:02H
  source 1..9: note = Severe acute respiratory syndrome coronavirus 2
AFGEYSHVV

SEQ ID NO: 2449 - protein, 9 aa, Severe acute respiratory syndrome-related coronavirus
  REGION 1..9: note = Table A: HLA-B*48:01H HLA-B*44:02M HLA-B*44:05H HLA-C*16:04M HLA-B*46:01H HLA-B*45:01M HLA-B*44:03H HLA-B*18:01H HLA-B*27:05H HLA-C*07:01H HLA-B*27:02H HLA-C*15:05H HLA-B*14:02H HLA-B*37:01H HLA-B*38:02H HLA-B*40:01H
  REGION 1..9: note = CONT. FROM ABOVE: HLA-B*40:02H HLA-B*40:06M HLA-B*15:01M HLA- B*15:02H HLA-B*15:03M HLA-B*07:05H HLA-B*41:02H HLA-B*49:01H HLA-C*07:04M HLA-B*50:01H
  source 1..9: note = Severe acute respiratory syndrome coronavirus 2
GEYSHVVAF

SEQ ID NO: 2450 - protein, 9 aa, Severe acute respiratory syndrome-related coronavirus
  REGION 1..9: note = Table A: HLA-B*48:01H HLA-B*38:01H HLA-B*38:02H HLA-B*39:01H HLA-B*15:10H
  source 1..9: note = Severe acute respiratory syndrome coronavirus 2
SHVVAFNTL

SEQ ID NO: 2451 - protein, 9 aa, Severe acute respiratory syndrome-related coronavirus
  REGION 1..9: note = Table A: HLA-A*68:02M HLA-C*15:05H HLA-C*15:02H HLA-A*02:05H HLA-A*02:06H HLA-A*02:08H HLA-A*02:02H HLA-C*17:01H HLA-C*08:01H HLA-B*38:02M HLA-B*57:03H
  source 1..9: note = Severe acute respiratory syndrome coronavirus 2
HVVAFNTLL

SEQ ID NO: 2452 - protein, 9 aa, Severe acute respiratory syndrome-related coronavirus
  REGION 1..9: note = Table A: HLA-C*03:03H HLA-C*12:05M HLA-C*03:02H HLA-C*03:04H HLA-A*68:02H HLA-C*12:03H HLA-C*15:02H HLA-A*02:04H HLA-C*17:01M HLA-C*08:01H HLA-B*38:02H
  source 1..9: note = Severe acute respiratory syndrome coronavirus 2
VAFNTLLFL

SEQ ID NO: 2453 - protein, 9 aa, Severe acute respiratory syndrome-related coronavirus
  REGION 1..9: note = Table A: HLA-A*02:11H
  source 1..9: note = Severe acute respiratory syndrome coronavirus 2
LLFLMSFTV

SEQ ID NO: 2454 - protein, 9 aa, Severe acute respiratory syndrome-related coronavirus
  REGION 1..9: note = Table A: HLA-C*14:03H
  source 1..9: note = Severe acute respiratory syndrome coronavirus 2
LFLMSFTVL

SEQ ID NO: 2455 - protein, 9 aa, Severe acute respiratory syndrome-related coronavirus
  REGION 1..9: note = Table A: HLA-A*29:01H HLA-B*35:01M HLA-B*35:07H HLA-B*38:02H HLA-B*15:02H HLA-B*07:05H
  source 1..9: note = Severe acute respiratory syndrome coronavirus 2
TVLCLTPVY

SEQ ID NO: 2456 - protein, 9 aa, Severe acute respiratory syndrome-related coronavirus
  REGION 1..9: note = Table A: HLA-A*02:04H HLA-A*02:01H HLA-A*02:02H HLA-A*02:03H HLA-B*38:02H
  source 1..9: note = Severe acute respiratory syndrome coronavirus 2
CLTPVYSFL

SEQ ID NO: 2457 - protein, 9 aa, Severe acute respiratory syndrome-related coronavirus
  REGION 1..9: note = Table A: HLA-A*29:02H HLA-A*30:02H
  source 1..9: note = Severe acute respiratory syndrome coronavirus 2
VYSFLPGVY

SEQ ID NO: 2458 - protein, 9 aa, Severe acute respiratory syndrome-related coronavirus
  REGION 1..9: note = Table A: HLA-C*14:02H HLA-C*14:03M HLA-A*02:11H HLA-A*02:04H HLA-A*02:01H HLA-B*38:02H
  source 1..9: note = Severe acute respiratory syndrome coronavirus 2
SFLPGVYSV

SEQ ID NO: 2459 - protein, 9 aa, Severe acute respiratory syndrome-related coronavirus
  REGION 1..9: note = Table A: HLA-A*02:11H HLA-A*02:07H HLA-A*02:02H HLA-B*38:02H
  source 1..9: note = Severe acute respiratory syndrome coronavirus 2
FLPGVYSVI

SEQ ID NO: 2460 - protein, 9 aa, Severe acute respiratory syndrome-related coronavirus
  REGION 1..9: note = Table A: HLA-B*35:01H HLA-B*35:07H
  source 1..9: note = Severe acute respiratory syndrome coronavirus 2
LPGVYSVIY

SEQ ID NO: 2461 - protein, 9 aa, Severe acute respiratory syndrome-related coronavirus
  REGION 1..9: note = Table A: HLA-A*29:01H HLA-A*29:02M HLA-A*30:02H
  source 1..9: note = Severe acute respiratory syndrome coronavirus 2
GVYSVIYLY

SEQ ID NO: 2462 - protein, 9 aa, Severe acute respiratory syndrome-related coronavirus
  REGION 1..9: note = Table A: HLA-A*24:02M HLA-A*24:07M HLA-C*08:01H HLA-A*23:01H
  source 1..9: note = Severe acute respiratory syndrome coronavirus 2
VYSVIYLYL

SEQ ID NO: 2463 - protein, 9 aa, Severe acute respiratory syndrome-related coronavirus
  REGION 1..9: note = Table A: HLA-A*25:01H HLA-A*26:01H HLA-A*29:02H
  source 1..9: note = Severe acute respiratory syndrome coronavirus 2
SVIYLYLTF

SEQ ID NO: 2464 - protein, 9 aa, Severe acute respiratory syndrome-related coronavirus
  REGION 1..9: note = Table A: HLA-A*24:02H HLA-A*24:07M HLA-A*23:01H
  source 1..9: note = Severe acute respiratory syndrome coronavirus 2
IYLYLTFYL

SEQ ID NO: 2465 - protein, 9 aa, Severe acute respiratory syndrome-related coronavirus
  REGION 1..9: note = Table A: HLA-A*68:02H
  source 1..9: note = Severe acute respiratory syndrome coronavirus 2
LTFYLTNDV

SEQ ID NO: 2466 - protein, 9 aa, Severe acute respiratory syndrome-related coronavirus
  REGION 1..9: note = Table A: HLA-C*14:02M HLA-C*14:03H HLA-A*29:02H HLA-C*07:02H HLA-A*24:02M HLA-A*24:07M HLA-C*08:01H HLA-A*23:01M
  source 1..9: note = Severe acute respiratory syndrome coronavirus 2
FYLTNDVSF

SEQ ID NO: 2467 - protein, 9 aa, Severe acute respiratory syndrome-related coronavirus
  REGION 1..9: note = Table A: HLA-A*11:303H HLA-A*02:11H HLA-A*02:04H HLA-A*02:05M HLA-A*02:06H HLA-A*02:07H HLA-A*02:01M HLA-A*02:02H HLA-A*02:03M HLA-C*17:01M HLA-C*08:01H HLA-B*38:02M
  source 1..9: note = Severe acute respiratory syndrome coronavirus 2
YLTNDVSFL

SEQ ID NO: 2468 - protein, 9 aa, Severe acute respiratory syndrome-related coronavirus
  REGION 1..9: note = Table A: HLA-A*68:02H
  source 1..9: note = Severe acute respiratory syndrome coronavirus 2
LTNDVSFLA

SEQ ID NO: 2469 - protein, 9 aa, Severe acute respiratory syndrome-related coronavirus
  REGION 1..9: note = Table A: HLA-A*68:02H
  source 1..9: note = Severe acute respiratory syndrome coronavirus 2
NDVSFLAHI

SEQ ID NO: 2470 - protein, 9 aa, Severe acute respiratory syndrome-related coronavirus
  REGION 1..9: note = Table A: HLA-B*58:01M HLA-B*58:02M HLA-B*57:01M HLA-B*57:03H
  source 1..9: note = Severe acute respiratory syndrome coronavirus 2
VSFLAHIQW

SEQ ID NO: 2471 - protein, 9 aa, Severe acute respiratory syndrome-related coronavirus
  REGION 1..9: note = Table A: HLA-C*14:02H HLA-C*14:03M
  source 1..9: note = Severe acute respiratory syndrome coronavirus 2
SFLAHIQWM

SEQ ID NO: 2472 - protein, 9 aa, Severe acute respiratory syndrome-related coronavirus
  REGION 1..9: note = Table A: HLA-A*02:11H HLA-A*68:02M HLA-A*02:04M HLA-A*02:07H HLA-A*02:01H HLA-A*02:02H HLA-A*02:03H HLA-B*38:02H HLA-B*13:02H
  source 1..9: note = Severe acute respiratory syndrome coronavirus 2
FLAHIQWMV

SEQ ID NO: 2473 - protein, 9 aa, Severe acute respiratory syndrome-related coronavirus
  REGION 1..9: note = Table A: HLA-B*38:01H HLA-B*38:02M HLA-B*15:03H HLA-B*15:10H
  source 1..9: note = Severe acute respiratory syndrome coronavirus 2
AHIQWMVMF

SEQ ID NO: 2474 - protein, 9 aa, Severe acute respiratory syndrome-related coronavirus
  REGION 1..9: note = Table A: HLA-B*46:01H
  source 1..9: note = Severe acute respiratory syndrome coronavirus 2
VMFTPLVPF

SEQ ID NO: 2475 - protein, 9 aa, Severe acute respiratory syndrome-related coronavirus
  REGION 1..9: note = Table A: HLA-A*24:02H HLA-A*24:07M HLA-A*23:01H
  source 1..9: note = Severe acute respiratory syndrome coronavirus 2
MFTPLVPFW

SEQ ID NO: 2476 - protein, 9 aa, Severe acute respiratory syndrome-related coronavirus
  REGION 1..9: note = Table A: HLA-C*04:03M HLA-A*68:02H
  source 1..9: note = Severe acute respiratory syndrome coronavirus 2
FTPLVPFWI

SEQ ID NO: 2477 - protein, 9 aa, Severe acute respiratory syndrome-related coronavirus
  REGION 1..9: note = Table A: HLA-A*29:02H HLA-B*55:02H HLA-B*35:01M HLA-B*35:07H HLA-B*38:02H HLA-B*15:02H HLA-B*15:11M
  source 1..9: note = Severe acute respiratory syndrome coronavirus 2
VPFWITIAY

SEQ ID NO: 2478 - protein, 9 aa, Severe acute respiratory syndrome-related coronavirus
  REGION 1..9: note = Table A: HLA-B*58:02H HLA-A*68:02H HLA-C*15:05H HLA-C*15:02H HLA-B*57:03H HLA-B*13:02H
  source 1..9: note = Severe acute respiratory syndrome coronavirus 2
ITIAYIICI

SEQ ID NO: 2479 - protein, 9 aa, Severe acute respiratory syndrome-related coronavirus
  REGION 1..9: note = Table A: HLA-B*58:01H HLA-B*58:02M HLA-B*57:03M
  source 1..9: note = Severe acute respiratory syndrome coronavirus 2
ISTKHFYWF

SEQ ID NO: 2480 - protein, 9 aa, Severe acute respiratory syndrome-related coronavirus
  REGION 1..9: note = Table A: HLA-B*58:02H HLA-B*57:01H HLA-A*24:07H HLA-B*57:03M
  source 1..9: note = Severe acute respiratory syndrome coronavirus 2
STKHFYWFF

SEQ ID NO: 2481 - protein, 9 aa, Severe acute respiratory syndrome-related coronavirus
  REGION 1..9: note = Table A: HLA-C*14:02H HLA-C*14:03M HLA-A*29:02M HLA-A*30:02H
  source 1..9: note = Severe acute respiratory syndrome coronavirus 2
HFYWFFSNY

SEQ ID NO: 2482 - protein, 9 aa, Severe acute respiratory syndrome-related coronavirus
  REGION 1..9: note = Table A: HLA-C*14:02H HLA-C*14:03M HLA-C*06:02H HLA-A*29:02H HLA-A*24:07H HLA-C*08:01H
  source 1..9: note = Severe acute respiratory syndrome coronavirus 2
FYWFFSNYL

SEQ ID NO: 2483 - protein, 9 aa, Severe acute respiratory syndrome-related coronavirus
  REGION 1..9: note = Table A: HLA-A*24:07M HLA-A*23:01H
  source 1..9: note = Severe acute respiratory syndrome coronavirus 2
NYLKRRVVF

SEQ ID NO: 2484 - protein, 9 aa, Severe acute respiratory syndrome-related coronavirus
  REGION 1..9: note = Table A: HLA-B*58:01M HLA-A*11:303H HLA-B*57:01H HLA-B*46:01H HLA-C*15:05M HLA-A*24:07H HLA-C*08:01H HLA-B*38:02H HLA-A*32:01H HLA-B*07:04H HLA-B*15:01M HLA-B*15:02H HLA-B*15:03M HLA-B*07:05H HLA-B*57:03H
  REGION 1..9: note = CONT. FROM ABOVE: HLA-B*13:01H
  source 1..9: note = Severe acute respiratory syndrome coronavirus 2
RVVFNGVSF

SEQ ID NO: 2485 - protein, 9 aa, Severe acute respiratory syndrome-related coronavirus
  REGION 1..9: note = Table A: HLA-A*29:01H HLA-A*29:02H
  source 1..9: note = Severe acute respiratory syndrome coronavirus 2
VFNGVSFST

SEQ ID NO: 2486 - protein, 9 aa, Severe acute respiratory syndrome-related coronavirus
  REGION 1..9: note = Table A: HLA-C*16:04H HLA-A*68:02H HLA-A*02:05H HLA-C*08:01H HLA-B*54:01H
  source 1..9: note = Severe acute respiratory syndrome coronavirus 2
VSFSTFEEA

SEQ ID NO: 2487 - protein, 9 aa, Severe acute respiratory syndrome-related coronavirus
  REGION 1..9: note = Table A: HLA-A*11:303H HLA-C*03:03H HLA-C*03:04H HLA-B*35:03H HLA-B*35:02H HLA-B*35:12H
  source 1..9: note = Severe acute respiratory syndrome coronavirus 2
FSTFEEAAL

SEQ ID NO: 2488 - protein, 9 aa, Severe acute respiratory syndrome-related coronavirus
  REGION 1..9: note = Table A: HLA-A*68:02M HLA-A*02:05H HLA-A*02:08H
  source 1..9: note = Severe acute respiratory syndrome coronavirus 2
STFEEAALC

SEQ ID NO: 2489 - protein, 9 aa, Severe acute respiratory syndrome-related coronavirus
  REGION 1..9: note = Table A: HLA-B*44:05H HLA-B*18:01H HLA-B*40:01H
  source 1..9: note = Severe acute respiratory syndrome coronavirus 2
FEEAALCTF

SEQ ID NO: 2490 - protein, 9 aa, Severe acute respiratory syndrome-related coronavirus
  REGION 1..9: note = Table A: HLA-B*44:05H
  source 1..9: note = Severe acute respiratory syndrome coronavirus 2
EEAALCTFL

SEQ ID NO: 2491 - protein, 9 aa, Severe acute respiratory syndrome-related coronavirus
  REGION 1..9: note = Table A: HLA-A*68:02H
  source 1..9: note = Severe acute respiratory syndrome coronavirus 2
EAALCTFLL

SEQ ID NO: 2492 - protein, 9 aa, Severe acute respiratory syndrome-related coronavirus
  REGION 1..9: note = Table A: HLA-A*03:01H HLA-A*11:01H HLA-A*11:02H
  source 1..9: note = Severe acute respiratory syndrome coronavirus 2
ALCTFLLNK

SEQ ID NO: 2493 - protein, 9 aa, Severe acute respiratory syndrome-related coronavirus
  REGION 1..9: note = Table A: HLA-C*14:03H HLA-A*29:02H HLA-B*15:02M
  source 1..9: note = Severe acute respiratory syndrome coronavirus 2
TFLLNKEMY

SEQ ID NO: 2494 - protein, 9 aa, Severe acute respiratory syndrome-related coronavirus
  REGION 1..9: note = Table A: HLA-A*11:303H HLA-B*08:01H HLA-A*02:11H HLA-C*03:04H HLA-A*02:04H HLA-A*02:06H HLA-A*02:07M HLA-A*02:01H HLA-A*02:02H HLA-A*02:03H HLA-C*17:01M HLA-C*08:01H HLA-B*38:02M HLA-B*13:01H
  source 1..9: note = Severe acute respiratory syndrome coronavirus 2
FLLNKEMYL

SEQ ID NO: 2495 - protein, 9 aa, Severe acute respiratory syndrome-related coronavirus
  REGION 1..9: note = Table A: HLA-A*74:01H HLA-A*03:02H
  source 1..9: note = Severe acute respiratory syndrome coronavirus 2
LLNKEMYLK

SEQ ID NO: 2496 - protein, 9 aa, Severe acute respiratory syndrome-related coronavirus
  REGION 1..9: note = Table A: HLA-B*08:01M HLA-A*02:02M
  source 1..9: note = Severe acute respiratory syndrome coronavirus 2
YLKLRSDVL

SEQ ID NO: 2497 - protein, 9 aa, Severe acute respiratory syndrome-related coronavirus
  REGION 1..9: note = Table A: HLA-A*36:01H
  source 1..9: note = Severe acute respiratory syndrome coronavirus 2
RSDVLLPLT

SEQ ID NO: 2498 - protein, 9 aa, Severe acute respiratory syndrome-related coronavirus
  REGION 1..9: note = Table A: HLA-A*25:01M HLA-A*26:01M HLA-A*26:02H HLA-A*26:03M HLA-B*18:01H HLA-C*15:05H HLA-A*34:01M HLA-A*34:02M HLA-B*35:01H HLA-B*35:08H HLA-B*35:07H HLA-B*38:02H HLA-B*15:02H HLA-B*39:01H HLA-B*07:05M HLA-B*15:11H
  REGION 1..9: note = CONT. FROM ABOVE: HLA-A*66:01H
  source 1..9: note = Severe acute respiratory syndrome coronavirus 2
DVLLPLTQY

SEQ ID NO: 2499 - protein, 9 aa, Severe acute respiratory syndrome-related coronavirus
  REGION 1..9: note = Table A: HLA-A*74:01H
  source 1..9: note = Severe acute respiratory syndrome coronavirus 2
LLPLTQYNR

SEQ ID NO: 2500 - protein, 9 aa, Severe acute respiratory syndrome-related coronavirus
  REGION 1..9: note = Table A: HLA-B*53:01M HLA-B*35:01M HLA-B*35:07M
  source 1..9: note = Severe acute respiratory syndrome coronavirus 2
LPLTQYNRY

SEQ ID NO: 2501 - protein, 9 aa, Severe acute respiratory syndrome-related coronavirus
  REGION 1..9: note = Table A: HLA-B*48:01H HLA-C*14:03H HLA-A*11:303H HLA-C*16:01H HLA-B*08:01M HLA-C*03:03H HLA-A*02:11H HLA-C*03:02H HLA-C*03:04H HLA-C*15:05H HLA-B*14:02H HLA-C*15:02H HLA-A*02:04H HLA-A*02:05H HLA-A*02:06H
  REGION 1..9: note = CONT. FROM ABOVE: HLA-B*14:01M HLA-A*02:03H HLA-B*52:01H HLA- C*08:01H HLA-B*38:02M HLA-B*15:01H HLA-B*15:02M HLA-B*15:03M HLA-B*13:01H HLA-B*13:02M HLA-B*15:10M
  source 1..9: note = Severe acute respiratory syndrome coronavirus 2
TQYNRYLAL

SEQ ID NO: 2502 - protein, 9 aa, Severe acute respiratory syndrome-related coronavirus
  REGION 1..9: note = Table A: HLA-A*29:02H HLA-A*30:02M
  source 1..9: note = Severe acute respiratory syndrome coronavirus 2
QYNRYLALY

SEQ ID NO: 2503 - protein, 9 aa, Severe acute respiratory syndrome-related coronavirus
  REGION 1..9: note = Table A: HLA-B*27:05H
  source 1..9: note = Severe acute respiratory syndrome coronavirus 2
NRYLALYNK

SEQ ID NO: 2504 - protein, 9 aa, Severe acute respiratory syndrome-related coronavirus
  REGION 1..9: note = Table A: HLA-C*14:02H HLA-C*14:03M HLA-A*36:01H HLA-A*29:02H HLA-C*07:02H HLA-A*30:02H HLA-A*24:02H HLA-A*24:07H HLA-A*23:01H
  source 1..9: note = Severe acute respiratory syndrome coronavirus 2
RYLALYNKY

SEQ ID NO: 2505 - protein, 9 aa, Severe acute respiratory syndrome-related coronavirus
  REGION 1..9: note = Table A: HLA-A*29:02H
  source 1..9: note = Severe acute respiratory syndrome coronavirus 2
LALYNKYKY

SEQ ID NO: 2506 - protein, 9 aa, Severe acute respiratory syndrome-related coronavirus
  REGION 1..9: note = Table A: HLA-A*74:01H HLA-A*03:01H HLA-A*02:11H HLA-A*02:02H
  source 1..9: note = Severe acute respiratory syndrome coronavirus 2
ALYNKYKYF

SEQ ID NO: 2507 - protein, 9 aa, Severe acute respiratory syndrome-related coronavirus
  REGION 1..9: note = Table A: HLA-A*11:303H HLA-B*46:01M HLA-A*30:02H HLA-C*07:27H HLA-B*35:01M HLA-B*35:08M HLA-B*38:02M HLA-B*15:01H HLA-B*15:02M HLA-B*15:03H HLA-B*39:01M HLA-B*07:05M HLA-B*15:11M
  source 1..9: note = Severe acute respiratory syndrome coronavirus 2
SGAMDTTSY

SEQ ID NO: 2508 - protein, 9 aa, Severe acute respiratory syndrome-related coronavirus
  REGION 1..9: note = Table A: HLA-A*11:303H HLA-A*74:01H HLA-A*03:02H HLA-A*11:01M HLA-A*11:02M HLA-A*33:01H HLA-A*33:03M HLA-A*26:03M HLA-A*30:02H HLA-A*68:01M HLA-A*34:01H HLA-A*34:02M HLA-C*07:27H HLA-A*31:01H HLA-A*66:01H
  source 1..9: note = Severe acute respiratory syndrome coronavirus 2
GAMDTTSYR

SEQ ID NO: 2509 - protein, 9 aa, Severe acute respiratory syndrome-related coronavirus
  REGION 1..9: note = Table A: HLA-B*55:02H HLA-B*54:01H HLA-B*50:01H
  source 1..9: note = Severe acute respiratory syndrome coronavirus 2
MDTTSYREA

SEQ ID NO: 2510 - protein, 9 aa, Severe acute respiratory syndrome-related coronavirus
  REGION 1..9: note = Table A: HLA-A*34:02H
  source 1..9: note = Severe acute respiratory syndrome coronavirus 2
EAACCHLAK

SEQ ID NO: 2511 - protein, 9 aa, Severe acute respiratory syndrome-related coronavirus
  REGION 1..9: note = Table A: HLA-A*02:02H HLA-B*38:02M HLA-B*15:01H HLA-B*15:02M HLA-B*13:01H
  source 1..9: note = Severe acute respiratory syndrome coronavirus 2
HLAKALNDF

SEQ ID NO: 2512 - protein, 9 aa, Severe acute respiratory syndrome-related coronavirus
  REGION 1..9: note = Table A: HLA-C*03:04H HLA-B*35:03H HLA-C*08:01H HLA-B*38:02H HLA-B*39:01H
  source 1..9: note = Severe acute respiratory syndrome coronavirus 2
FSNSGSDVL

SEQ ID NO: 2513 - protein, 9 aa, Severe acute respiratory syndrome-related coronavirus
  REGION 1..9: note = Table A: HLA-B*38:02H
  source 1..9: note = Severe acute respiratory syndrome coronavirus 2
VLYQPPQTS

SEQ ID NO: 2514 - protein, 9 aa, Severe acute respiratory syndrome-related coronavirus
  REGION 1..9: note = Table A: HLA-C*14:02H HLA-C*14:03M HLA-A*24:02M HLA-A*24:07M HLA-C*08:01H HLA-A*23:01H
  source 1..9: note = Severe acute respiratory syndrome coronavirus 2
LYQPPQTSI

SEQ ID NO: 2515 - protein, 9 aa, Severe acute respiratory syndrome-related coronavirus
  REGION 1..9: note = Table A: HLA-B*56:01H HLA-B*55:02H HLA-C*15:05H HLA-B*55:01H
  source 1..9: note = Severe acute respiratory syndrome coronavirus 2
PPQTSITSA

SEQ ID NO: 2516 - protein, 9 aa, Severe acute respiratory syndrome-related coronavirus
  REGION 1..9: note = Table A: HLA-B*58:01H HLA-B*44:05H HLA-B*57:01M HLA-C*15:05H HLA-B*35:01H HLA-B*38:02H HLA-B*15:01H HLA-B*07:05M HLA-B*57:03H
  source 1..9: note = Severe acute respiratory syndrome coronavirus 2
TSAVLQSGF

SEQ ID NO: 2517 - protein, 9 aa, Severe acute respiratory syndrome-related coronavirus
  REGION 1..9: note = Table A: HLA-A*68:01H HLA-A*34:01H HLA-A*34:02H HLA-A*66:01H
  source 1..9: note = Severe acute respiratory syndrome coronavirus 2
SAVLQSGFR

SEQ ID NO: 2518 - protein, 9 aa, Severe acute respiratory syndrome-related coronavirus
  REGION 1..9: note = Table A: HLA-A*11:303M HLA-A*74:01H HLA-A*03:01H HLA-A*03:02H HLA-A*11:01H HLA-A*11:02H HLA-A*30:02H HLA-A*34:02M HLA-C*07:27M
  source 1..9: note = Severe acute respiratory syndrome coronavirus 2
AVLQSGFRK

SEQ ID NO: 2519 - protein, 9 aa, Severe acute respiratory syndrome-related coronavirus
  REGION 1..9: note = Table A: HLA-C*16:01H
  source 1..9: note = Severe acute respiratory syndrome coronavirus 2
QSGFRKMAF

SEQ ID NO: 2520 - protein, 9 aa, Severe acute respiratory syndrome-related coronavirus
  REGION 1..9: note = Table A: HLA-A*02:11H HLA-A*02:02H HLA-B*38:02H HLA-B*13:02H
  source 1..9: note = Severe acute respiratory syndrome coronavirus 2
KMAFPSGKV

SEQ ID NO: 2521 - protein, 9 aa, Severe acute respiratory syndrome-related coronavirus
  REGION 1..9: note = Table A: HLA-B*58:01H HLA-B*57:01M HLA-B*57:03M
  source 1..9: note = Severe acute respiratory syndrome coronavirus 2
GTTTLNGLW

SEQ ID NO: 2522 - protein, 9 aa, Severe acute respiratory syndrome-related coronavirus
  REGION 1..9: note = Table A: HLA-B*15:01H HLA-B*15:02H
  source 1..9: note = Severe acute respiratory syndrome coronavirus 2
GLWLDDVVY

SEQ ID NO: 2523 - protein, 9 aa, Severe acute respiratory syndrome-related coronavirus
  REGION 1..9: note = Table A: HLA-A*02:01H
  source 1..9: note = Severe acute respiratory syndrome coronavirus 2
LWLDDVVYC

SEQ ID NO: 2524 - protein, 9 aa, Severe acute respiratory syndrome-related coronavirus
  REGION 1..9: note = Table A: HLA-B*38:02H HLA-B*15:02M
  source 1..9: note = Severe acute respiratory syndrome coronavirus 2
HVICTSEDM

SEQ ID NO: 2525 - protein, 9 aa, Severe acute respiratory syndrome-related coronavirus
  REGION 1..9: note = Table A: HLA-B*44:02H HLA-B*44:05M HLA-B*44:03M HLA-B*18:01H HLA-B*07:05M
  source 1..9: note = Severe acute respiratory syndrome coronavirus 2
SEDMLNPNY

SEQ ID NO: 2526 - protein, 9 aa, Severe acute respiratory syndrome-related coronavirus
  REGION 1..9: note = Table A: HLA-A*11:303H HLA-B*35:03H HLA-C*01:02H HLA-A*02:04H HLA-A*02:02M HLA-A*02:03H HLA-B*38:02M HLA-B*39:01H
  source 1..9: note = Severe acute respiratory syndrome coronavirus 2
MLNPNYEDL

SEQ ID NO: 2527 - protein, 9 aa, Severe acute respiratory syndrome-related coronavirus
  REGION 1..9: note = Table A: HLA-B*53:01M HLA-B*35:03H HLA-C*15:05H HLA-B*35:02H HLA-B*51:01H
  source 1..9: note = Severe acute respiratory syndrome coronavirus 2
NPNYEDLLI

SEQ ID NO: 2528 - protein, 9 aa, Severe acute respiratory syndrome-related coronavirus
  REGION 1..9: note = Table A: HLA-B*50:01H
  source 1..9: note = Severe acute respiratory syndrome coronavirus 2
YEDLLIRKS

SEQ ID NO: 2529 - protein, 9 aa, Severe acute respiratory syndrome-related coronavirus
  REGION 1..9: note = Table A: HLA-B*57:03H
  source 1..9: note = Severe acute respiratory syndrome coronavirus 2
LIRKSNHNF

SEQ ID NO: 2530 - protein, 9 aa, Severe acute respiratory syndrome-related coronavirus
  REGION 1..9: note = Table A: HLA-C*06:02H
  source 1..9: note = Severe acute respiratory syndrome coronavirus 2
IRKSNHNFL

SEQ ID NO: 2531 - protein, 9 aa, Severe acute respiratory syndrome-related coronavirus
  REGION 1..9: note = Table A: HLA-B*45:01H HLA-B*55:02H HLA-A*68:02H HLA-B*39:06M HLA-B*40:06H HLA-B*54:01H HLA-B*50:01H
  source 1..9: note = Severe acute respiratory syndrome coronavirus 2
SNHNFLVQA

SEQ ID NO: 2532 - protein, 9 aa, Severe acute respiratory syndrome-related coronavirus
  REGION 1..9: note = Table A: HLA-B*38:02H HLA-B*39:06M HLA-B*39:01M
  source 1..9: note = Severe acute respiratory syndrome coronavirus 2
NHNFLVQAG

SEQ ID NO: 2533 - protein, 9 aa, Severe acute respiratory syndrome-related coronavirus
  REGION 1..9: note = Table A: HLA-A*02:08H
  source 1..9: note = Severe acute respiratory syndrome coronavirus 2
LVQAGNVQL

SEQ ID NO: 2534 - protein, 9 aa, Severe acute respiratory syndrome-related coronavirus
  REGION 1..9: note = Table A: HLA-A*74:01H HLA-B*27:02H HLA-A*68:01H HLA-A*34:01H HLA-A*31:01M
  source 1..9: note = Severe acute respiratory syndrome coronavirus 2
VQAGNVQLR

SEQ ID NO: 2535 - protein, 9 aa, Severe acute respiratory syndrome-related coronavirus
  REGION 1..9: note = Table A: HLA-C*12:05H HLA-A*68:02H HLA-C*15:05H HLA-C*15:02H HLA-B*51:01H HLA-B*38:02H HLA-B*13:02H
  source 1..9: note = Severe acute respiratory syndrome coronavirus 2
QAGNVQLRV

SEQ ID NO: 2536 - protein, 9 aa, Severe acute respiratory syndrome-related coronavirus
  REGION 1..9: note = Table A: HLA-B*58:02H
  source 1..9: note = Severe acute respiratory syndrome coronavirus 2
AGNVQLRVI

SEQ ID NO: 2537 - protein, 9 aa, Severe acute respiratory syndrome-related coronavirus
  REGION 1..9: note = Table A: HLA-B*08:01H HLA-A*02:02H HLA-B*38:02M HLA-B*07:02H HLA-B*07:04H HLA-B*15:01H HLA-B*15:02M
  source 1..9: note = Severe acute respiratory syndrome coronavirus 2
QLRVIGHSM

SEQ ID NO: 2538 - protein, 9 aa, Severe acute respiratory syndrome-related coronavirus
  REGION 1..9: note = Table A: HLA-B*48:01H HLA-B*38:01H HLA-B*38:02M HLA-B*39:01M HLA-B*15:10H
  source 1..9: note = Severe acute respiratory syndrome coronavirus 2
GHSMQNCVL

SEQ ID NO: 2539 - protein, 9 aa, Severe acute respiratory syndrome-related coronavirus
  REGION 1..9: note = Table A: HLA-A*03:02H HLA-A*11:01M HLA-A*11:02M HLA-A*34:02M HLA-C*07:27H
  source 1..9: note = Severe acute respiratory syndrome coronavirus 2
HSMQNCVLK

SEQ ID NO: 2540 - protein, 9 aa, Severe acute respiratory syndrome-related coronavirus
  REGION 1..9: note = Table A: HLA-C*15:05H HLA-B*38:02H
  source 1..9: note = Severe acute respiratory syndrome coronavirus 2
SMQNCVLKL

SEQ ID NO: 2541 - protein, 9 aa, Severe acute respiratory syndrome-related coronavirus
  REGION 1..9: note = Table A: HLA-B*08:01M HLA-A*02:05H HLA-A*02:02M HLA-A*02:03M HLA-B*38:02H
  source 1..9: note = Severe acute respiratory syndrome coronavirus 2
VLKLKVDTA

SEQ ID NO: 2542 - protein, 9 aa, Severe acute respiratory syndrome-related coronavirus
  REGION 1..9: note = Table A: HLA-A*02:01H
  source 1..9: note = Severe acute respiratory syndrome coronavirus 2
KVDTANPKT

SEQ ID NO: 2543 - protein, 9 aa, Severe acute respiratory syndrome-related coronavirus
  REGION 1..9: note = Table A: HLA-B*50:01H
  source 1..9: note = Severe acute respiratory syndrome coronavirus 2
VDTANPKTP

SEQ ID NO: 2544 - protein, 9 aa, Severe acute respiratory syndrome-related coronavirus
  REGION 1..9: note = Table A: HLA-A*33:01M HLA-A*33:03M HLA-A*26:03H HLA-A*68:01M HLA-A*34:01H HLA-A*34:02H HLA-A*66:01H
  source 1..9: note = Severe acute respiratory syndrome coronavirus 2
DTANPKTPK

SEQ ID NO: 2545 - protein, 9 aa, Severe acute respiratory syndrome-related coronavirus
  REGION 1..9: note = Table A: HLA-B*58:01H HLA-B*58:02H HLA-A*11:303H HLA-C*16:01M HLA-A*03:01H HLA-A*11:01H HLA-A*11:02H HLA-A*36:01H HLA-B*57:01H HLA-B*46:01M HLA-A*26:01H HLA-A*29:02H HLA-B*53:01H HLA-C*03:02M HLA-A*30:02M
  REGION 1..9: note = CONT. FROM ABOVE: HLA-B*35:03H HLA-C*15:05H HLA-C*12:02M HLA- C*12:03H HLA-A*34:02M HLA-C*07:27H HLA-B*35:01H HLA-B*35:08M HLA-B*35:07H HLA-B*38:02M HLA-B*15:01M HLA-B*15:02M HLA-B*15 :03H HLA-B*07:05H HLA-B*57:03H HLA-C*02:02H HLA-B*15:11M
  source 1..9: note = Severe acute respiratory syndrome coronavirus 2
TANPKTPKY

SEQ ID NO: 2546 - protein, 9 aa, Severe acute respiratory syndrome-related coronavirus
  REGION 1..9: note = Table A: HLA-B*42:01H HLA-B*07:04M
  source 1..9: note = Severe acute respiratory syndrome coronavirus 2
NPKTPKYKF

SEQ ID NO: 2547 - protein, 9 aa, Severe acute respiratory syndrome-related coronavirus
  REGION 1..9: note = Table A: HLA-A*74:01M
  source 1..9: note = Severe acute respiratory syndrome coronavirus 2
KTPKYKFVR

SEQ ID NO: 2548 - protein, 9 aa, Severe acute respiratory syndrome-related coronavirus
  REGION 1..9: note = Table A: HLA-B*42:01H HLA-B*08:01H HLA-B*55:01H HLA-B*07:04M
  source 1..9: note = Severe acute respiratory syndrome coronavirus 2
TPKYKFVRI

SEQ ID NO: 2549 - protein, 9 aa, Severe acute respiratory syndrome-related coronavirus
  REGION 1..9: note = Table A: HLA-B*44:05H HLA-C*16:04M HLA-B*46:01H HLA-C*06:02H HLA-B*27:05M HLA-C*07:01H HLA-C*07:02H HLA-B*27:02H HLA-C*15:05H HLA-B*14:02H HLA-B*14:01H HLA-A*24:02H HLA-A*23:01H HLA-B*38:01M HLA-B*38:02H HLA-B*15:01M
  REGION 1..9: note = CONT. FROM ABOVE: HLA-B*15:02H HLA-B*15:03M HLA-B*39:01M HLA- B*07:05H HLA-B*15:10H
  source 1..9: note = Severe acute respiratory syndrome coronavirus 2
VRIQPGQTF

SEQ ID NO: 2550 - protein, 9 aa, Severe acute respiratory syndrome-related coronavirus
  REGION 1..9: note = Table A: HLA-A*02:11H HLA-A*02:06H HLA-A*02:07H HLA-B*13:02M
  source 1..9: note = Severe acute respiratory syndrome coronavirus 2
IQPGQTFSV

SEQ ID NO: 2551 - protein, 9 aa, Severe acute respiratory syndrome-related coronavirus
  REGION 1..9: note = Table A: HLA-B*42:01H HLA-B*35:03M HLA-C*15:05M HLA-B*35:01H HLA-B*38:02H HLA-B*07:02M HLA-B*07:04H HLA-B*07:05M
  source 1..9: note = Severe acute respiratory syndrome coronavirus 2
QPGQTFSVL

SEQ ID NO: 2552 - protein, 9 aa, Severe acute respiratory syndrome-related coronavirus
  REGION 1..9: note = Table A: HLA-B*13:02M
  source 1..9: note = Severe acute respiratory syndrome coronavirus 2
GQTFSVLAC

SEQ ID NO: 2553 - protein, 9 aa, Severe acute respiratory syndrome-related coronavirus
  REGION 1..9: note = Table A: HLA-A*29:02H HLA-A*30:02M HLA-B*38:02H
  source 1..9: note = Severe acute respiratory syndrome coronavirus 2
QTFSVLACY

SEQ ID NO: 2554 - protein, 9 aa, Severe acute respiratory syndrome-related coronavirus
  REGION 1..9: note = Table A: HLA-A*29:02H HLA-B*39:01H HLA-B*15:11H
  source 1..9: note = Severe acute respiratory syndrome coronavirus 2
YNGSPSGVY

SEQ ID NO: 2555 - protein, 9 aa, Severe acute respiratory syndrome-related coronavirus
  REGION 1..9: note = Table A: HLA-B*39:01H
  source 1..9: note = Severe acute respiratory syndrome coronavirus 2
NGSPSGVYQ

SEQ ID NO: 2556 - protein, 9 aa, Severe acute respiratory syndrome-related coronavirus
  REGION 1..9: note = Table A: HLA-B*56:01M HLA-B*55:02H HLA-C*15:05M HLA-B*55:01M HLA-B*54:01H HLA-B*07:05H
  source 1..9: note = Severe acute respiratory syndrome coronavirus 2
SPSGVYQCA

SEQ ID NO: 2557 - protein, 9 aa, Severe acute respiratory syndrome-related coronavirus
  REGION 1..9: note = Table A: HLA-B*58:02H HLA-C*15:05H HLA-B*51:01H HLA-B*57:03H
  source 1..9: note = Severe acute respiratory syndrome coronavirus 2
CAMRPNFTI

SEQ ID NO: 2558 - protein, 9 aa, Severe acute respiratory syndrome-related coronavirus
  REGION 1..9: note = Table A: HLA-A*74:01H HLA-A*03:01M HLA-A*11:01H HLA-A*11:02H HLA-A*30:01M HLA-A*34:02H
  source 1..9: note = Severe acute respiratory syndrome coronavirus 2
AMRPNFTIK

SEQ ID NO: 2559 - protein, 9 aa, Severe acute respiratory syndrome-related coronavirus
  REGION 1..9: note = Table A: HLA-B*56:01H HLA-B*55:02H HLA-B*55:01H
  source 1..9: note = Severe acute respiratory syndrome coronavirus 2
RPNFTIKGS

SEQ ID NO: 2560 - protein, 9 aa, Severe acute respiratory syndrome-related coronavirus
  REGION 1..9: note = Table A: HLA-A*24:07H
  source 1..9: note = Severe acute respiratory syndrome coronavirus 2
NFTIKGSFL

SEQ ID NO: 2561 - protein, 9 aa, Severe acute respiratory syndrome-related coronavirus
  REGION 1..9: note = Table A: HLA-C*15:05H
  source 1..9: note = Severe acute respiratory syndrome coronavirus 2
GSFLNGSCG

SEQ ID NO: 2562 - protein, 9 aa, Severe acute respiratory syndrome-related coronavirus
  REGION 1..9: note = Table A: HLA-A*02:03H HLA-B*38:02H
  source 1..9: note = Severe acute respiratory syndrome coronavirus 2
FLNGSCGSV

SEQ ID NO: 2563 - protein, 9 aa, Severe acute respiratory syndrome-related coronavirus
  REGION 1..9: note = Table A: HLA-A*30:02H
  source 1..9: note = Severe acute respiratory syndrome coronavirus 2
GSVGFNIDY

SEQ ID NO: 2564 - protein, 9 aa, Severe acute respiratory syndrome-related coronavirus
  REGION 1..9: note = Table A: HLA-C*04:03M HLA-B*35:02H HLA-B*35:08H HLA-C*08:02H HLA-B*35:12H HLA-C*05:01H
  source 1..9: note = Severe acute respiratory syndrome coronavirus 2
NIDYDCVSF

SEQ ID NO: 2565 - protein, 9 aa, Severe acute respiratory syndrome-related coronavirus
  REGION 1..9: note = Table A: HLA-C*03:04H
  source 1..9: note = Severe acute respiratory syndrome coronavirus 2
FCYMHHMEL

SEQ ID NO: 2566 - protein, 9 aa, Severe acute respiratory syndrome-related coronavirus
  REGION 1..9: note = Table A: HLA-B*38:02H
  source 1..9: note = Severe acute respiratory syndrome coronavirus 2
MHHMELPTG

SEQ ID NO: 2567 - protein, 9 aa, Severe acute respiratory syndrome-related coronavirus
  REGION 1..9: note = Table A: HLA-A*02:11H HLA-B*38:01M HLA-B*38:02H HLA-B*39:06H HLA-B*39:01M HLA-B*13:02H HLA-B*15:10H
  source 1..9: note = Severe acute respiratory syndrome coronavirus 2
HHMELPTGV

SEQ ID NO: 2568 - protein, 9 aa, Severe acute respiratory syndrome-related coronavirus
  REGION 1..9: note = Table A: HLA-B*15:02H
  source 1..9: note = Severe acute respiratory syndrome coronavirus 2
HMELPTGVH

SEQ ID NO: 2569 - protein, 9 aa, Severe acute respiratory syndrome-related coronavirus
  REGION 1..9: note = Table A: HLA-B*44:05H HLA-B*45:01H HLA-B*18:01H HLA-B*55:02H HLA-B*38:02H HLA-B*39:06M HLA-B*40:02H HLA-B*40:06M HLA-B*54:01H HLA-B*39:01H HLA-B*07:05H HLA-B*41:02M HLA-B*49:01M HLA-B*50:01H
  source 1..9: note = Severe acute respiratory syndrome coronavirus 2
MELPTGVHA

SEQ ID NO: 2570 - protein, 9 aa, Severe acute respiratory syndrome-related coronavirus
  REGION 1..9: note = Table A: HLA-A*26:03H HLA-A*34:01H
  source 1..9: note = Severe acute respiratory syndrome coronavirus 2
ELPTGVHAG

SEQ ID NO: 2571 - protein, 9 aa, Severe acute respiratory syndrome-related coronavirus
  REGION 1..9: note = Table A: HLA-B*56:01H HLA-B*55:02H HLA-B*54:01H
  source 1..9: note = Severe acute respiratory syndrome coronavirus 2
LPTGVHAGT

SEQ ID NO: 2572 - protein, 9 aa, Severe acute respiratory syndrome-related coronavirus
  REGION 1..9: note = Table A: HLA-B*58:01H HLA-A*36:01H HLA-A*01:01H HLA-A*30:02H
  source 1..9: note = Severe acute respiratory syndrome coronavirus 2
GTDLEGNFY

SEQ ID NO: 2573 - protein, 9 aa, Severe acute respiratory syndrome-related coronavirus
  REGION 1..9: note = Table A: HLA-A*33:01M HLA-A*33:03H HLA-A*68:01H HLA-A*34:01H HLA-A*34:02H HLA-A*31:01H HLA-A*66:01H
  source 1..9: note = Severe acute respiratory syndrome coronavirus 2
NFYGPFVDR

SEQ ID NO: 2574 - protein, 9 aa, Severe acute respiratory syndrome-related coronavirus
  REGION 1..9: note = Table A: HLA-B*56:01M HLA-B*55:02M HLA-C*15:05M HLA-B*55:01M HLA-B*39:06H HLA-B*54:01M HLA-B*07:02H HLA-B*07:05H HLA-B*50:01H
  source 1..9: note = Severe acute respiratory syndrome coronavirus 2
GPFVDRQTA

SEQ ID NO: 2575 - protein, 9 aa, Severe acute respiratory syndrome-related coronavirus
  REGION 1..9: note = Table A: HLA-A*02:11H HLA-C*15:05H HLA-A*02:05H HLA-A*02:06H HLA-A*02:07H HLA-A*02:08H HLA-A*02:01H HLA-C*08:02H HLA-B*38:02H HLA-B*54:01H
  source 1..9: note = Severe acute respiratory syndrome coronavirus 2
FVDRQTAQA

SEQ ID NO: 2576 - protein, 9 aa, Severe acute respiratory syndrome-related coronavirus
  REGION 1..9: note = Table A: HLA-B*53:01H HLA-B*35:03H HLA-C*15:05H HLA-B*35:02H HLA-B*51:01H HLA-B*38:01H HLA-B*38:02M HLA-B*13:02H
  source 1..9: note = Severe acute respiratory syndrome coronavirus 2
QAAGTDTTI

SEQ ID NO: 2577 - protein, 9 aa, Severe acute respiratory syndrome-related coronavirus
  REGION 1..9: note = Table A: HLA-A*11:303H HLA-C*16:04H HLA-C*12:05H HLA-C*15:05H HLA-C*15:02H HLA-A*02:06H HLA-A*02:01H HLA-B*38:02H HLA-B*39:01H HLA-B*13:02M HLA-B*49:01H HLA-C*07:04H
  source 1..9: note = Severe acute respiratory syndrome coronavirus 2
AGTDTTITV

SEQ ID NO: 2578 - protein, 9 aa, Severe acute respiratory syndrome-related coronavirus
  REGION 1..9: note = Table A: HLA-A*68:02M HLA-B*37:01H HLA-B*38:02H
  source 1..9: note = Severe acute respiratory syndrome coronavirus 2
TDTTITVNV

SEQ ID NO: 2579 - protein, 9 aa, Severe acute respiratory syndrome-related coronavirus
  REGION 1..9: note = Table A: HLA-A*25:01H HLA-A*68:02M
  source 1..9: note = Severe acute respiratory syndrome coronavirus 2
DTTITVNVL

SEQ ID NO: 2580 - protein, 9 aa, Severe acute respiratory syndrome-related coronavirus
  REGION 1..9: note = Table A: HLA-A*68:02H
  source 1..9: note = Severe acute respiratory syndrome coronavirus 2
TTITVNVLA

SEQ ID NO: 2581 - protein, 9 aa, Severe acute respiratory syndrome-related coronavirus
  REGION 1..9: note = Table A: HLA-B*58:01H HLA-A*25:01H HLA-B*15:13H
  source 1..9: note = Severe acute respiratory syndrome coronavirus 2
TITVNVLAW

SEQ ID NO: 2582 - protein, 9 aa, Severe acute respiratory syndrome-related coronavirus
  REGION 1..9: note = Table A: HLA-A*68:02H
  source 1..9: note = Severe acute respiratory syndrome coronavirus 2
ITVNVLAWL

SEQ ID NO: 2583 - protein, 9 aa, Severe acute respiratory syndrome-related coronavirus
  REGION 1..9: note = Table A: HLA-A*36:01H HLA-A*29:01M HLA-A*29:02M HLA-A*30:02H HLA-B*35:01H HLA-B*38:02H
  source 1..9: note = Severe acute respiratory syndrome coronavirus 2
TVNVLAWLY

SEQ ID NO: 2584 - protein, 9 aa, Severe acute respiratory syndrome-related coronavirus
  REGION 1..9: note = Table A: HLA-A*02:04H
  source 1..9: note = Severe acute respiratory syndrome coronavirus 2
NVLAWLYAA

SEQ ID NO: 2585 - protein, 9 aa, Severe acute respiratory syndrome-related coronavirus
  REGION 1..9: note = Table A: HLA-A*02:11H HLA-A*02:04H HLA-A*02:02H
  source 1..9: note = Severe acute respiratory syndrome coronavirus 2
VLAWLYAAV

SEQ ID NO: 2586 - protein, 9 aa, Severe acute respiratory syndrome-related coronavirus
  REGION 1..9: note = Table A: HLA-B*51:01H
  source 1..9: note = Severe acute respiratory syndrome coronavirus 2
LAWLYAAVI

SEQ ID NO: 2587 - protein, 9 aa, Severe acute respiratory syndrome-related coronavirus
  REGION 1..9: note = Table A: HLA-A*34:01H HLA-A*66:01H
  source 1..9: note = Severe acute respiratory syndrome coronavirus 2
YAAVINGDR

SEQ ID NO: 2588 - protein, 9 aa, Severe acute respiratory syndrome-related coronavirus
  REGION 1..9: note = Table A: HLA-B*58:01H HLA-B*44:05H HLA-B*57:01H HLA-B*44:03H HLA-B*53:01M HLA-B*15:13H HLA-B*38:02H HLA-B*57:03M HLA-B*13:01M
  source 1..9: note = Severe acute respiratory syndrome coronavirus 2
AAVINGDRW

SEQ ID NO: 2589 - protein, 9 aa, Severe acute respiratory syndrome-related coronavirus
  REGION 1..9: note = Table A: HLA-A*74:01H HLA-C*07:01H HLA-A*02:11H HLA-A*30:02H HLA-C*15:02H HLA-A*02:04M HLA-A*02:02M HLA-A*24:07H HLA-C*08:01M HLA-A*32:01H HLA-C*02:02H
  source 1..9: note = Severe acute respiratory syndrome coronavirus 2
VINGDRWFL

SEQ ID NO: 2590 - protein, 9 aa, Severe acute respiratory syndrome-related coronavirus
  REGION 1..9: note = Table A: HLA-C*14:03H HLA-A*11:303H HLA-B*46:01H HLA-B*08:01M HLA-C*03:03H HLA-A*02:11H HLA-C*03:02H HLA-C*03:04H HLA-A*68:02H HLA-B*35:03H HLA-C*15:05H HLA-C*01:02H HLA-C*12:02H HLA-C*15:02H HLA-A*02:04H
  REGION 1..9: note = CONT. FROM ABOVE: HLA-A*02:05H HLA-A*02:06H HLA-A*02:07H HLA- B*14:01H HLA-A*02:01M HLA-A*02:02H HLA-A*02:03H HLA-C*17:01H HLA-C*08:01H HLA-B*38:02M HLA-A*32:01H HLA-B*07:04H HLA-B*15 :01H HLA-B*15:02M HLA-B*15:03H HLA-B*13:01H HLA-B*13:02H
  source 1..9: note = Severe acute respiratory syndrome coronavirus 2
FLNRFTTTL

SEQ ID NO: 2591 - protein, 9 aa, Severe acute respiratory syndrome-related coronavirus
  REGION 1..9: note = Table A: HLA-C*14:03H HLA-A*24:02H HLA-A*24:07H HLA-A*23:01H
  source 1..9: note = Severe acute respiratory syndrome coronavirus 2
RFTTTLNDF

SEQ ID NO: 2592 - protein, 9 aa, Severe acute respiratory syndrome-related coronavirus
  REGION 1..9: note = Table A: HLA-A*68:02H
  source 1..9: note = Severe acute respiratory syndrome coronavirus 2
TTTLNDFNL

SEQ ID NO: 2593 - protein, 9 aa, Severe acute respiratory syndrome-related coronavirus
  REGION 1..9: note = Table A: HLA-A*68:02H HLA-A*02:06H
  source 1..9: note = Severe acute respiratory syndrome coronavirus 2
TTLNDFNLV

SEQ ID NO: 2594 - protein, 9 aa, Severe acute respiratory syndrome-related coronavirus
  REGION 1..9: note = Table A: HLA-A*02:03H HLA-B*38:02M HLA-B*39:06H
  source 1..9: note = Severe acute respiratory syndrome coronavirus 2
TLNDFNLVA

SEQ ID NO: 2595 - protein, 9 aa, Severe acute respiratory syndrome-related coronavirus
  REGION 1..9: note = Table A: HLA-B*27:02H HLA-A*34:02H
  source 1..9: note = Severe acute respiratory syndrome coronavirus 2
NDFNLVAMK

SEQ ID NO: 2596 - protein, 9 aa, Severe acute respiratory syndrome-related coronavirus
  REGION 1..9: note = Table A: HLA-A*29:01H HLA-A*29:02M HLA-B*18:01M HLA-A*30:02H HLA-B*35:01H HLA-B*38:02H HLA-B*15:02M HLA-B*07:05M
  source 1..9: note = Severe acute respiratory syndrome coronavirus 2
DFNLVAMKY

SEQ ID NO: 2597 - protein, 9 aa, Severe acute respiratory syndrome-related coronavirus
  REGION 1..9: note = Table A: HLA-B*49:01H
  source 1..9: note = Severe acute respiratory syndrome coronavirus 2
YEPLTQDHV

SEQ ID NO: 2598 - protein, 9 aa, Severe acute respiratory syndrome-related coronavirus
  REGION 1..9: note = Table A: HLA-B*38:01H HLA-B*38:02M HLA-B*39:01M HLA-B*15:10H
  source 1..9: note = Severe acute respiratory syndrome coronavirus 2
DHVDILGPL

SEQ ID NO: 2599 - protein, 9 aa, Severe acute respiratory syndrome-related coronavirus
  REGION 1..9: note = Table A: HLA-B*39:06H HLA-B*40:02H HLA-B*40:06H HLA-B*54:01H HLA-B*50:01M
  source 1..9: note = Severe acute respiratory syndrome coronavirus 2
VDILGPLSA

SEQ ID NO: 2600 - protein, 9 aa, Severe acute respiratory syndrome-related coronavirus
  REGION 1..9: note = Table A: HLA-A*02:11H HLA-A*02:04H HLA-A*02:05H HLA-A*02:01H HLA-A*02:02M HLA-A*02:03H
  source 1..9: note = Severe acute respiratory syndrome coronavirus 2
ILGPLSAQT

SEQ ID NO: 2601 - protein, 9 aa, Severe acute respiratory syndrome-related coronavirus
  REGION 1..9: note = Table A: HLA-C*15:05M HLA-B*07:05M
  source 1..9: note = Severe acute respiratory syndrome coronavirus 2
GPLSAQTGI

SEQ ID NO: 2602 - protein, 9 aa, Severe acute respiratory syndrome-related coronavirus
  REGION 1..9: note = Table A: HLA-A*11:303M HLA-C*03:03H HLA-C*12:05H HLA-C*03:04M HLA-B*35:03M HLA-C*15:05H HLA-C*12:03H HLA-C*07:27H HLA-B*35:02H HLA-C*17:01H HLA-C*08:01H HLA-B*35:12H HLA-B*38:02H HLA-B*39:01H HLA-C*07:04H
  source 1..9: note = Severe acute respiratory syndrome coronavirus 2
SAQTGIAVL

SEQ ID NO: 2603 - protein, 9 aa, Severe acute respiratory syndrome-related coronavirus
  REGION 1..9: note = Table A: HLA-A*11:303H HLA-A*02:11H HLA-C*15:05H HLA-A*02:06H HLA-A*02:01H HLA-B*38:02H HLA-B*07:05H
  source 1..9: note = Severe acute respiratory syndrome coronavirus 2
AVLDMCASL

SEQ ID NO: 2604 - protein, 9 aa, Severe acute respiratory syndrome-related coronavirus
  REGION 1..9: note = Table A: HLA-A*02:05H HLA-A*02:02H HLA-A*02:03H
  source 1..9: note = Severe acute respiratory syndrome coronavirus 2
SLKELLQNG

SEQ ID NO: 2605 - protein, 9 aa, Severe acute respiratory syndrome-related coronavirus
  REGION 1..9: note = Table A: HLA-A*74:01H
  source 1..9: note = Severe acute respiratory syndrome coronavirus 2
LLQNGMNGR

SEQ ID NO: 2606 - protein, 9 aa, Severe acute respiratory syndrome-related coronavirus
  REGION 1..9: note = Table A: HLA-B*07:02H HLA-B*07:04H
  source 1..9: note = Severe acute respiratory syndrome coronavirus 2
NGMNGRTIL

SEQ ID NO: 2607 - protein, 9 aa, Severe acute respiratory syndrome-related coronavirus
  REGION 1..9: note = Table A: HLA-B*27:05H HLA-B*27:02H HLA-B*14:01H
  source 1..9: note = Severe acute respiratory syndrome coronavirus 2
GRTILGSAL

SEQ ID NO: 2608 - protein, 9 aa, Severe acute respiratory syndrome-related coronavirus
  REGION 1..9: note = Table A: HLA-B*58:02H HLA-C*15:02H HLA-B*57:03M
  source 1..9: note = Severe acute respiratory syndrome coronavirus 2
RTILGSALL

SEQ ID NO: 2609 - protein, 9 aa, Severe acute respiratory syndrome-related coronavirus
  REGION 1..9: note = Table A: HLA-B*45:01H HLA-B*18:01M HLA-A*68:02H HLA-B*40:02H HLA-B*40:06H HLA-B*07:05M HLA-B*49:01M HLA-B*50:01H
  source 1..9: note = Severe acute respiratory syndrome coronavirus 2
DEFTPFDVV

SEQ ID NO: 2610 - protein, 9 aa, Severe acute respiratory syndrome-related coronavirus
  REGION 1..9: note = Table A: HLA-A*33:01H HLA-A*33:03M HLA-A*68:01H HLA-A*34:01H HLA-A*34:02H HLA-A*66:01H
  source 1..9: note = Severe acute respiratory syndrome coronavirus 2
EFTPFDVVR

SEQ ID NO: 2611 - protein, 9 aa, Severe acute respiratory syndrome-related coronavirus
  REGION 1..9: note = Table A: HLA-B*56:01M HLA-B*55:02M HLA-A*68:02H HLA-C*15:05M HLA-B*55:01M HLA-B*38:02H HLA-B*54:01M HLA-B*07:02H HLA-B*07:04H HLA-B*07:05H
  source 1..9: note = Severe acute respiratory syndrome coronavirus 2
TPFDVVRQC

SEQ ID NO: 2612 - protein, 9 aa, Severe acute respiratory syndrome-related coronavirus
  REGION 1..9: note = Table A: HLA-A*68:02H HLA-C*15:05H HLA-B*14:01H HLA-B*52:01H HLA-C*08:03H HLA-B*38:02H HLA-B*39:06H HLA-B*39:01H HLA-B*07:05H HLA-B*13:02H HLA-B*49:01H
  source 1..9: note = Severe acute respiratory syndrome coronavirus 2
SGVTFQSAV

SEQ ID NO: 2613 - protein, 9 aa, Severe acute respiratory syndrome-related coronavirus
  REGION 1..9: note = Table A: HLA-A*11:303H HLA-A*03:01H HLA-A*03:02M HLA-A*11:01M HLA-A*11:02M HLA-A*36:01M HLA-B*27:02H HLA-A*30:02H HLA-A*68:01H HLA-A*34:01H HLA-A*34:02M HLA-C*07:27M HLA-A*66:01H
  source 1..9: note = Severe acute respiratory syndrome coronavirus 2
GVTFQSAVK

SEQ ID NO: 2614 - protein, 9 aa, Severe acute respiratory syndrome-related coronavirus
  REGION 1..9: note = Table A: HLA-A*11:303H HLA-A*74:01H HLA-A*03:01H HLA-A*03:02H HLA-A*11:01M HLA-A*11:02H HLA-B*57:01H HLA-A*33:01H HLA-A*33:03M HLA-A*26:03H HLA-A*30:02H HLA-A*68:01H HLA-A*34:01M HLA-A*34:02H HLA-C*07:27M
  REGION 1..9: note = CONT. FROM ABOVE: HLA-A*31:01M HLA-B*57:03H HLA-A*66:01H
  source 1..9: note = Severe acute respiratory syndrome coronavirus 2
VTFQSAVKR

SEQ ID NO: 2615 - protein, 9 aa, Severe acute respiratory syndrome-related coronavirus
  REGION 1..9: note = Table A: HLA-B*58:02M HLA-A*02:05H HLA-B*52:01M HLA-B*38:02M HLA-B*13:01H HLA-B*13:02H
  source 1..9: note = Severe acute respiratory syndrome coronavirus 2
FQSAVKRTI

SEQ ID NO: 2616 - protein, 9 aa, Severe acute respiratory syndrome-related coronavirus
  REGION 1..9: note = Table A: HLA-B*58:01H HLA-B*58:02H HLA-B*57:01M HLA-A*32:01H HLA-B*57:03H HLA-B*13:01H
  source 1..9: note = Severe acute respiratory syndrome coronavirus 2
RTIKGTHHW

SEQ ID NO: 2617 - protein, 9 aa, Severe acute respiratory syndrome-related coronavirus
  REGION 1..9: note = Table A: HLA-C*15:02M
  source 1..9: note = Severe acute respiratory syndrome coronavirus 2
KGTHHWLLL

SEQ ID NO: 2618 - protein, 9 aa, Severe acute respiratory syndrome-related coronavirus
  REGION 1..9: note = Table A: HLA-B*38:01H HLA-B*38:02H HLA-B*15:10H
  source 1..9: note = Severe acute respiratory syndrome coronavirus 2
THHWLLLTI

SEQ ID NO: 2619 - protein, 9 aa, Severe acute respiratory syndrome-related coronavirus
  REGION 1..9: note = Table A: HLA-B*38:02H HLA-B*15:10H
  source 1..9: note = Severe acute respiratory syndrome coronavirus 2
HHWLLLTIL

SEQ ID NO: 2620 - protein, 9 aa, Severe acute respiratory syndrome-related coronavirus
  REGION 1..9: note = Table A: HLA-A*11:303H HLA-A*02:11M HLA-A*02:04H HLA-A*02:07H HLA-B*14:01H HLA-A*02:01M HLA-A*02:02H HLA-A*02:03H HLA-B*38:02H
  source 1..9: note = Severe acute respiratory syndrome coronavirus 2
LLLTILTSL

SEQ ID NO: 2621 - protein, 9 aa, Severe acute respiratory syndrome-related coronavirus
  REGION 1..9: note = Table A: HLA-A*02:02H
  source 1..9: note = Severe acute respiratory syndrome coronavirus 2
LLTILTSLL

SEQ ID NO: 2622 - protein, 9 aa, Severe acute respiratory syndrome-related coronavirus
  REGION 1..9: note = Table A: HLA-C*15:05H HLA-A*02:04H HLA-C*08:01H HLA-B*38:02H
  source 1..9: note = Severe acute respiratory syndrome coronavirus 2
TILTSLLVL

SEQ ID NO: 2623 - protein, 9 aa, Severe acute respiratory syndrome-related coronavirus
  REGION 1..9: note = Table A: HLA-A*02:11H HLA-A*68:02H HLA-A*02:04M HLA-A*02:06H HLA-A*02:07H HLA-A*02:01M HLA-A*02:02H HLA-A*02:03H HLA-B*38:02H HLA-B*13:02H
  source 1..9: note = Severe acute respiratory syndrome coronavirus 2
ILTSLLVLV

SEQ ID NO: 2624 - protein, 9 aa, Severe acute respiratory syndrome-related coronavirus
  REGION 1..9: note = Table A: HLA-B*58:01M HLA-B*57:01M HLA-A*25:01H HLA-B*53:01M HLA-A*24:02H HLA-B*15:13H HLA-B*38:02H HLA-B*57:03M
  source 1..9: note = Severe acute respiratory syndrome coronavirus 2
LVLVQSTQW

SEQ ID NO: 2625 - protein, 9 aa, Severe acute respiratory syndrome-related coronavirus
  REGION 1..9: note = Table A: HLA-C*15:02H
  source 1..9: note = Severe acute respiratory syndrome coronavirus 2
QSTQWSLFF

SEQ ID NO: 2626 - protein, 9 aa, Severe acute respiratory syndrome-related coronavirus
  REGION 1..9: note = Table A: HLA-A*02:11H HLA-A*02:04M HLA-C*08:01H HLA-B*40:06M HLA-B*13:02H
  source 1..9: note = Severe acute respiratory syndrome coronavirus 2
TQWSLFFFL

SEQ ID NO: 2627 - protein, 9 aa, Severe acute respiratory syndrome-related coronavirus
  REGION 1..9: note = Table A: HLA-A*29:02H
  source 1..9: note = Severe acute respiratory syndrome coronavirus 2
QWSLFFFLY

SEQ ID NO: 2628 - protein, 9 aa, Severe acute respiratory syndrome-related coronavirus
  REGION 1..9: note = Table A: HLA-C*14:02M HLA-C*14:03H HLA-B*46:01H HLA-A*29:02H HLA-C*04:01H HLA-C*04:03H HLA-A*24:07H
  source 1..9: note = Severe acute respiratory syndrome coronavirus 2
FFFLYENAF

SEQ ID NO: 2629 - protein, 9 aa, Severe acute respiratory syndrome-related coronavirus
  REGION 1..9: note = Table A: HLA-C*14:03H
  source 1..9: note = Severe acute respiratory syndrome coronavirus 2
FFLYENAFL

SEQ ID NO: 2630 - protein, 9 aa, Severe acute respiratory syndrome-related coronavirus
  REGION 1..9: note = Table A: HLA-B*45:01H HLA-B*40:06H HLA-B*49:01H HLA-B*50:01M
  source 1..9: note = Severe acute respiratory syndrome coronavirus 2
YENAFLPFA

SEQ ID NO: 2631 - protein, 9 aa, Severe acute respiratory syndrome-related coronavirus
  REGION 1..9: note = Table A: HLA-A*68:02H
  source 1..9: note = Severe acute respiratory syndrome coronavirus 2
ENAFLPFAM

SEQ ID NO: 2632 - protein, 9 aa, Severe acute respiratory syndrome-related coronavirus
  REGION 1..9: note = Table A: HLA-C*14:03H
  source 1..9: note = Severe acute respiratory syndrome coronavirus 2
AFLPFAMGI

SEQ ID NO: 2633 - protein, 9 aa, Severe acute respiratory syndrome-related coronavirus
  REGION 1..9: note = Table A: HLA-B*56:01H HLA-B*55:02H HLA-B*35:03H HLA-C*15:05H HLA-B*55:01M HLA-B*35:07H HLA-B*54:01H HLA-B*07:05H
  source 1..9: note = Severe acute respiratory syndrome coronavirus 2
LPFAMGIIA

SEQ ID NO: 2634 - protein, 9 aa, Severe acute respiratory syndrome-related coronavirus
  REGION 1..9: note = Table A: HLA-B*46:01H HLA-B*38:02H HLA-B*07:05H HLA-B*15:11H
  source 1..9: note = Severe acute respiratory syndrome coronavirus 2
MGIIAMSAF

SEQ ID NO: 2635 - protein, 9 aa, Severe acute respiratory syndrome-related coronavirus
  REGION 1..9: note = Table A: HLA-C*03:02H HLA-C*03:04H HLA-C*15:05H HLA-B*07:05H
  source 1..9: note = Severe acute respiratory syndrome coronavirus 2
IAMSAFAMM

SEQ ID NO: 2636 - protein, 9 aa, Severe acute respiratory syndrome-related coronavirus
  REGION 1..9: note = Table A: HLA-B*38:02H HLA-B*07:05H
  source 1..9: note = Severe acute respiratory syndrome coronavirus 2
AMSAFAMMF

SEQ ID NO: 2637 - protein, 9 aa, Severe acute respiratory syndrome-related coronavirus
  REGION 1..9: note = Table A: HLA-A*68:02H HLA-C*15:02H
  source 1..9: note = Severe acute respiratory syndrome coronavirus 2
MSAFAMMFV

SEQ ID NO: 2638 - protein, 9 aa, Severe acute respiratory syndrome-related coronavirus
  REGION 1..9: note = Table A: HLA-A*11:01M HLA-A*11:02M HLA-A*34:02M
  source 1..9: note = Severe acute respiratory syndrome coronavirus 2
SAFAMMFVK

SEQ ID NO: 2639 - protein, 9 aa, Severe acute respiratory syndrome-related coronavirus
  REGION 1..9: note = Table A: HLA-A*33:03H HLA-A*34:02M HLA-A*66:01H
  source 1..9: note = Severe acute respiratory syndrome coronavirus 2
FAMMFVKHK

SEQ ID NO: 2640 - protein, 9 aa, Severe acute respiratory syndrome-related coronavirus
  REGION 1..9: note = Table A: HLA-A*30:02H
  source 1..9: note = Severe acute respiratory syndrome coronavirus 2
AMMFVKHKH

SEQ ID NO: 2641 - protein, 9 aa, Severe acute respiratory syndrome-related coronavirus
  REGION 1..9: note = Table A: HLA-A*02:11H
  source 1..9: note = Severe acute respiratory syndrome coronavirus 2
MMFVKHKHA

SEQ ID NO: 2642 - protein, 9 aa, Severe acute respiratory syndrome-related coronavirus
  REGION 1..9: note = Table A: HLA-A*24:07M HLA-A*23:01H
  source 1..9: note = Severe acute respiratory syndrome coronavirus 2
MFVKHKHAF

SEQ ID NO: 2643 - protein, 9 aa, Severe acute respiratory syndrome-related coronavirus
  REGION 1..9: note = Table A: HLA-B*08:01M HLA-A*02:02H HLA-B*07:04H HLA-C*02:02H HLA-A*66:01H
  source 1..9: note = Severe acute respiratory syndrome coronavirus 2
FVKHKHAFL

SEQ ID NO: 2644 - protein, 9 aa, Severe acute respiratory syndrome-related coronavirus
  REGION 1..9: note = Table A: HLA-A*11:303M HLA-B*46:01H HLA-A*02:11H HLA-C*03:02H HLA-A*68:02H HLA-C*15:05H HLA-A*02:04H HLA-A*02:05M HLA-A*02:06H HLA-A*02:07H HLA-B*14:01M HLA-A*02:01H HLA-A*02:02H HLA-A*02:03H HLA-C*08:01H
  REGION 1..9: note = CONT. FROM ABOVE: HLA-B*38:02H HLA-B*40:06H HLA-B*54:01H HLA- B*13:02M HLA-B*49:01H
  source 1..9: note = Severe acute respiratory syndrome coronavirus 2
FLLPSLATV

SEQ ID NO: 2645 - protein, 9 aa, Severe acute respiratory syndrome-related coronavirus
  REGION 1..9: note = Table A: HLA-B*53:01H HLA-B*55:02H HLA-B*35:03H HLA-C*15:05H HLA-B*35:01H HLA-B*35:08H HLA-B*35:07H HLA-B*38:02H HLA-B*54:01H HLA-B*15:01H HLA-B*15:02H HLA-B*07:05M HLA-B*15:11H
  source 1..9: note = Severe acute respiratory syndrome coronavirus 2
LPSLATVAY

SEQ ID NO: 2646 - protein, 9 aa, Severe acute respiratory syndrome-related coronavirus
  REGION 1..9: note = Table A: HLA-A*68:02H HLA-C*15:02H HLA-A*02:05H HLA-A*02:06H HLA-B*40:06H
  source 1..9: note = Severe acute respiratory syndrome coronavirus 2
ATVAYFNMV

SEQ ID NO: 2647 - protein, 9 aa, Severe acute respiratory syndrome-related coronavirus
  REGION 1..9: note = Table A: HLA-A*36:01H HLA-A*26:01H HLA-A*29:01H HLA-A*29:02M HLA-A*30:02H HLA-A*34:02H HLA-B*35:01H HLA-B*35:07H HLA-B*38:02M HLA-B*15:01H HLA-B*15:02H HLA-B*07:05H
  source 1..9: note = Severe acute respiratory syndrome coronavirus 2
TVAYFNMVY

SEQ ID NO: 2648 - protein, 9 aa, Severe acute respiratory syndrome-related coronavirus
  REGION 1..9: note = Table A: HLA-C*03:04H HLA-C*12:03H HLA-C*17:01M HLA-C*08:01H
  source 1..9: note = Severe acute respiratory syndrome coronavirus 2
VAYFNMVYM

SEQ ID NO: 2649 - protein, 9 aa, Severe acute respiratory syndrome-related coronavirus
  REGION 1..9: note = Table A: HLA-B*15:13H HLA-B*38:02H
  source 1..9: note = Severe acute respiratory syndrome coronavirus 2
NMVYMPASW

SEQ ID NO: 2650 - protein, 9 aa, Severe acute respiratory syndrome-related coronavirus
  REGION 1..9: note = Table A: HLA-C*14:02H HLA-C*14:03H HLA-A*29:02H HLA-C*04:01H HLA-C*07:01H HLA-C*07:02M HLA-A*30:02H HLA-A*24:02H HLA-A*24:07H HLA-C*08:01H HLA-A*23:01H HLA-C*07:04H
  source 1..9: note = Severe acute respiratory syndrome coronavirus 2
VYMPASWVM

SEQ ID NO: 2651 - protein, 9 aa, Severe acute respiratory syndrome-related coronavirus
  REGION 1..9: note = Table A: HLA-B*53:01H HLA-A*68:02H HLA-B*35:03H HLA-C*15:05H HLA-A*34:01H HLA-A*34:02H HLA-B*51:01H HLA-B*35:07H HLA-B*38:02H HLA-B*54:01H HLA-B*07:04H
  source 1..9: note = Severe acute respiratory syndrome coronavirus 2
MPASWVMRI

SEQ ID NO: 2652 - protein, 9 aa, Severe acute respiratory syndrome-related coronavirus
  REGION 1..9: note = Table A: HLA-B*07:04H
  source 1..9: note = Severe acute respiratory syndrome coronavirus 2
PASWVMRIM

SEQ ID NO: 2653 - protein, 9 aa, Severe acute respiratory syndrome-related coronavirus
  REGION 1..9: note = Table A: HLA-A*24:02H HLA-A*24:07H
  source 1..9: note = Severe acute respiratory syndrome coronavirus 2
SWVMRIMTW

SEQ ID NO: 2654 - protein, 9 aa, Severe acute respiratory syndrome-related coronavirus
  REGION 1..9: note = Table A: HLA-A*02:11M HLA-C*15:02H HLA-A*02:04M HLA-A*02:06H
  source 1..9: note = Severe acute respiratory syndrome coronavirus 2
RIMTWLDMV

SEQ ID NO: 2655 - protein, 9 aa, Severe acute respiratory syndrome-related coronavirus
  REGION 1..9: note = Table A: HLA-A*02:07M HLA-A*02:01H HLA-C*08:02H HLA-B*38:02H HLA-B*13:01H
  source 1..9: note = Severe acute respiratory syndrome coronavirus 2
WLDMVDTSL

SEQ ID NO: 2656 - protein, 9 aa, Severe acute respiratory syndrome-related coronavirus
  REGION 1..9: note = Table A: HLA-A*11:303H HLA-A*26:02H HLA-C*04:03M HLA-C*15:05H HLA-A*02:07M HLA-A*34:02H HLA-B*35:08H HLA-C*08:02H HLA-B*38:02M HLA-B*15:02H HLA-B*39:01H HLA-C*05:01H
  source 1..9: note = Severe acute respiratory syndrome coronavirus 2
MVDTSLSGF

SEQ ID NO: 2657 - protein, 9 aa, Severe acute respiratory syndrome-related coronavirus
  REGION 1..9: note = Table A: HLA-A*36:01H
  source 1..9: note = Severe acute respiratory syndrome coronavirus 2
VDTSLSGFK

SEQ ID NO: 2658 - protein, 9 aa, Severe acute respiratory syndrome-related coronavirus
  REGION 1..9: note = Table A: HLA-A*68:01H HLA-A*68:02H HLA-A*34:01H HLA-A*34:02H HLA-A*66:01M
  source 1..9: note = Severe acute respiratory syndrome coronavirus 2
DTSLSGFKL

SEQ ID NO: 2659 - protein, 9 aa, Severe acute respiratory syndrome-related coronavirus
  REGION 1..9: note = Table A: HLA-A*11:01H HLA-A*11:02H HLA-A*34:02M
  source 1..9: note = Severe acute respiratory syndrome coronavirus 2
TSLSGFKLK

SEQ ID NO: 2660 - protein, 9 aa, Severe acute respiratory syndrome-related coronavirus
  REGION 1..9: note = Table A: HLA-B*08:01H
  source 1..9: note = Severe acute respiratory syndrome coronavirus 2
GFKLKDCVM

SEQ ID NO: 2661 - protein, 9 aa, Severe acute respiratory syndrome-related coronavirus
  REGION 1..9: note = Table A: HLA-B*15:03M
  source 1..9: note = Severe acute respiratory syndrome coronavirus 2
FKLKDCVMY

SEQ ID NO: 2662 - protein, 9 aa, Severe acute respiratory syndrome-related coronavirus
  REGION 1..9: note = Table A: HLA-A*02:03M HLA-B*38:02H
  source 1..9: note = Severe acute respiratory syndrome coronavirus 2
KLKDCVMYA

SEQ ID NO: 2663 - protein, 9 aa, Severe acute respiratory syndrome-related coronavirus
  REGION 1..9: note = Table A: HLA-C*15:05H HLA-B*38:02H
  source 1..9: note = Severe acute respiratory syndrome coronavirus 2
VMYASAVVL

SEQ ID NO: 2664 - protein, 9 aa, Severe acute respiratory syndrome-related coronavirus
  REGION 1..9: note = Table A: HLA-A*24:02H HLA-A*24:07H HLA-A*23:01H
  source 1..9: note = Severe acute respiratory syndrome coronavirus 2
MYASAVVLL

SEQ ID NO: 2665 - protein, 9 aa, Severe acute respiratory syndrome-related coronavirus
  REGION 1..9: note = Table A: HLA-C*16:04H HLA-C*12:05M HLA-B*53:01M HLA-A*68:02M HLA-B*35:03H HLA-C*15:05H HLA-C*12:03H HLA-C*15:02M HLA-B*51:01M HLA-C*17:01H HLA-C*08:01H HLA-B*38:02M HLA-B*13:02M
  source 1..9: note = Severe acute respiratory syndrome coronavirus 2
YASAVVLLI

SEQ ID NO: 2666 - protein, 9 aa, Severe acute respiratory syndrome-related coronavirus
  REGION 1..9: note = Table A: HLA-C*15:05H HLA-C*15:02M HLA-B*57:03H
  source 1..9: note = Severe acute respiratory syndrome coronavirus 2
ASAVVLLIL

SEQ ID NO: 2667 - protein, 9 aa, Severe acute respiratory syndrome-related coronavirus
  REGION 1..9: note = Table A: HLA-C*12:05H HLA-C*12:03H HLA-B*35:01H HLA-C*17:01H HLA-C*08:01H HLA-B*57:03H HLA-C*07:04H
  source 1..9: note = Severe acute respiratory syndrome coronavirus 2
SAVVLLILM

SEQ ID NO: 2668 - protein, 9 aa, Severe acute respiratory syndrome-related coronavirus
  REGION 1..9: note = Table A: HLA-B*40:06H HLA-B*13:02H
  source 1..9: note = Severe acute respiratory syndrome coronavirus 2
AVVLLILMT

SEQ ID NO: 2669 - protein, 9 aa, Severe acute respiratory syndrome-related coronavirus
  REGION 1..9: note = Table A: HLA-B*56:01H HLA-A*02:11H HLA-B*55:02H HLA-C*08:01H HLA-B*54:01H
  source 1..9: note = Severe acute respiratory syndrome coronavirus 2
VVLLILMTA

SEQ ID NO: 2670 - protein, 9 aa, Severe acute respiratory syndrome-related coronavirus
  REGION 1..9: note = Table A: HLA-A*74:01H
  source 1..9: note = Severe acute respiratory syndrome coronavirus 2
VLLILMTAR

SEQ ID NO: 2671 - protein, 9 aa, Severe acute respiratory syndrome-related coronavirus
  REGION 1..9: note = Table A: HLA-B*46:01M HLA-A*30:02H HLA-C*12:02H HLA-B*38:02M HLA-B*15:01M HLA-B*15:02H HLA-B*15:03H HLA-B*07:05H
  source 1..9: note = Severe acute respiratory syndrome coronavirus 2
ILMTARTVY

SEQ ID NO: 2672 - protein, 9 aa, Severe acute respiratory syndrome-related coronavirus
  REGION 1..9: note = Table A: HLA-A*36:01H
  source 1..9: note = Severe acute respiratory syndrome coronavirus 2
RTVYDDGAR

SEQ ID NO: 2673 - protein, 9 aa, Severe acute respiratory syndrome-related coronavirus
  REGION 1..9: note = Table A: HLA-A*74:01M HLA-A*11:01H HLA-A*11:02H HLA-A*33:01H HLA-A*33:03M HLA-A*26:03M HLA-A*68:01M HLA-A*34:01H HLA-A*34:02M HLA-A*66:01H
  source 1..9: note = Severe acute respiratory syndrome coronavirus 2
TVYDDGARR

SEQ ID NO: 2674 - protein, 9 aa, Severe acute respiratory syndrome-related coronavirus
  REGION 1..9: note = Table A: HLA-C*04:01H HLA-C*04:03H
  source 1..9: note = Severe acute respiratory syndrome coronavirus 2
VYDDGARRV

SEQ ID NO: 2675 - protein, 9 aa, Severe acute respiratory syndrome-related coronavirus
  REGION 1..9: note = Table A: HLA-B*08:01M HLA-B*14:02M
  source 1..9: note = Severe acute respiratory syndrome coronavirus 2
DGARRVWTL

SEQ ID NO: 2676 - protein, 9 aa, Severe acute respiratory syndrome-related coronavirus
  REGION 1..9: note = Table A: HLA-B*27:05H
  source 1..9: note = Severe acute respiratory syndrome coronavirus 2
RRVWTLMNV

SEQ ID NO: 2677 - protein, 9 aa, Severe acute respiratory syndrome-related coronavirus
  REGION 1..9: note = Table A: HLA-A*02:11H HLA-B*57:03H
  source 1..9: note = Severe acute respiratory syndrome coronavirus 2
RVWTLMNVL

SEQ ID NO: 2678 - protein, 9 aa, Severe acute respiratory syndrome-related coronavirus
  REGION 1..9: note = Table A: HLA-A*02:11H HLA-A*68:02H HLA-A*02:04M HLA-A*02:07H HLA-A*02:01M HLA-A*02:02H HLA-A*02:03M HLA-B*38:02M HLA-B*13:02H
  source 1..9: note = Severe acute respiratory syndrome coronavirus 2
TLMNVLTLV

SEQ ID NO: 2679 - protein, 9 aa, Severe acute respiratory syndrome-related coronavirus
  REGION 1..9: note = Table A: HLA-A*29:01M HLA-A*29:02M HLA-A*30:02H HLA-B*38:02H HLA-B*15:01H HLA-B*15:02H HLA-B*07:05H
  source 1..9: note = Severe acute respiratory syndrome coronavirus 2
LMNVLTLVY

SEQ ID NO: 2680 - protein, 9 aa, Severe acute respiratory syndrome-related coronavirus
  REGION 1..9: note = Table A: HLA-A*34:02H
  source 1..9: note = Severe acute respiratory syndrome coronavirus 2
MNVLTLVYK

SEQ ID NO: 2681 - protein, 9 aa, Severe acute respiratory syndrome-related coronavirus
  REGION 1..9: note = Table A: HLA-A*02:11H HLA-A*68:02M HLA-A*02:04M HLA-A*02:06M HLA-A*02:07H HLA-A*02:01H HLA-A*02:02H
  source 1..9: note = Severe acute respiratory syndrome coronavirus 2
NVLTLVYKV

SEQ ID NO: 2682 - protein, 9 aa, Severe acute respiratory syndrome-related coronavirus
  REGION 1..9: note = Table A: HLA-B*58:01H HLA-A*36:01H HLA-B*57:01H HLA-A*29:02H HLA-A*30:02H HLA-B*57:03H
  source 1..9: note = Severe acute respiratory syndrome coronavirus 2
LTLVYKVYY

SEQ ID NO: 2683 - protein, 9 aa, Severe acute respiratory syndrome-related coronavirus
  REGION 1..9: note = Table A: HLA-B*15:03H HLA-B*15:10H
  source 1..9: note = Severe acute respiratory syndrome coronavirus 2
YKVYYGNAL

SEQ ID NO: 2684 - protein, 9 aa, Severe acute respiratory syndrome-related coronavirus
  REGION 1..9: note = Table A: HLA-B*38:02H HLA-B*39:01H HLA-B*13:02M
  source 1..9: note = Severe acute respiratory syndrome coronavirus 2
YGNALDQAI

SEQ ID NO: 2685 - protein, 9 aa, Severe acute respiratory syndrome-related coronavirus
  REGION 1..9: note = Table A: HLA-A*11:303M HLA-C*16:01H HLA-C*16:04H HLA-C*03:03H HLA-B*53:01H HLA-C*03:02H HLA-C*03:04H HLA-B*35:03H HLA-C*15:05H HLA-C*12:03H HLA-B*35:01H HLA-B*35:02M HLA-B*35:08M HLA-B*51:01H HLA-B*35:07H
  REGION 1..9: note = CONT. FROM ABOVE: HLA-C*08:01M HLA-B*35:12M HLA-B*38:02M HLA- B*15:02M HLA-B*39:01H HLA-B*07:05M HLA-C*07:04H
  source 1..9: note = Severe acute respiratory syndrome coronavirus 2
NALDQAISM

SEQ ID NO: 2686 - protein, 9 aa, Severe acute respiratory syndrome-related coronavirus
  REGION 1..9: note = Table A: HLA-B*58:01H HLA-B*44:05H HLA-A*02:07H HLA-B*38:02H HLA-B*13:01M
  source 1..9: note = Severe acute respiratory syndrome coronavirus 2
ALDQAISMW

SEQ ID NO: 2687 - protein, 9 aa, Severe acute respiratory syndrome-related coronavirus
  REGION 1..9: note = Table A: HLA-B*38:02H HLA-B*39:01H
  source 1..9: note = Severe acute respiratory syndrome coronavirus 2
DQAISMWAL

SEQ ID NO: 2688 - protein, 9 aa, Severe acute respiratory syndrome-related coronavirus
  REGION 1..9: note = Table A: HLA-A*02:11H HLA-A*02:04M HLA-A*02:06H HLA-A*02:07M HLA-A*02:01M HLA-A*02:03H HLA-B*52:01H HLA-B*38:02H HLA-B*40:06H HLA-B*13:02H
  source 1..9: note = Severe acute respiratory syndrome coronavirus 2
SMWALIISV

SEQ ID NO: 2689 - protein, 9 aa, Severe acute respiratory syndrome-related coronavirus
  REGION 1..9: note = Table A: HLA-B*58:01H HLA-A*11:303M HLA-B*46:01H HLA-A*26:01M HLA-A*26:02H HLA-A*26:03M HLA-A*29:01M HLA-A*29:02M HLA-C*03:02M HLA-A*30:02H HLA-C*15:05H HLA-C*12:02M HLA-A*02:03H HLA-A*34:01H HLA-A*34:02H
  REGION 1..9: note = CONT. FROM ABOVE: HLA-C*07:27H HLA-B*35:01H HLA-B*38:02H HLA- B*15:01H HLA-B*15:02M HLA-B*15:03H HLA-B*07:05H HLA-C*02:02M HLA-B*15:11H
  source 1..9: note = Severe acute respiratory syndrome coronavirus 2
LIISVTSNY

SEQ ID NO: 2690 - protein, 9 aa, Severe acute respiratory syndrome-related coronavirus
  REGION 1..9: note = Table A: HLA-B*39:01H
  source 1..9: note = Severe acute respiratory syndrome coronavirus 2
SNYSGVVTT

SEQ ID NO: 2691 - protein, 9 aa, Severe acute respiratory syndrome-related coronavirus
  REGION 1..9: note = Table A: HLA-C*14:02H HLA-C*14:03M HLA-A*33:03H HLA-C*06:02H HLA-C*04:01H HLA-C*07:02H HLA-A*02:11H HLA-A*68:02M HLA-C*15:05H HLA-A*02:04H HLA-A*02:05H HLA-A*02:06H HLA-B*14:01H HLA-A*02:01M HLA-A*02:02M HLA-A*02:03M
  REGION 1..9: note = CONT. FROM ABOVE: HLA-A*24:02M HLA-B*51:01H HLA-A*24:07H HLA- C*08:01M HLA-A*23:01M HLA-B*38:02M HLA-B*39:01M HLA-B*07:05H HLA-B*13:02H
  source 1..9: note = Severe acute respiratory syndrome coronavirus 2
NYSGVVTTV

SEQ ID NO: 2692 - protein, 9 aa, Severe acute respiratory syndrome-related coronavirus
  REGION 1..9: note = Table A: HLA-A*11:303H HLA-B*46:01H HLA-C*03:04H HLA-B*35:03H HLA-C*15:05M HLA-C*12:02H HLA-B*35:01H HLA-B*38:02H HLA-B*15:02H HLA-B*07:05H HLA-C*07:04H
  source 1..9: note = Severe acute respiratory syndrome coronavirus 2
YSGVVTTVM

SEQ ID NO: 2693 - protein, 9 aa, Severe acute respiratory syndrome-related coronavirus
  REGION 1..9: note = Table A: HLA-A*68:02H HLA-C*15:05H HLA-C*15:02H HLA-A*02:04H HLA-A*02:05H HLA-A*02:06M HLA-A*02:08H HLA-A*02:01H HLA-A*02:03H HLA-C*17:01H HLA-C*08:01H HLA-B*38:02H HLA-B*40:06H HLA-B*13:02H HLA-C*07:04H
  source 1..9: note = Severe acute respiratory syndrome coronavirus 2
GVVTTVMFL

SEQ ID NO: 2694 - protein, 9 aa, Severe acute respiratory syndrome-related coronavirus
  REGION 1..9: note = Table A: HLA-A*68:02H HLA-A*02:06H
  source 1..9: note = Severe acute respiratory syndrome coronavirus 2
VVTTVMFLA

SEQ ID NO: 2695 - protein, 9 aa, Severe acute respiratory syndrome-related coronavirus
  REGION 1..9: note = Table A: HLA-A*36:01H HLA-A*34:02H HLA-A*66:01H
  source 1..9: note = Severe acute respiratory syndrome coronavirus 2
VTTVMFLAR

SEQ ID NO: 2696 - protein, 9 aa, Severe acute respiratory syndrome-related coronavirus
  REGION 1..9: note = Table A: HLA-C*14:02M HLA-C*14:03M HLA-A*24:07M HLA-A*23:01H HLA-B*15:02H
  source 1..9: note = Severe acute respiratory syndrome coronavirus 2
MFLARGIVF

SEQ ID NO: 2697 - protein, 9 aa, Severe acute respiratory syndrome-related coronavirus
  REGION 1..9: note = Table A: HLA-A*02:11M HLA-A*02:04M HLA-A*02:05H HLA-A*02:01H HLA-A*02:02H HLA-A*02:03H HLA-C*17:01M HLA-B*38:02H
  source 1..9: note = Severe acute respiratory syndrome coronavirus 2
FLARGIVFM

SEQ ID NO: 2698 - protein, 9 aa, Severe acute respiratory syndrome-related coronavirus
  REGION 1..9: note = Table A: HLA-A*29:02H
  source 1..9: note = Severe acute respiratory syndrome coronavirus 2
GIVFMCVEY

SEQ ID NO: 2699 - protein, 9 aa, Severe acute respiratory syndrome-related coronavirus
  REGION 1..9: note = Table A: HLA-C*04:03H
  source 1..9: note = Severe acute respiratory syndrome coronavirus 2
CVEYCPIFF

SEQ ID NO: 2700 - protein, 9 aa, Severe acute respiratory syndrome-related coronavirus
  REGION 1..9: note = Table A: HLA-B*49:01H
  source 1..9: note = Severe acute respiratory syndrome coronavirus 2
VEYCPIFFI

SEQ ID NO: 2701 - protein, 9 aa, Severe acute respiratory syndrome-related coronavirus
  REGION 1..9: note = Table A: HLA-C*14:02M HLA-C*14:03H HLA-A*24:02H HLA-A*24:07M HLA-A*23:01H HLA-B*07:05H
  source 1..9: note = Severe acute respiratory syndrome coronavirus 2
IFFITGNTL

SEQ ID NO: 2702 - protein, 9 aa, Severe acute respiratory syndrome-related coronavirus
  REGION 1..9: note = Table A: HLA-B*38:02H HLA-B*15:02M
  source 1..9: note = Severe acute respiratory syndrome coronavirus 2
TLQCIMLVY

SEQ ID NO: 2703 - protein, 9 aa, Severe acute respiratory syndrome-related coronavirus
  REGION 1..9: note = Table A: HLA-A*02:04H
  source 1..9: note = Severe acute respiratory syndrome coronavirus 2
CLLNRYFRL

SEQ ID NO: 2704 - protein, 9 aa, Severe acute respiratory syndrome-related coronavirus
  REGION 1..9: note = Table A: HLA-A*02:11H HLA-A*68:02H HLA-A*02:04H HLA-C*08:01H
  source 1..9: note = Severe acute respiratory syndrome coronavirus 2
LTLGVYDYL

SEQ ID NO: 2705 - protein, 9 aa, Severe acute respiratory syndrome-related coronavirus
  REGION 1..9: note = Table A: HLA-A*02:04H
  source 1..9: note = Severe acute respiratory syndrome coronavirus 2
TLGVYDYLV

SEQ ID NO: 2706 - protein, 9 aa, Severe acute respiratory syndrome-related coronavirus
  REGION 1..9: note = Table A: HLA-A*68:02H HLA-A*02:04H HLA-A*02:05H HLA-A*02:06H HLA-A*02:01H HLA-B*40:06H
  source 1..9: note = Severe acute respiratory syndrome coronavirus 2
GVYDYLVST

SEQ ID NO: 2707 - protein, 9 aa, Severe acute respiratory syndrome-related coronavirus
  REGION 1..9: note = Table A: HLA-C*14:02H HLA-C*14:03M HLA-A*33:03H HLA-B*18:01H HLA-A*24:02H HLA-A*24:07M HLA-A*23:01H HLA-B*38:02H HLA-B*15:02H HLA-B*39:01H HLA-B*07:05H
  source 1..9: note = Severe acute respiratory syndrome coronavirus 2
DYLVSTQEF

SEQ ID NO: 2708 - protein, 9 aa, Severe acute respiratory syndrome-related coronavirus
  REGION 1..9: note = Table A: HLA-A*34:01H HLA-A*66:01H
  source 1..9: note = Severe acute respiratory syndrome coronavirus 2
YLVSTQEFR

SEQ ID NO: 2709 - protein, 9 aa, Severe acute respiratory syndrome-related coronavirus
  REGION 1..9: note = Table A: HLA-B*58:01H HLA-A*36:01M HLA-A*29:01M HLA-A*29:02M HLA-A*30:02M HLA-C*15:05H HLA-B*38:02H
  source 1..9: note = Severe acute respiratory syndrome coronavirus 2
LVSTQEFRY

SEQ ID NO: 2710 - protein, 9 aa, Severe acute respiratory syndrome-related coronavirus
  REGION 1..9: note = Table A: HLA-B*58:02M HLA-C*16:01H HLA-C*15:02H
  source 1..9: note = Severe acute respiratory syndrome coronavirus 2
VSTQEFRYM

SEQ ID NO: 2711 - protein, 9 aa, Severe acute respiratory syndrome-related coronavirus
  REGION 1..9: note = Table A: HLA-C*06:02H HLA-B*27:02H HLA-B*14:02M HLA-B*14:01M HLA-B*38:02H HLA-B*39:01H
  source 1..9: note = Severe acute respiratory syndrome coronavirus 2
FRYMNSQGL

SEQ ID NO: 2712 - protein, 9 aa, Severe acute respiratory syndrome-related coronavirus
  REGION 1..9: note = Table A: HLA-A*24:02H HLA-A*24:07H
  source 1..9: note = Severe acute respiratory syndrome coronavirus 2
RYMNSQGLL

SEQ ID NO: 2713 - protein, 9 aa, Severe acute respiratory syndrome-related coronavirus
  REGION 1..9: note = Table A: HLA-A*11:303H HLA-A*03:02M HLA-A*11:01M HLA-A*11:02M HLA-A*33:03H HLA-A*68:01H HLA-A*34:02M HLA-C*07:27H
  source 1..9: note = Severe acute respiratory syndrome coronavirus 2
NSQGLLPPK

SEQ ID NO: 2714 - protein, 9 aa, Severe acute respiratory syndrome-related coronavirus
  REGION 1..9: note = Table A: HLA-A*02:11H HLA-B*38:02H HLA-B*13:02H
  source 1..9: note = Severe acute respiratory syndrome coronavirus 2
GLLPPKNSI

SEQ ID NO: 2715 - protein, 9 aa, Severe acute respiratory syndrome-related coronavirus
  REGION 1..9: note = Table A: HLA-B*54:01H
  source 1..9: note = Severe acute respiratory syndrome coronavirus 2
LPPKNSIDA

SEQ ID NO: 2716 - protein, 9 aa, Severe acute respiratory syndrome-related coronavirus
  REGION 1..9: note = Table A: HLA-B*07:04H
  source 1..9: note = Severe acute respiratory syndrome coronavirus 2
PPKNSIDAF

SEQ ID NO: 2717 - protein, 9 aa, Severe acute respiratory syndrome-related coronavirus
  REGION 1..9: note = Table A: HLA-A*02:07H HLA-B*13:02H
  source 1..9: note = Severe acute respiratory syndrome coronavirus 2
SIDAFKLNI

SEQ ID NO: 2718 - protein, 9 aa, Severe acute respiratory syndrome-related coronavirus
  REGION 1..9: note = Table A: HLA-A*33:01H HLA-B*53:01H HLA-A*68:01H HLA-A*68:02M HLA-B*35:03H HLA-C*15:05H HLA-A*34:02H HLA-B*51:01H HLA-B*35:07H HLA-B*38:02H HLA-B*57:03H
  source 1..9: note = Severe acute respiratory syndrome coronavirus 2
DAFKLNIKL

SEQ ID NO: 2719 - protein, 9 aa, Severe acute respiratory syndrome-related coronavirus
  REGION 1..9: note = Table A: HLA-B*07:04H
  source 1..9: note = Severe acute respiratory syndrome coronavirus 2
AFKLNIKLL

SEQ ID NO: 2720 - protein, 9 aa, Severe acute respiratory syndrome-related coronavirus
  REGION 1..9: note = Table A: HLA-A*74:01H HLA-B*08:01H HLA-A*02:11H HLA-C*15:02M HLA-A*02:04M HLA-A*02:06H HLA-A*02:07H HLA-A*02:08H HLA-A*02:01H HLA-A*02:02H HLA-A*02:03H HLA-B*38:02H HLA-B*40:06H HLA-B*13:02M
  source 1..9: note = Severe acute respiratory syndrome coronavirus 2
KLNIKLLGV

SEQ ID NO: 2721 - protein, 9 aa, Severe acute respiratory syndrome-related coronavirus
  REGION 1..9: note = Table A: HLA-B*56:01H HLA-B*55:02H HLA-C*15:05H HLA-B*55:01H HLA-B*07:04H
  source 1..9: note = Severe acute respiratory syndrome coronavirus 2
KPCIKVATV

SEQ ID NO: 2722 - protein, 9 aa, Severe acute respiratory syndrome-related coronavirus
  REGION 1..9: note = Table A: HLA-B*58:01H HLA-A*02:11H HLA-A*30:02H HLA-C*15:05H HLA-A*02:05H HLA-A*02:08M HLA-A*02:02M HLA-B*07:05H HLA-B*57:03M HLA-B*13:02H
  source 1..9: note = Severe acute respiratory syndrome coronavirus 2
KVATVQSKM

SEQ ID NO: 2723 - protein, 9 aa, Severe acute respiratory syndrome-related coronavirus
  REGION 1..9: note = Table A: HLA-A*02:03H
  source 1..9: note = Severe acute respiratory syndrome coronavirus 2
TVQSKMSDV

SEQ ID NO: 2724 - protein, 9 aa, Severe acute respiratory syndrome-related coronavirus
  REGION 1..9: note = Table A: HLA-C*08:02H HLA-C*05:01H
  source 1..9: note = Severe acute respiratory syndrome coronavirus 2
MSDVKCTSV

SEQ ID NO: 2725 - protein, 9 aa, Severe acute respiratory syndrome-related coronavirus
  REGION 1..9: note = Table A: HLA-B*15:02H
  source 1..9: note = Severe acute respiratory syndrome coronavirus 2
DVKCTSVVL

SEQ ID NO: 2726 - protein, 9 aa, Severe acute respiratory syndrome-related coronavirus
  REGION 1..9: note = Table A: HLA-A*68:02H HLA-C*15:05H HLA-C*15:02H HLA-B*13:02H
  source 1..9: note = Severe acute respiratory syndrome coronavirus 2
CTSVVLLSV

SEQ ID NO: 2727 - protein, 9 aa, Severe acute respiratory syndrome-related coronavirus
  REGION 1..9: note = Table A: HLA-C*15:05H HLA-B*38:02H
  source 1..9: note = Severe acute respiratory syndrome coronavirus 2
TSVVLLSVL

SEQ ID NO: 2728 - protein, 9 aa, Severe acute respiratory syndrome-related coronavirus
  REGION 1..9: note = Table A: HLA-A*11:303H HLA-A*02:11H HLA-A*02:04H HLA-A*02:06H HLA-A*02:07M HLA-B*14:01M HLA-A*02:01H HLA-A*02:02M HLA-A*02:03H HLA-C*08:01H HLA-B*38:02H HLA-B*13:02H
  source 1..9: note = Severe acute respiratory syndrome coronavirus 2
VLLSVLQQL

SEQ ID NO: 2729 - protein, 9 aa, Severe acute respiratory syndrome-related coronavirus
  REGION 1..9: note = Table A: HLA-B*14:02H HLA-B*14:01H HLA-B*38:02H HLA-B*39:01H
  source 1..9: note = Severe acute respiratory syndrome coronavirus 2
LRVESSSKL

SEQ ID NO: 2730 - protein, 9 aa, Severe acute respiratory syndrome-related coronavirus
  REGION 1..9: note = Table A: HLA-B*58:01H HLA-B*58:02H HLA-B*57:01H HLA-B*53:01H HLA-A*32:01H HLA-B*57:03M HLA-B*13:01M
  source 1..9: note = Severe acute respiratory syndrome coronavirus 2
RVESSSKLW

SEQ ID NO: 2731 - protein, 9 aa, Severe acute respiratory syndrome-related coronavirus
  REGION 1..9: note = Table A: HLA-B*45:01H HLA-B*49:01H HLA-B*50:01H
  source 1..9: note = Severe acute respiratory syndrome coronavirus 2
VESSSKLWA

SEQ ID NO: 2732 - protein, 9 aa, Severe acute respiratory syndrome-related coronavirus
  REGION 1..9: note = Table A: HLA-A*02:11H HLA-A*02:04H HLA-A*02:07H HLA-A*02:01M HLA-A*02:02H HLA-B*13:02H
  source 1..9: note = Severe acute respiratory syndrome coronavirus 2
KLWAQCVQL

SEQ ID NO: 2733 - protein, 9 aa, Severe acute respiratory syndrome-related coronavirus
  REGION 1..9: note = Table A: HLA-A*02:04H HLA-A*02:06M HLA-A*02:01H HLA-C*08:01H HLA-B*38:02H HLA-B*13:01M HLA-B*13:02H
  source 1..9: note = Severe acute respiratory syndrome coronavirus 2
VQLHNDILL

SEQ ID NO: 2734 - protein, 9 aa, Severe acute respiratory syndrome-related coronavirus
  REGION 1..9: note = Table A: HLA-A*02:05H HLA-A*02:01H HLA-A*02:02H HLA-A*02:03H HLA-B*38:02M
  source 1..9: note = Severe acute respiratory syndrome coronavirus 2
QLHNDILLA

SEQ ID NO: 2735 - protein, 9 aa, Severe acute respiratory syndrome-related coronavirus
  REGION 1..9: note = Table A: HLA-A*11:01H HLA-A*11:02H HLA-A*34:02H
  source 1..9: note = Severe acute respiratory syndrome coronavirus 2
LHNDILLAK

SEQ ID NO: 2736 - protein, 9 aa, Severe acute respiratory syndrome-related coronavirus
  REGION 1..9: note = Table A: HLA-A*02:05H HLA-A*02:01H HLA-A*02:02M HLA-A*02:03H HLA-B*38:02H
  source 1..9: note = Severe acute respiratory syndrome coronavirus 2
LLAKDTTEA

SEQ ID NO: 2737 - protein, 9 aa, Severe acute respiratory syndrome-related coronavirus
  REGION 1..9: note = Table A: HLA-A*11:303M HLA-C*16:04H HLA-B*57:01H HLA-A*25:01H HLA-B*46:01H HLA-B*08:01H HLA-B*53:01H HLA-C*03:02M HLA-C*12:02H HLA-C*07:27H HLA-B*35:01M HLA-B*35:07M HLA-C*08:01H HLA-B*38:02M HLA-B*07:04H
  REGION 1..9: note = CONT. FROM ABOVE: HLA-B*15:01M HLA-B*15:02M HLA-B*15:03H HLA- B*57:03M HLA-C*02:02M HLA-B*15:11M
  source 1..9: note = Severe acute respiratory syndrome coronavirus 2
LAKDTTEAF

SEQ ID NO: 2738 - protein, 9 aa, Severe acute respiratory syndrome-related coronavirus
  REGION 1..9: note = Table A: HLA-A*25:01H HLA-A*26:01H HLA-A*26:02M HLA-A*26:03H HLA-A*68:01H HLA-A*68:02M HLA-C*15:05H HLA-A*34:01H HLA-A*34:02H HLA-B*35:02H HLA-A*66:01M
  source 1..9: note = Severe acute respiratory syndrome coronavirus 2
DTTEAFEKM

SEQ ID NO: 2739 - protein, 9 aa, Severe acute respiratory syndrome-related coronavirus
  REGION 1..9: note = Table A: HLA-A*68:02H
  source 1..9: note = Severe acute respiratory syndrome coronavirus 2
TTEAFEKMV

SEQ ID NO: 2740 - protein, 9 aa, Severe acute respiratory syndrome-related coronavirus
  REGION 1..9: note = Table A: HLA-B*45:01H HLA-B*50:01H
  source 1..9: note = Severe acute respiratory syndrome coronavirus 2
TEAFEKMVS

SEQ ID NO: 2741 - protein, 9 aa, Severe acute respiratory syndrome-related coronavirus
  REGION 1..9: note = Table A: HLA-A*11:303H HLA-A*25:01M HLA-B*46:01H HLA-A*26:01H HLA-A*26:02H HLA-A*26:03H HLA-B*08:01H HLA-C*03:03H HLA-C*12:05H HLA-B*53:01M HLA-C*03:02H HLA-C*03:04H HLA-A*68:02H HLA-B*35:03M HLA-C*15:05H
  REGION 1..9: note = CONT. FROM ABOVE: HLA-B*14:02M HLA-C*12:02H HLA-C*12:03M HLA- A*02:05H HLA-A*34:01M HLA-A*34:02H HLA-B*35:01M HLA-B*35:02H HLA-B*51:01H HLA-C*17:01H HLA-B*35:07M HLA-C*08:01H HLA-B*35 :12H HLA-B*38:02M HLA-B*54:01H HLA-B*15:02M HLA-B*39:01H
  REGION 1..9: note = CONT. FROM ABOVE: HLA-B*07:05H HLA-A*66:01H
  source 1..9: note = Severe acute respiratory syndrome coronavirus 2
EAFEKMVSL

SEQ ID NO: 2742 - protein, 9 aa, Severe acute respiratory syndrome-related coronavirus
  REGION 1..9: note = Table A: HLA-C*04:01H HLA-C*04:03M
  source 1..9: note = Severe acute respiratory syndrome coronavirus 2
AFEKMVSLL

SEQ ID NO: 2743 - protein, 9 aa, Severe acute respiratory syndrome-related coronavirus
  REGION 1..9: note = Table A: HLA-A*02:11H HLA-A*02:02H
  source 1..9: note = Severe acute respiratory syndrome coronavirus 2
KMVSLLSVL

SEQ ID NO: 2744 - protein, 9 aa, Severe acute respiratory syndrome-related coronavirus
  REGION 1..9: note = Table A: HLA-A*68:02H
  source 1..9: note = Severe acute respiratory syndrome coronavirus 2
MVSLLSVLL

SEQ ID NO: 2745 - protein, 9 aa, Severe acute respiratory syndrome-related coronavirus
  REGION 1..9: note = Table A: HLA-A*29:02H HLA-A*02:11H HLA-C*15:05H HLA-A*02:04M HLA-A*02:01H HLA-B*38:02H HLA-B*15:02H HLA-B*13:02H
  source 1..9: note = Severe acute respiratory syndrome coronavirus 2
SLLSVLLSM

SEQ ID NO: 2746 - protein, 9 aa, Severe acute respiratory syndrome-related coronavirus
  REGION 1..9: note = Table A: HLA-A*02:06H
  source 1..9: note = Severe acute respiratory syndrome coronavirus 2
SVLLSMQGA

SEQ ID NO: 2747 - protein, 9 aa, Severe acute respiratory syndrome-related coronavirus
  REGION 1..9: note = Table A: HLA-A*03:02H HLA-A*11:01H HLA-A*11:02H HLA-B*27:02H HLA-A*34:02H
  source 1..9: note = Severe acute respiratory syndrome coronavirus 2
MQGAVDINK

SEQ ID NO: 2748 - protein, 9 aa, Severe acute respiratory syndrome-related coronavirus
  REGION 1..9: note = Table A: HLA-A*02:05M HLA-A*02:02H HLA-B*35:02H HLA-B*38:02H HLA-B*39:01H
  source 1..9: note = Severe acute respiratory syndrome coronavirus 2
QGAVDINKL

SEQ ID NO: 2749 - protein, 9 aa, Severe acute respiratory syndrome-related coronavirus
  REGION 1..9: note = Table A: HLA-B*45:01H
  source 1..9: note = Severe acute respiratory syndrome coronavirus 2
CEEMLDNRA

SEQ ID NO: 2750 - protein, 9 aa, Severe acute respiratory syndrome-related coronavirus
  REGION 1..9: note = Table A: HLA-B*45:01H
  source 1..9: note = Severe acute respiratory syndrome coronavirus 2
EEMLDNRAT

SEQ ID NO: 2751 - protein, 9 aa, Severe acute respiratory syndrome-related coronavirus
  REGION 1..9: note = Table A: HLA-B*44:05H HLA-A*33:03H HLA-A*26:03H HLA-B*08:01M HLA-A*02:11H HLA-A*68:02H HLA-C*15:05H HLA-B*14:02H HLA-B*14:01H HLA-A*02:02H HLA-A*34:01H HLA-B*38:02M HLA-B*15:02H HLA-B*39:01H HLA-B*07:05H
  source 1..9: note = Severe acute respiratory syndrome coronavirus 2
EMLDNRATL

SEQ ID NO: 2752 - protein, 9 aa, Severe acute respiratory syndrome-related coronavirus
  REGION 1..9: note = Table A: HLA-B*14:01H HLA-B*39:06M HLA-B*39:01H
  source 1..9: note = Severe acute respiratory syndrome coronavirus 2
NRATLQAIA

SEQ ID NO: 2753 - protein, 9 aa, Severe acute respiratory syndrome-related coronavirus
  REGION 1..9: note = Table A: HLA-C*14:03H HLA-A*11:303H HLA-B*44:05H HLA-B*46:01M HLA-B*27:02H HLA-B*35:01H HLA-B*15:13H HLA-B*38:02M HLA-B*15:01H HLA-B*15:02H HLA-B*39:01H HLA-B*07:05M
  source 1..9: note = Severe acute respiratory syndrome coronavirus 2
TLQAIASEF

SEQ ID NO: 2754 - protein, 9 aa, Severe acute respiratory syndrome-related coronavirus
  REGION 1..9: note = Table A: HLA-A*11:303M HLA-A*25:01H HLA-B*46:01H HLA-C*03:03H HLA-C*03:04H HLA-C*15:05M HLA-C*01:02M HLA-A*02:05H HLA-A*02:06H HLA-A*02:08H HLA-A*02:03H HLA-C*08:01M HLA-B*38:02M HLA-B*15:01H HLA-B*39:01H
  REGION 1..9: note = CONT. FROM ABOVE: HLA-B*13:01H
  source 1..9: note = Severe acute respiratory syndrome coronavirus 2
AIASEFSSL

SEQ ID NO: 2755 - protein, 9 aa, Severe acute respiratory syndrome-related coronavirus
  REGION 1..9: note = Table A: HLA-B*44:02M HLA-B*44:05M HLA-C*16:04H HLA-B*46:01M HLA-B*45:01H HLA-B*44:03H HLA-B*18:01H HLA-C*07:01H HLA-B*27:02H HLA-A*30:02H HLA-B*35:01H HLA-B*38:02H HLA-B*40:01H HLA-B*40:02M HLA-B*40:06H HLA-B*15:01H
  REGION 1..9: note = CONT. FROM ABOVE: HLA-B*15:02H HLA-B*15:03H HLA-B*39:01H HLA- B*07:05H HLA-B*41:02H HLA-B*49:01M HLA-B*50:01M
  source 1..9: note = Severe acute respiratory syndrome coronavirus 2
SEFSSLPSY

SEQ ID NO: 2756 - protein, 9 aa, Severe acute respiratory syndrome-related coronavirus
  REGION 1..9: note = Table A: HLA-B*54:01M
  source 1..9: note = Severe acute respiratory syndrome coronavirus 2
FSSLPSYAA

SEQ ID NO: 2757 - protein, 9 aa, Severe acute respiratory syndrome-related coronavirus
  REGION 1..9: note = Table A: HLA-B*58:01M HLA-B*58:02H HLA-C*14:03H HLA-A*11:303M HLA-B*44:05H HLA-B*57:01H HLA-A*25:01M HLA-B*46:01M HLA-A*26:01H HLA-A*26:02H HLA-A*26:03M HLA-C*03:03H HLA-C*03:02M HLA-C*03:04H HLA-A*30:02H
  REGION 1..9: note = CONT. FROM ABOVE: HLA-C*15:05M HLA-C*12:02H HLA-A*34:02H HLA- C*07:27H HLA-A*24:02H HLA-B*35:01H HLA-B*35:07H HLA-C*08:01H HLA-A*23:01H HLA-B*37:01H HLA-B*38:02M HLA-B*15:01M HLA-B*15 :02H HLA-B*15:03H HLA-B*39:01H HLA-B*07:05M HLA-B*57:03H
  REGION 1..9: note = CONT. FROM ABOVE: HLA-C*07:04H HLA-A*66:01H
  source 1..9: note = Severe acute respiratory syndrome coronavirus 2
SSLPSYAAF

SEQ ID NO: 2758 - protein, 9 aa, Severe acute respiratory syndrome-related coronavirus
  REGION 1..9: note = Table A: HLA-A*02:07H
  source 1..9: note = Severe acute respiratory syndrome coronavirus 2
SLPSYAAFA

SEQ ID NO: 2759 - protein, 9 aa, Severe acute respiratory syndrome-related coronavirus
  REGION 1..9: note = Table A: HLA-B*54:01H
  source 1..9: note = Severe acute respiratory syndrome coronavirus 2
LPSYAAFAT

SEQ ID NO: 2760 - protein, 9 aa, Severe acute respiratory syndrome-related coronavirus
  REGION 1..9: note = Table A: HLA-B*55:02H
  source 1..9: note = Severe acute respiratory syndrome coronavirus 2
PSYAAFATA

SEQ ID NO: 2761 - protein, 9 aa, Severe acute respiratory syndrome-related coronavirus
  REGION 1..9: note = Table A: HLA-A*11:303H HLA-C*16:04M HLA-B*46:01H HLA-B*55:02H HLA-C*12:03H HLA-A*02:05H HLA-B*38:02H HLA-B*54:01H
  source 1..9: note = Severe acute respiratory syndrome coronavirus 2
AAFATAQEA

SEQ ID NO: 2762 - protein, 9 aa, Severe acute respiratory syndrome-related coronavirus
  REGION 1..9: note = Table A: HLA-C*14:02M HLA-C*14:03H HLA-B*46:01H HLA-A*29:01H HLA-A*29:02H HLA-B*38:02H HLA-B*15:01M HLA-B*15:02H HLA-B*15:03H HLA-B*39:01H HLA-B*07:05H
  source 1..9: note = Severe acute respiratory syndrome coronavirus 2
AFATAQEAY

SEQ ID NO: 2763 - protein, 9 aa, Severe acute respiratory syndrome-related coronavirus
  REGION 1..9: note = Table A: HLA-B*54:01H HLA-B*39:01H
  source 1..9: note = Severe acute respiratory syndrome coronavirus 2
TAQEAYEQA

SEQ ID NO: 2764 - protein, 9 aa, Severe acute respiratory syndrome-related coronavirus
  REGION 1..9: note = Table A: HLA-B*38:02H HLA-B*39:01M HLA-B*13:01H HLA-B*13:02M
  source 1..9: note = Severe acute respiratory syndrome coronavirus 2
AQEAYEQAV

SEQ ID NO: 2765 - protein, 9 aa, Severe acute respiratory syndrome-related coronavirus
  REGION 1..9: note = Table A: HLA-B*45:01H HLA-B*40:06H HLA-B*50:01M
  source 1..9: note = Severe acute respiratory syndrome coronavirus 2
QEAYEQAVA

SEQ ID NO: 2766 - protein, 9 aa, Severe acute respiratory syndrome-related coronavirus
  REGION 1..9: note = Table A: HLA-A*02:05H HLA-B*38:02H
  source 1..9: note = Severe acute respiratory syndrome coronavirus 2
AVANGDSEV

SEQ ID NO: 2767 - protein, 9 aa, Severe acute respiratory syndrome-related coronavirus
  REGION 1..9: note = Table A: HLA-C*08:01H
  source 1..9: note = Severe acute respiratory syndrome coronavirus 2
VANGDSEVV

SEQ ID NO: 2768 - protein, 9 aa, Severe acute respiratory syndrome-related coronavirus
  REGION 1..9: note = Table A: HLA-A*36:01H HLA-A*34:02H
  source 1..9: note = Severe acute respiratory syndrome coronavirus 2
NGDSEVVLK

SEQ ID NO: 2769 - protein, 9 aa, Severe acute respiratory syndrome-related coronavirus
  REGION 1..9: note = Table A: HLA-A*11:303H HLA-A*03:01H HLA-A*03:02H HLA-A*11:01M HLA-A*11:02H HLA-A*36:01H HLA-B*27:02H HLA-A*68:01H HLA-A*34:02H HLA-C*07:27H HLA-B*37:01H HLA-B*13:02H
  source 1..9: note = Severe acute respiratory syndrome coronavirus 2
GDSEVVLKK

SEQ ID NO: 2770 - protein, 9 aa, Severe acute respiratory syndrome-related coronavirus
  REGION 1..9: note = Table A: HLA-A*68:01H HLA-A*34:01H HLA-A*34:02M HLA-A*66:01H
  source 1..9: note = Severe acute respiratory syndrome coronavirus 2
EVVLKKLKK

SEQ ID NO: 2771 - protein, 9 aa, Severe acute respiratory syndrome-related coronavirus
  REGION 1..9: note = Table A: HLA-B*08:01H HLA-B*07:04H
  source 1..9: note = Severe acute respiratory syndrome coronavirus 2
VLKKLKKSL

SEQ ID NO: 2772 - protein, 9 aa, Severe acute respiratory syndrome-related coronavirus
  REGION 1..9: note = Table A: HLA-A*02:05H HLA-A*02:08H HLA-A*02:02M HLA-A*02:03H HLA-B*38:02H
  source 1..9: note = Severe acute respiratory syndrome coronavirus 2
KLKKSLNVA

SEQ ID NO: 2773 - protein, 9 aa, Severe acute respiratory syndrome-related coronavirus
  REGION 1..9: note = Table A: HLA-C*14:03H HLA-A*11:303H HLA-B*44:05H HLA-B*46:01M HLA-C*15:05H HLA-C*01:02H HLA-C*12:02H HLA-B*37:01H HLA-B*38:02M HLA-B*07:02H HLA-B*15:01H HLA-B*15:02H HLA-B*15:03H HLA-B*07:05H
  source 1..9: note = Severe acute respiratory syndrome coronavirus 2
SLNVAKSEF

SEQ ID NO: 2774 - protein, 9 aa, Severe acute respiratory syndrome-related coronavirus
  REGION 1..9: note = Table A: HLA-A*68:01H
  source 1..9: note = Severe acute respiratory syndrome coronavirus 2
NVAKSEFDR

SEQ ID NO: 2775 - protein, 9 aa, Severe acute respiratory syndrome-related coronavirus
  REGION 1..9: note = Table A: HLA-A*11:303H HLA-B*44:02M HLA-B*44:05H HLA-C*16:04H HLA-B*46:01H HLA-B*45:01M HLA-B*08:01H HLA-B*44:03M HLA-B*18:01H HLA-C*07:01H HLA-A*68:02H HLA-B*35:03H HLA-C*15:05H HLA-B*14:02H HLA-A*02:05H
  REGION 1..9: note = CONT. FROM ABOVE: HLA-B*14:01M HLA-A*02:02H HLA-B*35:01H HLA- B*35:02H HLA-C*08:01H HLA-B*35:12H HLA-B*37:01H HLA-B*38:02H HLA-B*40:01H HLA-B*40:02H HLA-B*40:06M HLA-B*07:02M HLA-B*07 :04H HLA-B*15:01H HLA-B*15:02H HLA-B*39:01H HLA-B*07:05H
  REGION 1..9: note = CONT. FROM ABOVE: HLA-B*41:02H HLA-B*15:10H HLA-B*49:01H HLA- C*07:04H HLA-B*50:01H
  source 1..9: note = Severe acute respiratory syndrome coronavirus 2
SEFDRDAAM

SEQ ID NO: 2776 - protein, 9 aa, Severe acute respiratory syndrome-related coronavirus
  REGION 1..9: note = Table A: HLA-A*33:03H HLA-A*34:01H HLA-A*34:02H HLA-A*66:01H
  source 1..9: note = Severe acute respiratory syndrome coronavirus 2
FDRDAAMQR

SEQ ID NO: 2777 - protein, 9 aa, Severe acute respiratory syndrome-related coronavirus
  REGION 1..9: note = Table A: HLA-B*40:02H
  source 1..9: note = Severe acute respiratory syndrome coronavirus 2
RDAAMQRKL

SEQ ID NO: 2778 - protein, 9 aa, Severe acute respiratory syndrome-related coronavirus
  REGION 1..9: note = Table A: HLA-A*02:11H HLA-A*02:02H
  source 1..9: note = Severe acute respiratory syndrome coronavirus 2
AMQRKLEKM

SEQ ID NO: 2779 - protein, 9 aa, Severe acute respiratory syndrome-related coronavirus
  REGION 1..9: note = Table A: HLA-B*44:05H HLA-B*18:01M HLA-B*40:01H HLA-B*40:02M HLA-B*15:01H HLA-B*15:02H HLA-B*07:05H HLA-B*41:02H HLA-B*49:01H
  source 1..9: note = Severe acute respiratory syndrome coronavirus 2
LEKMADQAM

SEQ ID NO: 2780 - protein, 9 aa, Severe acute respiratory syndrome-related coronavirus
  REGION 1..9: note = Table A: HLA-A*11:303H HLA-C*04:03M HLA-B*53:01H HLA-C*03:04H HLA-B*35:03M HLA-C*15:05M HLA-A*02:07H HLA-B*35:01M HLA-B*35:02H HLA-B*35:08H HLA-B*35:07H HLA-C*08:01H HLA-C*08:02M HLA-B*35:12H HLA-B*38:02M
  REGION 1..9: note = CONT. FROM ABOVE: HLA-B*15:02H HLA-B*39:01H HLA-B*07:05H HLA- C*05:01M
  source 1..9: note = Severe acute respiratory syndrome coronavirus 2
MADQAMTQM

SEQ ID NO: 2781 - protein, 9 aa, Severe acute respiratory syndrome-related coronavirus
  REGION 1..9: note = Table A: HLA-B*44:02H HLA-B*44:03H HLA-B*07:05H
  source 1..9: note = Severe acute respiratory syndrome coronavirus 2
ADQAMTQMY

SEQ ID NO: 2782 - protein, 9 aa, Severe acute respiratory syndrome-related coronavirus
  REGION 1..9: note = Table A: HLA-A*34:01H HLA-A*34:02M
  source 1..9: note = Severe acute respiratory syndrome coronavirus 2
DQAMTQMYK

SEQ ID NO: 2783 - protein, 9 aa, Severe acute respiratory syndrome-related coronavirus
  REGION 1..9: note = Table A: HLA-A*02:02H
  source 1..9: note = Severe acute respiratory syndrome coronavirus 2
AMTQMYKQA

SEQ ID NO: 2784 - protein, 9 aa, Severe acute respiratory syndrome-related coronavirus
  REGION 1..9: note = Table A: HLA-A*74:01M HLA-A*11:01H HLA-A*33:01M HLA-A*33:03H HLA-A*68:01H HLA-A*34:01H HLA-A*34:02H HLA-A*31:01M HLA-A*66:01M
  source 1..9: note = Severe acute respiratory syndrome coronavirus 2
MTQMYKQAR

SEQ ID NO: 2785 - protein, 9 aa, Severe acute respiratory syndrome-related coronavirus
  REGION 1..9: note = Table A: HLA-B*45:01H HLA-B*41:02H
  source 1..9: note = Severe acute respiratory syndrome coronavirus 2
SEDKRAKVT

SEQ ID NO: 2786 - protein, 9 aa, Severe acute respiratory syndrome-related coronavirus
  REGION 1..9: note = Table A: HLA-B*27:05H
  source 1..9: note = Severe acute respiratory syndrome coronavirus 2
KRAKVTSAM

SEQ ID NO: 2787 - protein, 9 aa, Severe acute respiratory syndrome-related coronavirus
  REGION 1..9: note = Table A: HLA-C*15:05M HLA-A*02:08M HLA-B*07:05H HLA-B*57:03H
  source 1..9: note = Severe acute respiratory syndrome coronavirus 2
KVTSAMQTM

SEQ ID NO: 2788 - protein, 9 aa, Severe acute respiratory syndrome-related coronavirus
  REGION 1..9: note = Table A: HLA-C*15:05H
  source 1..9: note = Severe acute respiratory syndrome coronavirus 2
VTSAMQTML

SEQ ID NO: 2789 - protein, 9 aa, Severe acute respiratory syndrome-related coronavirus
  REGION 1..9: note = Table A: HLA-B*58:01H HLA-C*15:05H HLA-B*57:03H
  source 1..9: note = Severe acute respiratory syndrome coronavirus 2
TSAMQTMLF

SEQ ID NO: 2790 - protein, 9 aa, Severe acute respiratory syndrome-related coronavirus
  REGION 1..9: note = Table A: HLA-A*02:04H
  source 1..9: note = Severe acute respiratory syndrome coronavirus 2
AMQTMLFTM

SEQ ID NO: 2791 - protein, 9 aa, Severe acute respiratory syndrome-related coronavirus
  REGION 1..9: note = Table A: HLA-A*02:05H HLA-A*02:06H HLA-C*08:01H HLA-B*38:02M HLA-B*40:06H HLA-B*13:02H
  source 1..9: note = Severe acute respiratory syndrome coronavirus 2
MQTMLFTML

SEQ ID NO: 2792 - protein, 9 aa, Severe acute respiratory syndrome-related coronavirus
  REGION 1..9: note = Table A: HLA-A*74:01H HLA-A*11:01H HLA-A*11:02M HLA-A*36:01H HLA-A*33:03H HLA-A*34:01H HLA-A*34:02M HLA-A*31:01H HLA-A*66:01H
  source 1..9: note = Severe acute respiratory syndrome coronavirus 2
QTMLFTMLR

SEQ ID NO: 2793 - protein, 9 aa, Severe acute respiratory syndrome-related coronavirus
  REGION 1..9: note = Table A: HLA-A*02:11H HLA-A*02:04H HLA-A*02:02H
  source 1..9: note = Severe acute respiratory syndrome coronavirus 2
MLFTMLRKL

SEQ ID NO: 2794 - protein, 9 aa, Severe acute respiratory syndrome-related coronavirus
  REGION 1..9: note = Table A: HLA-B*14:02H HLA-B*14:01H HLA-B*38:02H HLA-B*39:01H
  source 1..9: note = Severe acute respiratory syndrome coronavirus 2
LRKLDNDAL

SEQ ID NO: 2795 - protein, 9 aa, Severe acute respiratory syndrome-related coronavirus
  REGION 1..9: note = Table A: HLA-A*33:01H
  source 1..9: note = Severe acute respiratory syndrome coronavirus 2
DALNNIINN

SEQ ID NO: 2796 - protein, 9 aa, Severe acute respiratory syndrome-related coronavirus
  REGION 1..9: note = Table A: HLA-A*02:11M HLA-A*02:04M HLA-A*02:05M HLA-A*02:07H HLA-A*02:08H HLA-B*14:01H HLA-A*02:01M HLA-A*02:02H HLA-A*02:03H HLA-B*38:02M
  source 1..9: note = Severe acute respiratory syndrome coronavirus 2
ALNNIINNA

SEQ ID NO: 2797 - protein, 9 aa, Severe acute respiratory syndrome-related coronavirus
  REGION 1..9: note = Table A: HLA-A*33:01H HLA-A*33:03M
  source 1..9: note = Severe acute respiratory syndrome coronavirus 2
LNNIINNAR

SEQ ID NO: 2798 - protein, 9 aa, Severe acute respiratory syndrome-related coronavirus
  REGION 1..9: note = Table A: HLA-B*51:01H
  source 1..9: note = Severe acute respiratory syndrome coronavirus 2
DGCVPLNII

SEQ ID NO: 2799 - protein, 9 aa, Severe acute respiratory syndrome-related coronavirus
  REGION 1..9: note = Table A: HLA-B*56:01H HLA-B*55:02M HLA-B*55:01H HLA-B*51:01H HLA-B*54:01H
  source 1..9: note = Severe acute respiratory syndrome coronavirus 2
VPLNIIPLT

SEQ ID NO: 2800 - protein, 9 aa, Severe acute respiratory syndrome-related coronavirus
  REGION 1..9: note = Table A: HLA-B*56:01H HLA-B*55:02H HLA-A*02:05H HLA-B*38:02H HLA-B*39:06H HLA-B*54:01H
  source 1..9: note = Severe acute respiratory syndrome coronavirus 2
NIIPLTTAA

SEQ ID NO: 2801 - protein, 9 aa, Severe acute respiratory syndrome-related coronavirus
  REGION 1..9: note = Table A: HLA-A*03:02H HLA-A*34:02H
  source 1..9: note = Severe acute respiratory syndrome coronavirus 2
IIPLTTAAK

SEQ ID NO: 2802 - protein, 9 aa, Severe acute respiratory syndrome-related coronavirus
  REGION 1..9: note = Table A: HLA-B*53:01H HLA-B*35:03M HLA-C*15:05M HLA-B*35:01H HLA-B*07:02H HLA-B*07:05M
  source 1..9: note = Severe acute respiratory syndrome coronavirus 2
IPLTTAAKL

SEQ ID NO: 2803 - protein, 9 aa, Severe acute respiratory syndrome-related coronavirus
  REGION 1..9: note = Table A: HLA-A*68:02H HLA-C*15:05H HLA-C*15:02H HLA-A*02:03H
  source 1..9: note = Severe acute respiratory syndrome coronavirus 2
TTAAKLMVV

SEQ ID NO: 2804 - protein, 9 aa, Severe acute respiratory syndrome-related coronavirus
  REGION 1..9: note = Table A: HLA-B*53:01H HLA-C*15:05H HLA-B*51:01M HLA-B*38:02H HLA-B*57:03H
  source 1..9: note = Severe acute respiratory syndrome coronavirus 2
TAAKLMVVI

SEQ ID NO: 2805 - protein, 9 aa, Severe acute respiratory syndrome-related coronavirus
  REGION 1..9: note = Table A: HLA-B*58:01H HLA-A*36:01H HLA-A*29:02H HLA-A*02:11H HLA-A*30:02M HLA-B*38:02H HLA-B*15:01H HLA-B*15:03H
  source 1..9: note = Severe acute respiratory syndrome coronavirus 2
KLMVVIPDY

SEQ ID NO: 2806 - protein, 9 aa, Severe acute respiratory syndrome-related coronavirus
  REGION 1..9: note = Table A: HLA-B*35:02H
  source 1..9: note = Severe acute respiratory syndrome coronavirus 2
MVVIPDYNT

SEQ ID NO: 2807 - protein, 9 aa, Severe acute respiratory syndrome-related coronavirus
  REGION 1..9: note = Table A: HLA-B*58:01M HLA-B*58:02H HLA-A*11:303M HLA-A*36:01H HLA-B*57:01H HLA-A*25:01M HLA-B*46:01H HLA-A*26:01M HLA-A*26:02M HLA-A*26:03M HLA-A*29:01M HLA-A*29:02M HLA-C*03:02M HLA-A*30:02H HLA-C*15:05H
  REGION 1..9: note = CONT. FROM ABOVE: HLA-C*12:02M HLA-A*02:05H HLA-A*34:01H HLA- C*07:27H HLA-B*35:01H HLA-B*35:08M HLA-B*35:07M HLA-C*08:01H HLA-B*15:13M HLA-B*38:02H HLA-B*15:01H HLA-B*15:02M HLA-B*15 :03H HLA-B*39:01H HLA-B*07:05M HLA-B*57:03M HLA-C*02:02H
  REGION 1..9: note = CONT. FROM ABOVE: HLA-B*15:11M
  source 1..9: note = Severe acute respiratory syndrome coronavirus 2
VVIPDYNTY

SEQ ID NO: 2808 - protein, 9 aa, Severe acute respiratory syndrome-related coronavirus
  REGION 1..9: note = Table A: HLA-A*03:01H HLA-A*03:02H HLA-A*11:01H HLA-A*11:02M HLA-A*36:01H HLA-A*34:02H
  source 1..9: note = Severe acute respiratory syndrome coronavirus 2
VIPDYNTYK

SEQ ID NO: 2809 - protein, 9 aa, Severe acute respiratory syndrome-related coronavirus
  REGION 1..9: note = Table A: HLA-B*58:01H HLA-A*36:01H HLA-A*01:01M HLA-B*35:01M HLA-B*35:08H HLA-B*38:02M HLA-B*15:02H HLA-B*39:01H HLA-B*07:05H
  source 1..9: note = Severe acute respiratory syndrome coronavirus 2
TCDGTTFTY

SEQ ID NO: 2810 - protein, 9 aa, Severe acute respiratory syndrome-related coronavirus
  REGION 1..9: note = Table A: HLA-A*68:02H
  source 1..9: note = Severe acute respiratory syndrome coronavirus 2
TTFTYASAL

SEQ ID NO: 2811 - protein, 9 aa, Severe acute respiratory syndrome-related coronavirus
  REGION 1..9: note = Table A: HLA-A*24:02H HLA-A*24:07M
  source 1..9: note = Severe acute respiratory syndrome coronavirus 2
TFTYASALW

SEQ ID NO: 2812 - protein, 9 aa, Severe acute respiratory syndrome-related coronavirus
  REGION 1..9: note = Table A: HLA-C*06:02H HLA-A*24:02M HLA-A*24:07H HLA-C*08:01H HLA-A*23:01M HLA-B*38:02H
  source 1..9: note = Severe acute respiratory syndrome coronavirus 2
TYASALWEI

SEQ ID NO: 2813 - protein, 9 aa, Severe acute respiratory syndrome-related coronavirus
  REGION 1..9: note = Table A: HLA-A*11:303H HLA-C*06:02H HLA-C*12:05M HLA-A*02:11H HLA-A*68:02M HLA-C*15:05H HLA-C*15:02H HLA-A*02:04M HLA-A*02:05H HLA-A*02:06M HLA-A*02:07H HLA-A*02:01H HLA-A*02:03H HLA-C*08:01H HLA-B*38:02M
  REGION 1..9: note = CONT. FROM ABOVE: HLA-B*40:06H HLA-B*13:02H
  source 1..9: note = Severe acute respiratory syndrome coronavirus 2
SALWEIQQV

SEQ ID NO: 2814 - protein, 9 aa, Severe acute respiratory syndrome-related coronavirus
  REGION 1..9: note = Table A: HLA-A*02:11H HLA-A*02:04M HLA-A*02:07M HLA-B*14:01H HLA-A*02:01M HLA-A*02:02M HLA-A*02:03H HLA-B*52:01H HLA-B*38:02M HLA-B*40:06H HLA-B*13:02H
  source 1..9: note = Severe acute respiratory syndrome coronavirus 2
ALWEIQQVV

SEQ ID NO: 2815 - protein, 9 aa, Severe acute respiratory syndrome-related coronavirus
  REGION 1..9: note = Table A: HLA-B*45:01M HLA-B*39:06H HLA-B*40:02H HLA-B*40:06M HLA-B*50:01M
  source 1..9: note = Severe acute respiratory syndrome coronavirus 2
WEIQQVVDA

SEQ ID NO: 2816 - protein, 9 aa, Severe acute respiratory syndrome-related coronavirus
  REGION 1..9: note = Table A: HLA-A*02:05H HLA-A*02:08H HLA-B*35:02H HLA-B*15:13H HLA-B*38:02M HLA-B*13:01H HLA-B*13:02H
  source 1..9: note = Severe acute respiratory syndrome coronavirus 2
QVVDADSKI

SEQ ID NO: 2817 - protein, 9 aa, Severe acute respiratory syndrome-related coronavirus
  REGION 1..9: note = Table A: HLA-A*02:07H HLA-C*08:02H
  source 1..9: note = Severe acute respiratory syndrome coronavirus 2
VVDADSKIV

SEQ ID NO: 2818 - protein, 9 aa, Severe acute respiratory syndrome-related coronavirus
  REGION 1..9: note = Table A: HLA-A*11:303H HLA-B*08:01H HLA-C*04:03H HLA-B*53:01M HLA-A*68:02H HLA-B*35:03M HLA-C*15:05M HLA-A*02:07H HLA-B*35:01M HLA-B*35:02H HLA-B*35:08M HLA-B*51:01H HLA-C*17:01H HLA-B*35:07H HLA-C*08:01M
  REGION 1..9: note = CONT. FROM ABOVE: HLA-C*08:02M HLA-B*35:12H HLA-B*38:01H HLA- B*38:02M HLA-B*39:01H HLA-B*07:05H HLA-C*05:01M
  source 1..9: note = Severe acute respiratory syndrome coronavirus 2
DADSKIVQL

SEQ ID NO: 2819 - protein, 9 aa, Severe acute respiratory syndrome-related coronavirus
  REGION 1..9: note = Table A: HLA-B*38:02M HLA-B*15:03M
  source 1..9: note = Severe acute respiratory syndrome coronavirus 2
SKIVQLSEI

SEQ ID NO: 2820 - protein, 9 aa, Severe acute respiratory syndrome-related coronavirus
  REGION 1..9: note = Table A: HLA-C*15:05H HLA-B*35:02H HLA-B*15:02H HLA-C*07:04H
  source 1..9: note = Severe acute respiratory syndrome coronavirus 2
IVQLSEISM

SEQ ID NO: 2821 - protein, 9 aa, Severe acute respiratory syndrome-related coronavirus
  REGION 1..9: note = Table A: HLA-B*45:01M HLA-B*40:06H HLA-B*50:01M
  source 1..9: note = Severe acute respiratory syndrome coronavirus 2
SEISMDNSP

SEQ ID NO: 2822 - protein, 9 aa, Severe acute respiratory syndrome-related coronavirus
  REGION 1..9: note = Table A: HLA-B*58:01M HLA-B*58:02H HLA-A*11:303H HLA-B*57:01H HLA-B*46:01H HLA-C*03:03M HLA-A*02:11H HLA-C*03:02H HLA-C*03:04H HLA-A*68:02H HLA-B*35:03H HLA-C*15:05M HLA-C*15:02M HLA-A*02:04H HLA-A*02:05H
  REGION 1..9: note = CONT. FROM ABOVE: HLA-A*02:06H HLA-A*02:01M HLA-A*02:02H HLA- C*07:27M HLA-A*24:02H HLA-C*17:01H HLA-C*08:01M HLA-A*23:01H HLA-B*38:02H HLA-B*39:01H HLA-B*07:05H HLA-B*57:03M HLA-C*07 :04H
  source 1..9: note = Severe acute respiratory syndrome coronavirus 2
ISMDNSPNL

SEQ ID NO: 2823 - protein, 9 aa, Severe acute respiratory syndrome-related coronavirus
  REGION 1..9: note = Table A: HLA-B*44:03H HLA-B*38:02H
  source 1..9: note = Severe acute respiratory syndrome coronavirus 2
MDNSPNLAW

SEQ ID NO: 2824 - protein, 9 aa, Severe acute respiratory syndrome-related coronavirus
  REGION 1..9: note = Table A: HLA-C*15:05H
  source 1..9: note = Severe acute respiratory syndrome coronavirus 2
SPNLAWPLI

SEQ ID NO: 2825 - protein, 9 aa, Severe acute respiratory syndrome-related coronavirus
  REGION 1..9: note = Table A: HLA-B*56:01H HLA-A*02:11H HLA-B*55:02H HLA-B*54:01M
  source 1..9: note = Severe acute respiratory syndrome coronavirus 2
LAWPLIVTA

SEQ ID NO: 2826 - protein, 9 aa, Severe acute respiratory syndrome-related coronavirus
  REGION 1..9: note = Table A: HLA-C*14:02M HLA-C*14:03H HLA-C*04:01H HLA-C*04:03M HLA-C*15:05H HLA-C*01:02M HLA-A*02:07H HLA-A*24:02H HLA-A*24:07M HLA-A*23:01H HLA-B*07:05H
  source 1..9: note = Severe acute respiratory syndrome coronavirus 2
AWPLIVTAL

SEQ ID NO: 2827 - protein, 9 aa, Severe acute respiratory syndrome-related coronavirus
  REGION 1..9: note = Table A: HLA-A*34:01H
  source 1..9: note = Severe acute respiratory syndrome coronavirus 2
WPLIVTALR

SEQ ID NO: 2828 - protein, 9 aa, Severe acute respiratory syndrome-related coronavirus
  REGION 1..9: note = Table A: HLA-C*15:05H HLA-B*51:01M HLA-B*38:02H HLA-B*07:05H
  source 1..9: note = Severe acute respiratory syndrome coronavirus 2
TALRANSAV

SEQ ID NO: 2829 - protein, 9 aa, Severe acute respiratory syndrome-related coronavirus
  REGION 1..9: note = Table A: HLA-A*03:01H
  source 1..9: note = Severe acute respiratory syndrome coronavirus 2
ALRANSAVK

SEQ ID NO: 2830 - protein, 9 aa, Severe acute respiratory syndrome-related coronavirus
  REGION 1..9: note = Table A: HLA-C*06:02H HLA-B*27:05H HLA-B*14:02H HLA-B*14:01H HLA-B*38:02H HLA-B*39:01H
  source 1..9: note = Severe acute respiratory syndrome coronavirus 2
LRANSAVKL

SEQ ID NO: 2831 - protein, 9 aa, Severe acute respiratory syndrome-related coronavirus
  REGION 1..9: note = Table A: HLA-B*42:01M HLA-A*11:303H HLA-B*46:01H HLA-B*08:01M HLA-A*30:01H HLA-C*15:05M HLA-C*01:02H HLA-A*02:05M HLA-A*02:08M HLA-B*14:01H HLA-A*02:02H HLA-A*02:03H HLA-C*08:01H HLA-B*38:02M HLA-B*07:02M
  REGION 1..9: note = CONT. FROM ABOVE: HLA-B*07:04H HLA-B*15:01M HLA-B*15:02H HLA- B*07:05H HLA-B*41:02H
  source 1..9: note = Severe acute respiratory syndrome coronavirus 2
AVKLQNNEL

SEQ ID NO: 2832 - protein, 9 aa, Severe acute respiratory syndrome-related coronavirus
  REGION 1..9: note = Table A: HLA-B*39:06H
  source 1..9: note = Severe acute respiratory syndrome coronavirus 2
QNNELSPVA

SEQ ID NO: 2833 - protein, 9 aa, Severe acute respiratory syndrome-related coronavirus
  REGION 1..9: note = Table A: HLA-C*04:03H HLA-B*35:03H HLA-B*35:02H HLA-C*08:02H HLA-B*35:12M HLA-B*39:01M
  source 1..9: note = Severe acute respiratory syndrome coronavirus 2
NNELSPVAL

SEQ ID NO: 2834 - protein, 9 aa, Severe acute respiratory syndrome-related coronavirus
  REGION 1..9: note = Table A: HLA-A*33:01H HLA-A*33:03H HLA-A*68:01H HLA-A*34:01H HLA-A*34:02H
  source 1..9: note = Severe acute respiratory syndrome coronavirus 2
NELSPVALR

SEQ ID NO: 2835 - protein, 9 aa, Severe acute respiratory syndrome-related coronavirus
  REGION 1..9: note = Table A: HLA-A*34:01H
  source 1..9: note = Severe acute respiratory syndrome coronavirus 2
ELSPVALRQ

SEQ ID NO: 2836 - protein, 9 aa, Severe acute respiratory syndrome-related coronavirus
  REGION 1..9: note = Table A: HLA-C*14:03H HLA-C*01:02M
  source 1..9: note = Severe acute respiratory syndrome coronavirus 2
LSPVALRQM

SEQ ID NO: 2837 - protein, 9 aa, Severe acute respiratory syndrome-related coronavirus
  REGION 1..9: note = Table A: HLA-B*38:02H
  source 1..9: note = Severe acute respiratory syndrome coronavirus 2
CAAGTTQTA

SEQ ID NO: 2838 - protein, 9 aa, Severe acute respiratory syndrome-related coronavirus
  REGION 1..9: note = Table A: HLA-C*15:05H
  source 1..9: note = Severe acute respiratory syndrome coronavirus 2
AAGTTQTAC

SEQ ID NO: 2839 - protein, 9 aa, Severe acute respiratory syndrome-related coronavirus
  REGION 1..9: note = Table A: HLA-A*11:303H HLA-B*35:03H HLA-B*35:01H HLA-B*35:02H HLA-B*35:08H HLA-C*08:01H HLA-B*35:12H HLA-B*38:02H
  source 1..9: note = Severe acute respiratory syndrome coronavirus 2
TACTDDNAL

SEQ ID NO: 2840 - protein, 9 aa, Severe acute respiratory syndrome-related coronavirus
  REGION 1..9: note = Table A: HLA-B*58:01M HLA-A*11:303H HLA-A*03:01M HLA-A*11:01M HLA-A*11:02H HLA-A*36:01H HLA-A*29:01H HLA-A*29:02M HLA-A*01:01H HLA-A*30:02H HLA-C*15:05H HLA-A*34:02M HLA-C*07:27H HLA-B*35:01H HLA-B*35:08H
  REGION 1..9: note = CONT. FROM ABOVE: HLA-B*38:02H HLA-B*15:01H HLA-B*39:01H HLA- B*07:05H
  source 1..9: note = Severe acute respiratory syndrome coronavirus 2
CTDDNALAY

SEQ ID NO: 2841 - protein, 9 aa, Severe acute respiratory syndrome-related coronavirus
  REGION 1..9: note = Table A: HLA-A*36:01H
  source 1..9: note = Severe acute respiratory syndrome coronavirus 2
TDDNALAYY

SEQ ID NO: 2842 - protein, 9 aa, Severe acute respiratory syndrome-related coronavirus
  REGION 1..9: note = Table A: HLA-A*11:303H HLA-A*74:01H HLA-A*03:01M HLA-A*03:02M HLA-A*11:01H HLA-A*11:02H HLA-A*36:01H HLA-B*27:02H HLA-A*34:02H
  source 1..9: note = Severe acute respiratory syndrome coronavirus 2
ALAYYNTTK

SEQ ID NO: 2843 - protein, 9 aa, Severe acute respiratory syndrome-related coronavirus
  REGION 1..9: note = Table A: HLA-A*33:03M
  source 1..9: note = Severe acute respiratory syndrome coronavirus 2
YYNTTKGGR

SEQ ID NO: 2844 - protein, 9 aa, Severe acute respiratory syndrome-related coronavirus
  REGION 1..9: note = Table A: HLA-B*42:01H HLA-B*08:01H HLA-C*07:01H HLA-A*30:01H HLA-A*68:02H HLA-B*07:04H HLA-B*57:03H
  source 1..9: note = Severe acute respiratory syndrome coronavirus 2
TTKGGRFVL

SEQ ID NO: 2845 - protein, 9 aa, Severe acute respiratory syndrome-related coronavirus
  REGION 1..9: note = Table A: HLA-A*02:04H
  source 1..9: note = Severe acute respiratory syndrome coronavirus 2
FVLALLSDL

SEQ ID NO: 2846 - protein, 9 aa, Severe acute respiratory syndrome-related coronavirus
  REGION 1..9: note = Table A: HLA-A*02:04M HLA-A*02:01H
  source 1..9: note = Severe acute respiratory syndrome coronavirus 2
ALLSDLQDL

SEQ ID NO: 2847 - protein, 9 aa, Severe acute respiratory syndrome-related coronavirus
  REGION 1..9: note = Table A: HLA-B*58:01H HLA-A*36:01M HLA-B*57:01M HLA-A*01:01H HLA-C*04:03H HLA-B*53:01M HLA-C*08:02H HLA-B*38:02H HLA-B*57:03H HLA-B*13:01M
  source 1..9: note = Severe acute respiratory syndrome coronavirus 2
LSDLQDLKW

SEQ ID NO: 2848 - protein, 9 aa, Severe acute respiratory syndrome-related coronavirus
  REGION 1..9: note = Table A: HLA-A*33:01H HLA-A*33:03H
  source 1..9: note = Severe acute respiratory syndrome coronavirus 2
DLQDLKWAR

SEQ ID NO: 2849 - protein, 9 aa, Severe acute respiratory syndrome-related coronavirus
  REGION 1..9: note = Table A: HLA-A*33:01H
  source 1..9: note = Severe acute respiratory syndrome coronavirus 2
DLKWARFPK

SEQ ID NO: 2850 - protein, 9 aa, Severe acute respiratory syndrome-related coronavirus
  REGION 1..9: note = Table A: HLA-B*58:01H HLA-A*36:01H HLA-A*01:01H
  source 1..9: note = Severe acute respiratory syndrome coronavirus 2
KSDGTGTIY

SEQ ID NO: 2851 - protein, 9 aa, Severe acute respiratory syndrome-related coronavirus
  REGION 1..9: note = Table A: HLA-A*11:01H HLA-A*68:02H HLA-C*15:05H HLA-A*02:05H HLA-A*02:08H HLA-A*02:02H HLA-B*57:03H
  source 1..9: note = Severe acute respiratory syndrome coronavirus 2
GTGTIYTEL

SEQ ID NO: 2852 - protein, 9 aa, Severe acute respiratory syndrome-related coronavirus
  REGION 1..9: note = Table A: HLA-B*44:05M HLA-B*44:03H HLA-B*18:01H HLA-B*37:01H HLA-B*40:02H HLA-B*07:05H HLA-B*41:02H HLA-B*49:01H
  source 1..9: note = Severe acute respiratory syndrome coronavirus 2
TELEPPCRF

SEQ ID NO: 2853 - protein, 9 aa, Severe acute respiratory syndrome-related coronavirus
  REGION 1..9: note = Table A: HLA-A*11:303H HLA-A*03:01M HLA-A*03:02M HLA-A*11:01M HLA-A*11:02M HLA-A*36:01M HLA-A*30:02H HLA-A*34:02H HLA-C*07:27H HLA-A*66:01H
  source 1..9: note = Severe acute respiratory syndrome coronavirus 2
VTDTPKGPK

SEQ ID NO: 2854 - protein, 9 aa, Severe acute respiratory syndrome-related coronavirus
  REGION 1..9: note = Table A: HLA-A*34:02H
  source 1..9: note = Severe acute respiratory syndrome coronavirus 2
DTPKGPKVK

SEQ ID NO: 2855 - protein, 9 aa, Severe acute respiratory syndrome-related coronavirus
  REGION 1..9: note = Table A: HLA-A*30:02H HLA-B*35:01H HLA-B*35:07M HLA-B*38:02H HLA-B*07:04M HLA-B*15:02H HLA-B*15:11M
  source 1..9: note = Severe acute respiratory syndrome coronavirus 2
TPKGPKVKY

SEQ ID NO: 2856 - protein, 9 aa, Severe acute respiratory syndrome-related coronavirus
  REGION 1..9: note = Table A: HLA-B*08:01H HLA-B*07:04M
  source 1..9: note = Severe acute respiratory syndrome coronavirus 2
GPKVKYLYF

SEQ ID NO: 2857 - protein, 9 aa, Severe acute respiratory syndrome-related coronavirus
  REGION 1..9: note = Table A: HLA-A*23:01H
  source 1..9: note = Severe acute respiratory syndrome coronavirus 2
KYLYFIKGL

SEQ ID NO: 2858 - protein, 9 aa, Severe acute respiratory syndrome-related coronavirus
  REGION 1..9: note = Table A: HLA-C*14:02H HLA-C*14:03H HLA-C*04:03H HLA-A*02:11H HLA-C*01:02H HLA-A*02:04H HLA-A*02:05H HLA-A*02:02H HLA-A*24:02M HLA-C*17:01H HLA-A*24:07M HLA-A*23:01M HLA-B*38:02H
  source 1..9: note = Severe acute respiratory syndrome coronavirus 2
YFIKGLNNL

SEQ ID NO: 2859 - protein, 9 aa, Severe acute respiratory syndrome-related coronavirus
  REGION 1..9: note = Table A: HLA-A*02:02H
  source 1..9: note = Severe acute respiratory syndrome coronavirus 2
GLNNLNRGM

SEQ ID NO: 2860 - protein, 9 aa, Severe acute respiratory syndrome-related coronavirus
  REGION 1..9: note = Table A: HLA-B*08:01H HLA-B*14:02H HLA-B*14:01H
  source 1..9: note = Severe acute respiratory syndrome coronavirus 2
NNLNRGMVL

SEQ ID NO: 2861 - protein, 9 aa, Severe acute respiratory syndrome-related coronavirus
  REGION 1..9: note = Table A: HLA-C*07:01H HLA-B*14:02H HLA-B*14:01H HLA-B*39:01H
  source 1..9: note = Severe acute respiratory syndrome coronavirus 2
NRGMVLGSL

SEQ ID NO: 2862 - protein, 9 aa, Severe acute respiratory syndrome-related coronavirus
  REGION 1..9: note = Table A: HLA-B*50:01H
  source 1..9: note = Severe acute respiratory syndrome coronavirus 2
GMVLGSLAA

SEQ ID NO: 2863 - protein, 9 aa, Severe acute respiratory syndrome-related coronavirus
  REGION 1..9: note = Table A: HLA-A*02:01H HLA-B*38:02H HLA-B*54:01H
  source 1..9: note = Severe acute respiratory syndrome coronavirus 2
MVLGSLAAT

SEQ ID NO: 2864 - protein, 9 aa, Severe acute respiratory syndrome-related coronavirus
  REGION 1..9: note = Table A: HLA-A*02:11H HLA-A*02:01M HLA-A*02:02H HLA-A*02:03M HLA-B*38:02H HLA-B*13:02H
  source 1..9: note = Severe acute respiratory syndrome coronavirus 2
VLGSLAATV

SEQ ID NO: 2865 - protein, 9 aa, Severe acute respiratory syndrome-related coronavirus
  REGION 1..9: note = Table A: HLA-B*48:01H HLA-A*11:303H HLA-A*11:01H HLA-A*11:02H HLA-C*15:05M HLA-C*15:02H HLA-C*17:01H HLA-B*40:02H HLA-B*57:03M HLA-B*13:02H
  source 1..9: note = Severe acute respiratory syndrome coronavirus 2
GSLAATVRL

SEQ ID NO: 2866 - protein, 9 aa, Severe acute respiratory syndrome-related coronavirus
  REGION 1..9: note = Table A: HLA-B*56:01H HLA-C*12:05H HLA-A*02:11H HLA-B*55:02H HLA-A*68:02H HLA-B*38:02H HLA-B*54:01M HLA-B*13:02H
  source 1..9: note = Severe acute respiratory syndrome coronavirus 2
LAATVRLQA

SEQ ID NO: 2867 - protein, 9 aa, Severe acute respiratory syndrome-related coronavirus
  REGION 1..9: note = Table A: HLA-B*55:01H
  source 1..9: note = Severe acute respiratory syndrome coronavirus 2
TVRLQAGNA

SEQ ID NO: 2868 - protein, 9 aa, Severe acute respiratory syndrome-related coronavirus
  REGION 1..9: note = Table A: HLA-B*14:01M HLA-B*39:01H
  source 1..9: note = Severe acute respiratory syndrome coronavirus 2
VRLQAGNAT

SEQ ID NO: 2869 - protein, 9 aa, Severe acute respiratory syndrome-related coronavirus
  REGION 1..9: note = Table A: HLA-A*02:05M HLA-A*02:08H HLA-A*02:03H HLA-B*38:02H HLA-B*39:01H HLA-B*13:02H
  source 1..9: note = Severe acute respiratory syndrome coronavirus 2
LQAGNATEV

SEQ ID NO: 2870 - protein, 9 aa, Severe acute respiratory syndrome-related coronavirus
  REGION 1..9: note = Table A: HLA-B*44:05H HLA-B*45:01H HLA-B*40:02M HLA-B*07:05H HLA-B*41:02M HLA-B*49:01H HLA-B*50:01M
  source 1..9: note = Severe acute respiratory syndrome coronavirus 2
TEVPANSTV

SEQ ID NO: 2871 - protein, 9 aa, Severe acute respiratory syndrome-related coronavirus
  REGION 1..9: note = Table A: HLA-A*25:01H HLA-A*26:01H HLA-A*26:02H HLA-A*26:03M HLA-A*68:01H HLA-A*68:02H HLA-C*15:05H HLA-A*34:01H HLA-A*34:02H HLA-B*39:01H HLA-A*66:01H
  source 1..9: note = Severe acute respiratory syndrome coronavirus 2
EVPANSTVL

SEQ ID NO: 2872 - protein, 9 aa, Severe acute respiratory syndrome-related coronavirus
  REGION 1..9: note = Table A: HLA-C*15:05H HLA-B*35:01H
  source 1..9: note = Severe acute respiratory syndrome coronavirus 2
PANSTVLSF

SEQ ID NO: 2873 - protein, 9 aa, Severe acute respiratory syndrome-related coronavirus
  REGION 1..9: note = Table A: HLA-A*25:01H
  source 1..9: note = Severe acute respiratory syndrome coronavirus 2
STVLSFCAF

SEQ ID NO: 2874 - protein, 9 aa, Severe acute respiratory syndrome-related coronavirus
  REGION 1..9: note = Table A: HLA-A*03:02H HLA-A*34:02H
  source 1..9: note = Severe acute respiratory syndrome coronavirus 2
CAFAVDAAK

SEQ ID NO: 2875 - protein, 9 aa, Severe acute respiratory syndrome-related coronavirus
  REGION 1..9: note = Table A: HLA-A*11:303H HLA-C*16:01H HLA-C*16:04H HLA-B*46:01H HLA-A*26:01H HLA-A*26:03H HLA-C*03:03M HLA-C*12:05H HLA-B*53:01H HLA-C*03:02H HLA-C*03:04M HLA-B*35:03H HLA-C*12:02H HLA-C*12:03H HLA-A*34:01M
  REGION 1..9: note = CONT. FROM ABOVE: HLA-A*34:02H HLA-C*07:27M HLA-B*35:01H HLA- B*35:08M HLA-B*35:07H HLA-B*38:02H HLA-B*15:01M HLA-B*15:02H HLA-B*15:03H HLA-B*07:05H HLA-C*02:02M HLA-B*15:11M HLA-A*66 :01H
  source 1..9: note = Severe acute respiratory syndrome coronavirus 2
FAVDAAKAY

SEQ ID NO: 2876 - protein, 9 aa, Severe acute respiratory syndrome-related coronavirus
  REGION 1..9: note = Table A: HLA-A*11:303M HLA-A*74:01H HLA-A*03:01M HLA-A*03:02H HLA-A*11:01H HLA-A*11:02H HLA-A*36:01H HLA-A*30:02H HLA-A*34:02M HLA-C*07:27M HLA-A*31:01H
  source 1..9: note = Severe acute respiratory syndrome coronavirus 2
AVDAAKAYK

SEQ ID NO: 2877 - protein, 9 aa, Severe acute respiratory syndrome-related coronavirus
  REGION 1..9: note = Table A: HLA-A*26:01H HLA-B*35:01H
  source 1..9: note = Severe acute respiratory syndrome coronavirus 2
DAAKAYKDY

SEQ ID NO: 2878 - protein, 9 aa, Severe acute respiratory syndrome-related coronavirus
  REGION 1..9: note = Table A: HLA-B*42:01H HLA-B*58:02H HLA-C*16:01H HLA-B*08:01H HLA-A*02:11H HLA-A*30:02H HLA-A*68:02H HLA-A*02:05H HLA-A*02:02H HLA-C*08:01H HLA-B*38:02H HLA-B*07:04H HLA-B*41:02H HLA-B*57:03H HLA-C*02:02H
  source 1..9: note = Severe acute respiratory syndrome coronavirus 2
AAKAYKDYL

SEQ ID NO: 2879 - protein, 9 aa, Severe acute respiratory syndrome-related coronavirus
  REGION 1..9: note = Table A: HLA-A*02:03H HLA-B*38:02M
  source 1..9: note = Severe acute respiratory syndrome coronavirus 2
YLASGGQPI

SEQ ID NO: 2880 - protein, 9 aa, Severe acute respiratory syndrome-related coronavirus
  REGION 1..9: note = Table A: HLA-B*13:02H
  source 1..9: note = Severe acute respiratory syndrome coronavirus 2
GGQPITNCV

SEQ ID NO: 2881 - protein, 9 aa, Severe acute respiratory syndrome-related coronavirus
  REGION 1..9: note = Table A: HLA-B*35:03H HLA-C*15:05M HLA-B*35:01H HLA-B*35:07H HLA-B*07:05H
  source 1..9: note = Severe acute respiratory syndrome coronavirus 2
QPITNCVKM

SEQ ID NO: 2882 - protein, 9 aa, Severe acute respiratory syndrome-related coronavirus
  REGION 1..9: note = Table A: HLA-B*38:01H HLA-B*38:02H HLA-B*39:01H HLA-B*13:02H HLA-B*15:10H
  source 1..9: note = Severe acute respiratory syndrome coronavirus 2
THTGTGQAI

SEQ ID NO: 2883 - protein, 9 aa, Severe acute respiratory syndrome-related coronavirus
  REGION 1..9: note = Table A: HLA-C*15:05H HLA-B*51:01H
  source 1..9: note = Severe acute respiratory syndrome coronavirus 2
TGTGQAITV

SEQ ID NO: 2884 - protein, 9 aa, Severe acute respiratory syndrome-related coronavirus
  REGION 1..9: note = Table A: HLA-A*11:303H HLA-C*16:04H HLA-B*56:01H HLA-C*12:05H HLA-B*55:02M HLA-A*68:02H HLA-B*35:03H HLA-B*55:01H HLA-A*02:05M HLA-A*02:06H HLA-B*35:01H HLA-C*08:01H HLA-B*38:02H HLA-B*39:06H HLA-B*54:01M
  source 1..9: note = Severe acute respiratory syndrome coronavirus 2
QAITVTPEA

SEQ ID NO: 2885 - protein, 9 aa, Severe acute respiratory syndrome-related coronavirus
  REGION 1..9: note = Table A: HLA-B*53:01H HLA-B*35:03H HLA-B*35:01M HLA-B*35:02M HLA-B*35:08M HLA-B*35:07H HLA-B*35:12M HLA-B*38:02H HLA-B*39:01H
  source 1..9: note = Severe acute respiratory syndrome coronavirus 2
EANMDQESF

SEQ ID NO: 2886 - protein, 9 aa, Severe acute respiratory syndrome-related coronavirus
  REGION 1..9: note = Table A: HLA-B*45:01M HLA-B*49:01H HLA-B*50:01M
  source 1..9: note = Severe acute respiratory syndrome coronavirus 2
QESFGGASC

SEQ ID NO: 2887 - protein, 9 aa, Severe acute respiratory syndrome-related coronavirus
  REGION 1..9: note = Table A: HLA-A*11:01H HLA-A*11:02H HLA-A*34:02H
  source 1..9: note = Severe acute respiratory syndrome coronavirus 2
CHIDHPNPK

SEQ ID NO: 2888 - protein, 9 aa, Severe acute respiratory syndrome-related coronavirus
  REGION 1..9: note = Table A: HLA-B*44:05H HLA-B*18:01H HLA-B*37:01M HLA-B*40:02H HLA-B*07:05H HLA-B*41:02H HLA-C*07:04H
  source 1..9: note = Severe acute respiratory syndrome coronavirus 2
IDHPNPKGF

SEQ ID NO: 2889 - protein, 9 aa, Severe acute respiratory syndrome-related coronavirus
  REGION 1..9: note = Table A: HLA-A*29:02H HLA-A*30:02H
  source 1..9: note = Severe acute respiratory syndrome coronavirus 2
GFCDLKGKY

SEQ ID NO: 2890 - protein, 9 aa, Severe acute respiratory syndrome-related coronavirus
  REGION 1..9: note = Table A: HLA-B*08:01M HLA-B*38:02H
  source 1..9: note = Severe acute respiratory syndrome coronavirus 2
DLKGKYVQI

SEQ ID NO: 2891 - protein, 9 aa, Severe acute respiratory syndrome-related coronavirus
  REGION 1..9: note = Table A: HLA-B*48:01H HLA-B*39:06H HLA-B*15:03H
  source 1..9: note = Severe acute respiratory syndrome coronavirus 2
GKYVQIPTT

SEQ ID NO: 2892 - protein, 9 aa, Severe acute respiratory syndrome-related coronavirus
  REGION 1..9: note = Table A: HLA-A*24:02H HLA-A*23:01H HLA-B*40:06H
  source 1..9: note = Severe acute respiratory syndrome coronavirus 2
KYVQIPTTC

SEQ ID NO: 2893 - protein, 9 aa, Severe acute respiratory syndrome-related coronavirus
  REGION 1..9: note = Table A: HLA-B*38:02H HLA-B*54:01H
  source 1..9: note = Severe acute respiratory syndrome coronavirus 2
YVQIPTTCA

SEQ ID NO: 2894 - protein, 9 aa, Severe acute respiratory syndrome-related coronavirus
  REGION 1..9: note = Table A: HLA-B*58:01H HLA-A*11:303M HLA-B*44:05H HLA-C*04:03M HLA-C*03:03H HLA-A*02:11H HLA-C*03:04H HLA-A*68:02H HLA-B*35:03H HLA-C*15:05M HLA-C*15:02M HLA-A*02:04H HLA-A*02:06H HLA-A*02:07H HLA-A*02:01H
  REGION 1..9: note = CONT. FROM ABOVE: HLA-B*35:02M HLA-C*08:01M HLA-C*08:02H HLA- B*35:12H HLA-B*38:01H HLA-B*38:02M HLA-B*40:01M HLA-B*40:02H HLA-B*39:01H HLA-B*07:05H HLA-B*41:02H HLA-B*57:03H HLA-C*05 :01M HLA-B*13:01H HLA-C*07:04H
  source 1..9: note = Severe acute respiratory syndrome coronavirus 2
ANDPVGFTL

SEQ ID NO: 2895 - protein, 9 aa, Severe acute respiratory syndrome-related coronavirus
  REGION 1..9: note = Table A: HLA-A*34:02H
  source 1..9: note = Severe acute respiratory syndrome coronavirus 2
NDPVGFTLK

SEQ ID NO: 2896 - protein, 9 aa, Severe acute respiratory syndrome-related coronavirus
  REGION 1..9: note = Table A: HLA-B*51:01H HLA-B*52:01M
  source 1..9: note = Severe acute respiratory syndrome coronavirus 2
VGFTLKNTV

SEQ ID NO: 2897 - protein, 9 aa, Severe acute respiratory syndrome-related coronavirus
  REGION 1..9: note = Table A: HLA-B*08:01M HLA-A*02:11H HLA-A*02:04H HLA-A*02:05H HLA-B*14:01H HLA-A*02:01M HLA-A*02:02M HLA-A*02:03H HLA-B*38:02H HLA-B*13:02H
  source 1..9: note = Severe acute respiratory syndrome coronavirus 2
TLKNTVCTV

SEQ ID NO: 2898 - protein, 9 aa, Severe acute respiratory syndrome-related coronavirus
  REGION 1..9: note = Table A: HLA-B*37:01H HLA-B*41:02H
  source 1..9: note = Severe acute respiratory syndrome coronavirus 2
CDQLREPML

SEQ ID NO: 2899 - protein, 9 aa, Severe acute respiratory syndrome-related coronavirus
  REGION 1..9: note = Table A: HLA-B*38:02H
  source 1..9: note = Severe acute respiratory syndrome coronavirus 2
QLREPMLQS

SEQ ID NO: 2900 - protein, 9 aa, Severe acute respiratory syndrome-related coronavirus
  REGION 1..9: note = Table A: HLA-B*39:06H
  source 1..9: note = Severe acute respiratory syndrome coronavirus 2
LREPMLQSA

SEQ ID NO: 2901 - protein, 9 aa, Severe acute respiratory syndrome-related coronavirus
  REGION 1..9: note = Table A: HLA-B*55:02H HLA-B*54:01H
  source 1..9: note = Severe acute respiratory syndrome coronavirus 2
EPMLQSADA

SEQ ID NO: 2902 - protein, 9 aa, Severe acute respiratory syndrome-related coronavirus
  REGION 1..9: note = Table A: HLA-B*15:01H HLA-B*13:01H
  source 1..9: note = Severe acute respiratory syndrome coronavirus 2
LQSADAQSF

SEQ ID NO: 2903 - protein, 9 aa, Severe acute respiratory syndrome-related coronavirus
  REGION 1..9: note = Table A: HLA-C*15:05H HLA-B*38:02H
  source 1..9: note = Severe acute respiratory syndrome coronavirus 2
QSADAQSFL

SEQ ID NO: 2904 - protein, 9 aa, Severe acute respiratory syndrome-related coronavirus
  REGION 1..9: note = Table A: HLA-A*03:01H HLA-A*11:01H HLA-A*33:03H HLA-B*27:02H HLA-A*68:01H HLA-A*34:01H HLA-A*34:02H HLA-A*31:01H HLA-A*66:01H
  source 1..9: note = Severe acute respiratory syndrome coronavirus 2
ADAQSFLNR

SEQ ID NO: 2905 - protein, 9 aa, Severe acute respiratory syndrome-related coronavirus
  REGION 1..9: note = Table A: HLA-A*33:01M HLA-A*33:03H HLA-A*68:02M HLA-C*15:05M HLA-B*51:01H HLA-B*38:02H HLA-B*54:01H HLA-B*07:05H
  source 1..9: note = Severe acute respiratory syndrome coronavirus 2
DAQSFLNRV

SEQ ID NO: 2906 - protein, 9 aa, Severe acute respiratory syndrome-related coronavirus
  REGION 1..9: note = Table A: HLA-B*54:01H
  source 1..9: note = Severe acute respiratory syndrome coronavirus 2
QSFLNRVCG

SEQ ID NO: 2907 - protein, 9 aa, Severe acute respiratory syndrome-related coronavirus
  REGION 1..9: note = Table A: HLA-C*14:03H
  source 1..9: note = Severe acute respiratory syndrome coronavirus 2
SFLNRVCGV

SEQ ID NO: 2908 - protein, 9 aa, Severe acute respiratory syndrome-related coronavirus
  REGION 1..9: note = Table A: HLA-B*14:01M HLA-B*39:06H
  source 1..9: note = Severe acute respiratory syndrome coronavirus 2
NRVCGVSAA

SEQ ID NO: 2909 - protein, 9 aa, Severe acute respiratory syndrome-related coronavirus
  REGION 1..9: note = Table A: HLA-A*74:01M
  source 1..9: note = Severe acute respiratory syndrome coronavirus 2
RVCGVSAAR

SEQ ID NO: 2910 - protein, 9 aa, Severe acute respiratory syndrome-related coronavirus
  REGION 1..9: note = Table A: HLA-A*03:01H
  source 1..9: note = Severe acute respiratory syndrome coronavirus 2
GVSAARLTP

SEQ ID NO: 2911 - protein, 9 aa, Severe acute respiratory syndrome-related coronavirus
  REGION 1..9: note = Table A: HLA-B*35:03H HLA-B*35:01M HLA-B*35:08M HLA-B*39:01H
  source 1..9: note = Severe acute respiratory syndrome coronavirus 2
TGTSTDVVY

SEQ ID NO: 2912 - protein, 9 aa, Severe acute respiratory syndrome-related coronavirus
  REGION 1..9: note = Table A: HLA-A*11:303M HLA-A*74:01H HLA-A*03:01M HLA-A*03:02M HLA-A*11:01H HLA-A*11:02H HLA-A*36:01H HLA-B*57:01H HLA-A*33:01H HLA-A*33:03M HLA-A*26:03H HLA-A*30:02H HLA-A*68:01H HLA-A*68:02H HLA-A*34:01H
  REGION 1..9: note = CONT. FROM ABOVE: HLA-A*34:02M HLA-C*07:27M HLA-A*31:01H HLA- A*66:01M
  source 1..9: note = Severe acute respiratory syndrome coronavirus 2
GTSTDVVYR

SEQ ID NO: 2913 - protein, 9 aa, Severe acute respiratory syndrome-related coronavirus
  REGION 1..9: note = Table A: HLA-A*68:02M HLA-A*02:05H HLA-A*02:06H HLA-B*13:02H
  source 1..9: note = Severe acute respiratory syndrome coronavirus 2
TSTDVVYRA

SEQ ID NO: 2914 - protein, 9 aa, Severe acute respiratory syndrome-related coronavirus
  REGION 1..9: note = Table A: HLA-B*58:01H HLA-B*58:02H HLA-A*11:303H HLA-C*16:01H HLA-A*36:01H HLA-B*57:01H HLA-B*46:01H HLA-C*04:01M HLA-C*04:03H HLA-C*15:05H HLA-A*02:07H HLA-C*08:02M HLA-B*07:05H HLA-B*57:03M HLA-C*05:01H
  source 1..9: note = Severe acute respiratory syndrome coronavirus 2
STDVVYRAF

SEQ ID NO: 2915 - protein, 9 aa, Severe acute respiratory syndrome-related coronavirus
  REGION 1..9: note = Table A: HLA-A*36:01H HLA-A*29:02H HLA-A*30:02H HLA-B*35:07H HLA-B*38:02H
  source 1..9: note = Severe acute respiratory syndrome coronavirus 2
VVYRAFDIY

SEQ ID NO: 2916 - protein, 9 aa, Severe acute respiratory syndrome-related coronavirus
  REGION 1..9: note = Table A: HLA-C*04:01H HLA-C*04:03M HLA-A*02:07H HLA-C*08:02H
  source 1..9: note = Severe acute respiratory syndrome coronavirus 2
AFDIYNDKV

SEQ ID NO: 2917 - protein, 9 aa, Severe acute respiratory syndrome-related coronavirus
  REGION 1..9: note = Table A: HLA-B*50:01H
  source 1..9: note = Severe acute respiratory syndrome coronavirus 2
FDIYNDKVA

SEQ ID NO: 2918 - protein, 9 aa, Severe acute respiratory syndrome-related coronavirus
  REGION 1..9: note = Table A: HLA-C*14:02H HLA-C*14:03H HLA-B*44:05H HLA-A*33:03H HLA-B*46:01H HLA-A*26:03H HLA-A*29:01H HLA-A*29:02H HLA-C*04:01H HLA-C*04:03H HLA-C*07:01H HLA-C*07:02H HLA-B*27:02H HLA-A*30:02H HLA-C*15:05H HLA-A*02:02H
  REGION 1..9: note = CONT. FROM ABOVE: HLA-A*02:03H HLA-A*24:02H HLA-A*24:07H HLA- C*08:01H HLA-A*23:01H HLA-B*37:01H HLA-B*38:02H HLA-A*32:01H HLA-B*15:01H HLA-B*39:01H HLA-A*31:01H HLA-B*07:05H HLA-C*07 :04H
  source 1..9: note = Severe acute respiratory syndrome coronavirus 2
IYNDKVAGF

SEQ ID NO: 2919 - protein, 9 aa, Severe acute respiratory syndrome-related coronavirus
  REGION 1..9: note = Table A: HLA-B*58:02M HLA-A*74:01H HLA-A*02:11H HLA-A*68:02H HLA-C*15:02H HLA-A*02:05M HLA-A*02:08M HLA-A*02:02H HLA-B*07:04M HLA-B*57:03M
  source 1..9: note = Severe acute respiratory syndrome coronavirus 2
KVAGFAKFL

SEQ ID NO: 2920 - protein, 9 aa, Severe acute respiratory syndrome-related coronavirus
  REGION 1..9: note = Table A: HLA-A*11:01M HLA-A*11:02H HLA-A*36:01H HLA-A*34:02H
  source 1..9: note = Severe acute respiratory syndrome coronavirus 2
VAGFAKFLK

SEQ ID NO: 2921 - protein, 9 aa, Severe acute respiratory syndrome-related coronavirus
  REGION 1..9: note = Table A: HLA-B*40:06H HLA-B*13:02H
  source 1..9: note = Severe acute respiratory syndrome coronavirus 2
AGFAKFLKT

SEQ ID NO: 2922 - protein, 9 aa, Severe acute respiratory syndrome-related coronavirus
  REGION 1..9: note = Table A: HLA-B*18:01H
  source 1..9: note = Severe acute respiratory syndrome coronavirus 2
DDNLIDSYF

SEQ ID NO: 2923 - protein, 9 aa, Severe acute respiratory syndrome-related coronavirus
  REGION 1..9: note = Table A: HLA-A*02:11H HLA-A*68:02H HLA-A*02:04M HLA-A*02:05H HLA-A*02:06H HLA-A*02:07M HLA-A*02:01H HLA-A*02:02M HLA-A*02:03H HLA-C*08:01H HLA-B*38:02M HLA-B*40:06H HLA-B*13:02H
  source 1..9: note = Severe acute respiratory syndrome coronavirus 2
NLIDSYFVV

SEQ ID NO: 2924 - protein, 9 aa, Severe acute respiratory syndrome-related coronavirus
  REGION 1..9: note = Table A: HLA-A*03:02H HLA-A*11:01H HLA-A*11:02M HLA-A*36:01M HLA-A*34:02H
  source 1..9: note = Severe acute respiratory syndrome coronavirus 2
LIDSYFVVK

SEQ ID NO: 2925 - protein, 9 aa, Severe acute respiratory syndrome-related coronavirus
  REGION 1..9: note = Table A: HLA-A*33:01H HLA-A*68:01H
  source 1..9: note = Severe acute respiratory syndrome coronavirus 2
IDSYFVVKR

SEQ ID NO: 2926 - protein, 9 aa, Severe acute respiratory syndrome-related coronavirus
  REGION 1..9: note = Table A: HLA-A*34:02M
  source 1..9: note = Severe acute respiratory syndrome coronavirus 2
DSYFVVKRH

SEQ ID NO: 2927 - protein, 9 aa, Severe acute respiratory syndrome-related coronavirus
  REGION 1..9: note = Table A: HLA-C*14:02M HLA-C*14:03M HLA-C*16:01H HLA-A*29:02H HLA-B*08:01H HLA-C*04:03H HLA-A*24:02M HLA-A*24:07H HLA-A*23:01M
  source 1..9: note = Severe acute respiratory syndrome coronavirus 2
YFVVKRHTF

SEQ ID NO: 2928 - protein, 9 aa, Severe acute respiratory syndrome-related coronavirus
  REGION 1..9: note = Table A: HLA-B*15:03M
  source 1..9: note = Severe acute respiratory syndrome coronavirus 2
VKRHTFSNY

SEQ ID NO: 2929 - protein, 9 aa, Severe acute respiratory syndrome-related coronavirus
  REGION 1..9: note = Table A: HLA-A*68:02H HLA-C*15:05H HLA-B*52:01H HLA-B*38:02H
  source 1..9: note = Severe acute respiratory syndrome coronavirus 2
SNYQHEETI

SEQ ID NO: 2930 - protein, 9 aa, Severe acute respiratory syndrome-related coronavirus
  REGION 1..9: note = Table A: HLA-B*38:01H HLA-B*38:02H HLA-B*39:01H HLA-B*15:10M
  source 1..9: note = Severe acute respiratory syndrome coronavirus 2
QHEETIYNL

SEQ ID NO: 2931 - protein, 9 aa, Severe acute respiratory syndrome-related coronavirus
  REGION 1..9: note = Table A: HLA-B*44:05H HLA-A*68:02H HLA-B*38:02H HLA-B*40:01H HLA-B*40:02M HLA-B*41:02H HLA-B*49:01H
  source 1..9: note = Severe acute respiratory syndrome coronavirus 2
HEETIYNLL

SEQ ID NO: 2932 - protein, 9 aa, Severe acute respiratory syndrome-related coronavirus
  REGION 1..9: note = Table A: HLA-A*02:11H HLA-A*02:01H
  source 1..9: note = Severe acute respiratory syndrome coronavirus 2
NLLKDCPAV

SEQ ID NO: 2933 - protein, 9 aa, Severe acute respiratory syndrome-related coronavirus
  REGION 1..9: note = Table A: HLA-A*02:01H HLA-A*02:02H HLA-A*02:03H HLA-B*38:02H
  source 1..9: note = Severe acute respiratory syndrome coronavirus 2
LLKDCPAVA

SEQ ID NO: 2934 - protein, 9 aa, Severe acute respiratory syndrome-related coronavirus
  REGION 1..9: note = Table A: HLA-B*07:02H HLA-B*07:05H
  source 1..9: note = Severe acute respiratory syndrome coronavirus 2
CPAVAKHDF

SEQ ID NO: 2935 - protein, 9 aa, Severe acute respiratory syndrome-related coronavirus
  REGION 1..9: note = Table A: HLA-A*03:02H HLA-A*11:01H HLA-A*11:02M HLA-C*07:27H
  source 1..9: note = Severe acute respiratory syndrome coronavirus 2
AVAKHDFFK

SEQ ID NO: 2936 - protein, 9 aa, Severe acute respiratory syndrome-related coronavirus
  REGION 1..9: note = Table A: HLA-B*57:03H
  source 1..9: note = Severe acute respiratory syndrome coronavirus 2
VAKHDFFKF

SEQ ID NO: 2937 - protein, 9 aa, Severe acute respiratory syndrome-related coronavirus
  REGION 1..9: note = Table A: HLA-B*38:02M
  source 1..9: note = Severe acute respiratory syndrome coronavirus 2
KHDFFKFRI

SEQ ID NO: 2938 - protein, 9 aa, Severe acute respiratory syndrome-related coronavirus
  REGION 1..9: note = Table A: HLA-A*11:02H HLA-A*33:01H HLA-A*33:03H HLA-A*68:01H HLA-B*37:01H HLA-A*31:01H
  source 1..9: note = Severe acute respiratory syndrome coronavirus 2
GDMVPHISR

SEQ ID NO: 2939 - protein, 9 aa, Severe acute respiratory syndrome-related coronavirus
  REGION 1..9: note = Table A: HLA-A*33:03H HLA-A*26:03H HLA-A*68:01H HLA-A*34:01M HLA-A*34:02M HLA-A*66:01M
  source 1..9: note = Severe acute respiratory syndrome coronavirus 2
MVPHISRQR

SEQ ID NO: 2940 - protein, 9 aa, Severe acute respiratory syndrome-related coronavirus
  REGION 1..9: note = Table A: HLA-C*15:05H HLA-B*07:02H HLA-B*07:04M
  source 1..9: note = Severe acute respiratory syndrome coronavirus 2
VPHISRQRL

SEQ ID NO: 2941 - protein, 9 aa, Severe acute respiratory syndrome-related coronavirus
  REGION 1..9: note = Table A: HLA-B*07:04H HLA-B*15:01H HLA-B*15:03H HLA-B*13:02H
  source 1..9: note = Severe acute respiratory syndrome coronavirus 2
RQRLTKYTM

SEQ ID NO: 2942 - protein, 9 aa, Severe acute respiratory syndrome-related coronavirus
  REGION 1..9: note = Table A: HLA-A*36:01H HLA-A*30:02H
  source 1..9: note = Severe acute respiratory syndrome coronavirus 2
KYTMADLVY

SEQ ID NO: 2943 - protein, 9 aa, Severe acute respiratory syndrome-related coronavirus
  REGION 1..9: note = Table A: HLA-A*68:02H HLA-A*02:01H
  source 1..9: note = Severe acute respiratory syndrome coronavirus 2
YTMADLVYA

SEQ ID NO: 2944 - protein, 9 aa, Severe acute respiratory syndrome-related coronavirus
  REGION 1..9: note = Table A: HLA-B*48:01H HLA-A*11:303H HLA-C*16:04H HLA-A*29:01H HLA-A*29:02H HLA-C*07:01H HLA-A*02:11H HLA-A*68:02M HLA-B*35:03M HLA-C*15:05H HLA-A*02:04H HLA-A*02:05H HLA-A*02:06H HLA-A*02:07M HLA-A*02:08H
  REGION 1..9: note = CONT. FROM ABOVE: HLA-B*14:01M HLA-A*02:01H HLA-A*02:02H HLA- A*02:03M HLA-B*35:01M HLA-C*08:01H HLA-B*38:01H HLA-B*38:02H HLA-A*32:01H HLA-B*15:01H HLA-B*15:02H HLA-B*39:01M HLA-B*07 :05M HLA-B*13:02H
  source 1..9: note = Severe acute respiratory syndrome coronavirus 2
TMADLVYAL

SEQ ID NO: 2945 - protein, 9 aa, Severe acute respiratory syndrome-related coronavirus
  REGION 1..9: note = Table A: HLA-A*33:03H HLA-A*68:01H HLA-A*34:01H HLA-A*34:02H HLA-A*66:01H
  source 1..9: note = Severe acute respiratory syndrome coronavirus 2
MADLVYALR

SEQ ID NO: 2946 - protein, 9 aa, Severe acute respiratory syndrome-related coronavirus
  REGION 1..9: note = Table A: HLA-A*11:303M HLA-B*57:01H HLA-A*25:01H HLA-B*46:01H HLA-A*26:01M HLA-A*26:02H HLA-A*29:01H HLA-A*29:02H HLA-B*08:01H HLA-B*18:01H HLA-C*03:02H HLA-A*30:02M HLA-C*12:02H HLA-C*12:03H HLA-A*02:04H
  REGION 1..9: note = CONT. FROM ABOVE: HLA-A*02:02H HLA-A*02:03M HLA-B*35:01M HLA- B*35:07H HLA-B*38:02H HLA-A*32:01H HLA-B*15:01H HLA-B*15:02H HLA-B*15:03M HLA-B*07:05H HLA-C*02:02H HLA-B*15:11H
  source 1..9: note = Severe acute respiratory syndrome coronavirus 2
TLKEILVTY

SEQ ID NO: 2947 - protein, 9 aa, Severe acute respiratory syndrome-related coronavirus
  REGION 1..9: note = Table A: HLA-B*45:01H HLA-B*40:06H HLA-B*50:01H
  source 1..9: note = Severe acute respiratory syndrome coronavirus 2
KEILVTYNC

SEQ ID NO: 2948 - protein, 9 aa, Severe acute respiratory syndrome-related coronavirus
  REGION 1..9: note = Table A: HLA-B*40:02H
  source 1..9: note = Severe acute respiratory syndrome coronavirus 2
YDFVENPDI

SEQ ID NO: 2949 - protein, 9 aa, Severe acute respiratory syndrome-related coronavirus
  REGION 1..9: note = Table A: HLA-B*39:01H
  source 1..9: note = Severe acute respiratory syndrome coronavirus 2
DFVENPDIL

SEQ ID NO: 2950 - protein, 9 aa, Severe acute respiratory syndrome-related coronavirus
  REGION 1..9: note = Table A: HLA-A*68:01H HLA-A*34:01M HLA-A*34:02H HLA-A*66:01M
  source 1..9: note = Severe acute respiratory syndrome coronavirus 2
FVENPDILR

SEQ ID NO: 2951 - protein, 9 aa, Severe acute respiratory syndrome-related coronavirus
  REGION 1..9: note = Table A: HLA-B*44:02H HLA-B*44:05M HLA-C*16:04H HLA-C*06:02H HLA-B*45:01M HLA-B*44:03M HLA-B*18:01H HLA-A*68:02H HLA-C*15:05H HLA-C*15:02M HLA-A*02:04H HLA-A*02:05H HLA-A*02:06H HLA-A*02:07H HLA-A*02:02H HLA-A*02:03H
  REGION 1..9: note = CONT. FROM ABOVE: HLA-B*51:01H HLA-B*52:01H HLA-C*08:01H HLA- B*37:01H HLA-B*38:02M HLA-B*40:01H HLA-B*40:02H HLA-B*40:06M HLA-B*07:05H HLA-B*41:02M HLA-B*13:02H HLA-B*49:01H HLA-C*07 :04M HLA-B*50:01M
  source 1..9: note = Severe acute respiratory syndrome coronavirus 2
VENPDILRV

SEQ ID NO: 2952 - protein, 9 aa, Severe acute respiratory syndrome-related coronavirus
  REGION 1..9: note = Table A: HLA-A*26:01H
  source 1..9: note = Severe acute respiratory syndrome coronavirus 2
ENPDILRVY

SEQ ID NO: 2953 - protein, 9 aa, Severe acute respiratory syndrome-related coronavirus
  REGION 1..9: note = Table A: HLA-B*54:01H
  source 1..9: note = Severe acute respiratory syndrome coronavirus 2
NPDILRVYA

SEQ ID NO: 2954 - protein, 9 aa, Severe acute respiratory syndrome-related coronavirus
  REGION 1..9: note = Table A: HLA-A*33:01H HLA-A*68:02H
  source 1..9: note = Severe acute respiratory syndrome coronavirus 2
DILRVYANL

SEQ ID NO: 2955 - protein, 9 aa, Severe acute respiratory syndrome-related coronavirus
  REGION 1..9: note = Table A: HLA-A*74:01M HLA-A*03:01H HLA-A*11:01H HLA-A*11:02H HLA-A*34:01H HLA-A*34:02H HLA-A*31:01H HLA-A*66:01H
  source 1..9: note = Severe acute respiratory syndrome coronavirus 2
RVYANLGER

SEQ ID NO: 2956 - protein, 9 aa, Severe acute respiratory syndrome-related coronavirus
  REGION 1..9: note = Table A: HLA-A*24:02H
  source 1..9: note = Severe acute respiratory syndrome coronavirus 2
VYANLGERV

SEQ ID NO: 2957 - protein, 9 aa, Severe acute respiratory syndrome-related coronavirus
  REGION 1..9: note = Table A: HLA-A*34:01H HLA-A*66:01H
  source 1..9: note = Severe acute respiratory syndrome coronavirus 2
YANLGERVR

SEQ ID NO: 2958 - protein, 9 aa, Severe acute respiratory syndrome-related coronavirus
  REGION 1..9: note = Table A: HLA-A*02:02H HLA-A*02:03M
  source 1..9: note = Severe acute respiratory syndrome coronavirus 2
NLGERVRQA

SEQ ID NO: 2959 - protein, 9 aa, Severe acute respiratory syndrome-related coronavirus
  REGION 1..9: note = Table A: HLA-B*40:02H HLA-B*41:02M
  source 1..9: note = Severe acute respiratory syndrome coronavirus 2
GERVRQALL

SEQ ID NO: 2960 - protein, 9 aa, Severe acute respiratory syndrome-related coronavirus
  REGION 1..9: note = Table A: HLA-B*58:01H HLA-B*58:02H HLA-C*16:01H HLA-B*57:01H HLA-B*46:01H HLA-B*08:01M HLA-B*53:01H HLA-C*15:05H HLA-C*12:02H HLA-B*35:01M HLA-B*35:07M HLA-B*38:02H HLA-B*15:01H HLA-B*15:02M HLA-B*07:05H HLA-B*57:03M
  REGION 1..9: note = CONT. FROM ABOVE: HLA-C*02:02H
  source 1..9: note = Severe acute respiratory syndrome coronavirus 2
QALLKTVQF

SEQ ID NO: 2961 - protein, 9 aa, Severe acute respiratory syndrome-related coronavirus
  REGION 1..9: note = Table A: HLA-A*02:11H HLA-A*02:04H HLA-A*02:01M HLA-A*02:02H HLA-B*38:02H HLA-B*13:02H
  source 1..9: note = Severe acute respiratory syndrome coronavirus 2
ALLKTVQFC

SEQ ID NO: 2962 - protein, 9 aa, Severe acute respiratory syndrome-related coronavirus
  REGION 1..9: note = Table A: HLA-B*37:01H
  source 1..9: note = Severe acute respiratory syndrome coronavirus 2
CDAMRNAGI

SEQ ID NO: 2963 - protein, 9 aa, Severe acute respiratory syndrome-related coronavirus
  REGION 1..9: note = Table A: HLA-C*15:05H HLA-B*51:01M
  source 1..9: note = Severe acute respiratory syndrome coronavirus 2
DAMRNAGIV

SEQ ID NO: 2964 - protein, 9 aa, Severe acute respiratory syndrome-related coronavirus
  REGION 1..9: note = Table A: HLA-C*06:02H HLA-B*27:05M HLA-A*68:02H HLA-B*14:01M HLA-B*38:02M HLA-B*39:06H HLA-B*39:01H
  source 1..9: note = Severe acute respiratory syndrome coronavirus 2
MRNAGIVGV

SEQ ID NO: 2965 - protein, 9 aa, Severe acute respiratory syndrome-related coronavirus
  REGION 1..9: note = Table A: HLA-B*48:01H HLA-C*07:01H HLA-C*15:05M HLA-C*15:02H HLA-B*07:04H
  source 1..9: note = Severe acute respiratory syndrome coronavirus 2
RNAGIVGVL

SEQ ID NO: 2966 - protein, 9 aa, Severe acute respiratory syndrome-related coronavirus
  REGION 1..9: note = Table A: HLA-A*11:303H HLA-B*44:05H HLA-C*03:03H HLA-C*12:05H HLA-C*03:04H HLA-C*15:05H HLA-C*15:02H HLA-C*17:01H HLA-C*08:01H HLA-B*38:02H HLA-B*40:02H HLA-B*41:02H HLA-C*07:04H
  source 1..9: note = Severe acute respiratory syndrome coronavirus 2
AGIVGVLTL

SEQ ID NO: 2967 - protein, 9 aa, Severe acute respiratory syndrome-related coronavirus
  REGION 1..9: note = Table A: HLA-B*38:02H HLA-B*39:01H
  source 1..9: note = Severe acute respiratory syndrome coronavirus 2
NQDLNGNWY

SEQ ID NO: 2968 - protein, 9 aa, Severe acute respiratory syndrome-related coronavirus
  REGION 1..9: note = Table A: HLA-B*50:01H
  source 1..9: note = Severe acute respiratory syndrome coronavirus 2
YDFGDFIQT

SEQ ID NO: 2969 - protein, 9 aa, Severe acute respiratory syndrome-related coronavirus
  REGION 1..9: note = Table A: HLA-C*08:02H
  source 1..9: note = Severe acute respiratory syndrome coronavirus 2
FGDFIQTTP

SEQ ID NO: 2970 - protein, 9 aa, Severe acute respiratory syndrome-related coronavirus
  REGION 1..9: note = Table A: HLA-B*38:02H HLA-B*13:02M
  source 1..9: note = Severe acute respiratory syndrome coronavirus 2
IQTTPGSGV

SEQ ID NO: 2971 - protein, 9 aa, Severe acute respiratory syndrome-related coronavirus
  REGION 1..9: note = Table A: HLA-B*56:01H HLA-B*55:02H HLA-B*35:03H HLA-C*15:05H HLA-B*55:01H HLA-B*54:01H
  source 1..9: note = Severe acute respiratory syndrome coronavirus 2
TPGSGVPVV

SEQ ID NO: 2972 - protein, 9 aa, Severe acute respiratory syndrome-related coronavirus
  REGION 1..9: note = Table A: HLA-B*58:01H HLA-A*30:02H HLA-B*35:01H HLA-B*35:08H HLA-B*35:07M HLA-B*38:02H HLA-B*39:01H HLA-B*07:05H HLA-B*15:11H
  source 1..9: note = Severe acute respiratory syndrome coronavirus 2
SGVPVVDSY

SEQ ID NO: 2973 - protein, 9 aa, Severe acute respiratory syndrome-related coronavirus
  REGION 1..9: note = Table A: HLA-A*30:02H
  source 1..9: note = Severe acute respiratory syndrome coronavirus 2
GVPVVDSYY

SEQ ID NO: 2974 - protein, 9 aa, Severe acute respiratory syndrome-related coronavirus
  REGION 1..9: note = Table A: HLA-C*04:03M HLA-A*02:07M HLA-C*05:01H
  source 1..9: note = Severe acute respiratory syndrome coronavirus 2
VVDSYYSLL

SEQ ID NO: 2975 - protein, 9 aa, Severe acute respiratory syndrome-related coronavirus
  REGION 1..9: note = Table A: HLA-A*24:02H HLA-A*24:07H HLA-C*08:01H
  source 1..9: note = Severe acute respiratory syndrome coronavirus 2
YYSLLMPIL

SEQ ID NO: 2976 - protein, 9 aa, Severe acute respiratory syndrome-related coronavirus
  REGION 1..9: note = Table A: HLA-A*11:303H HLA-A*02:11H HLA-C*15:05H HLA-A*02:04H HLA-A*02:07H HLA-B*14:01H HLA-A*02:01M HLA-A*02:03H HLA-C*08:01H HLA-B*38:02H HLA-B*40:06H HLA-B*13:02H
  source 1..9: note = Severe acute respiratory syndrome coronavirus 2
SLLMPILTL

SEQ ID NO: 2977 - protein, 9 aa, Severe acute respiratory syndrome-related coronavirus
  REGION 1..9: note = Table A: HLA-A*02:11H HLA-A*02:04H HLA-A*02:01H HLA-A*02:02H HLA-A*02:03H HLA-B*38:02H
  source 1..9: note = Severe acute respiratory syndrome coronavirus 2
LLMPILTLT

SEQ ID NO: 2978 - protein, 9 aa, Severe acute respiratory syndrome-related coronavirus
  REGION 1..9: note = Table A: HLA-B*56:01H HLA-B*55:02H HLA-C*15:05H HLA-B*55:01H HLA-B*39:06H HLA-B*54:01H HLA-B*50:01H
  source 1..9: note = Severe acute respiratory syndrome coronavirus 2
MPILTLTRA

SEQ ID NO: 2979 - protein, 9 aa, Severe acute respiratory syndrome-related coronavirus
  REGION 1..9: note = Table A: HLA-B*39:01H
  source 1..9: note = Severe acute respiratory syndrome coronavirus 2
TRALTAESH

SEQ ID NO: 2980 - protein, 9 aa, Severe acute respiratory syndrome-related coronavirus
  REGION 1..9: note = Table A: HLA-B*44:05M HLA-B*44:03H HLA-B*40:01H HLA-B*40:02H HLA-B*41:02M
  source 1..9: note = Severe acute respiratory syndrome coronavirus 2
AESHVDTDL

SEQ ID NO: 2981 - protein, 9 aa, Severe acute respiratory syndrome-related coronavirus
  REGION 1..9: note = Table A: HLA-B*38:02H HLA-B*39:01H HLA-B*15:10H
  source 1..9: note = Severe acute respiratory syndrome coronavirus 2
SHVDTDLTK

SEQ ID NO: 2982 - protein, 9 aa, Severe acute respiratory syndrome-related coronavirus
  REGION 1..9: note = Table A: HLA-A*68:02H HLA-B*38:02H
  source 1..9: note = Severe acute respiratory syndrome coronavirus 2
DTDLTKPYI

SEQ ID NO: 2983 - protein, 9 aa, Severe acute respiratory syndrome-related coronavirus
  REGION 1..9: note = Table A: HLA-C*15:05H HLA-B*07:04H
  source 1..9: note = Severe acute respiratory syndrome coronavirus 2
KPYIKWDLL

SEQ ID NO: 2984 - protein, 9 aa, Severe acute respiratory syndrome-related coronavirus
  REGION 1..9: note = Table A: HLA-C*04:03H
  source 1..9: note = Severe acute respiratory syndrome coronavirus 2
KWDLLKYDF

SEQ ID NO: 2985 - protein, 9 aa, Severe acute respiratory syndrome-related coronavirus
  REGION 1..9: note = Table A: HLA-A*36:01H HLA-C*04:01H HLA-C*04:03H HLA-C*07:02H HLA-A*02:07H HLA-A*24:07H HLA-C*08:01M HLA-C*08:02H HLA-B*38:02H HLA-B*40:01H HLA-C*05:01H HLA-B*13:01M
  source 1..9: note = Severe acute respiratory syndrome coronavirus 2
KYDFTEERL

SEQ ID NO: 2986 - protein, 9 aa, Severe acute respiratory syndrome-related coronavirus
  REGION 1..9: note = Table A: HLA-C*04:03H
  source 1..9: note = Severe acute respiratory syndrome coronavirus 2
FTEERLKLF

SEQ ID NO: 2987 - protein, 9 aa, Severe acute respiratory syndrome-related coronavirus
  REGION 1..9: note = Table A: HLA-B*38:02H
  source 1..9: note = Severe acute respiratory syndrome coronavirus 2
ERLKLFDRY

SEQ ID NO: 2988 - protein, 9 aa, Severe acute respiratory syndrome-related coronavirus
  REGION 1..9: note = Table A: HLA-B*58:02H HLA-B*07:04H
  source 1..9: note = Severe acute respiratory syndrome coronavirus 2
RLKLFDRYF

SEQ ID NO: 2989 - protein, 9 aa, Severe acute respiratory syndrome-related coronavirus
  REGION 1..9: note = Table A: HLA-A*74:01M HLA-A*03:01H HLA-A*36:01H HLA-A*29:02M HLA-A*30:02M HLA-A*02:02H HLA-A*32:01M HLA-B*15:03H
  source 1..9: note = Severe acute respiratory syndrome coronavirus 2
KLFDRYFKY

SEQ ID NO: 2990 - protein, 9 aa, Severe acute respiratory syndrome-related coronavirus
  REGION 1..9: note = Table A: HLA-C*14:02H HLA-C*14:03M HLA-B*46:01H HLA-A*29:02M HLA-A*30:02H HLA-A*24:07H
  source 1..9: note = Severe acute respiratory syndrome coronavirus 2
YFKYWDQTY

SEQ ID NO: 2991 - protein, 9 aa, Severe acute respiratory syndrome-related coronavirus
  REGION 1..9: note = Table A: HLA-B*15:03H
  source 1..9: note = Severe acute respiratory syndrome coronavirus 2
FKYWDQTYH

SEQ ID NO: 2992 - protein, 9 aa, Severe acute respiratory syndrome-related coronavirus
  REGION 1..9: note = Table A: HLA-B*14:01H HLA-B*38:02H HLA-B*13:02H
  source 1..9: note = Severe acute respiratory syndrome coronavirus 2
DQTYHPNCV

SEQ ID NO: 2993 - protein, 9 aa, Severe acute respiratory syndrome-related coronavirus
  REGION 1..9: note = Table A: HLA-B*38:02H
  source 1..9: note = Severe acute respiratory syndrome coronavirus 2
YHPNCVNCL

SEQ ID NO: 2994 - protein, 9 aa, Severe acute respiratory syndrome-related coronavirus
  REGION 1..9: note = Table A: HLA-A*02:11H
  source 1..9: note = Severe acute respiratory syndrome coronavirus 2
ILHCANFNV

SEQ ID NO: 2995 - protein, 9 aa, Severe acute respiratory syndrome-related coronavirus
  REGION 1..9: note = Table A: HLA-B*38:02H HLA-B*15:10H
  source 1..9: note = Severe acute respiratory syndrome coronavirus 2
LHCANFNVL

SEQ ID NO: 2996 - protein, 9 aa, Severe acute respiratory syndrome-related coronavirus
  REGION 1..9: note = Table A: HLA-B*38:02H HLA-B*15:02H
  source 1..9: note = Severe acute respiratory syndrome coronavirus 2
HCANFNVLF

SEQ ID NO: 2997 - protein, 9 aa, Severe acute respiratory syndrome-related coronavirus
  REGION 1..9: note = Table A: HLA-B*58:01H HLA-A*11:303H HLA-C*16:01H HLA-B*57:01H HLA-A*25:01M HLA-B*46:01M HLA-A*26:02H HLA-C*03:03M HLA-C*03:02H HLA-C*03:04M HLA-C*15:05M HLA-C*12:02M HLA-C*12:03H HLA-A*34:01H HLA-A*34:02H
  REGION 1..9: note = CONT. FROM ABOVE: HLA-C*07:27H HLA-B*38:02H HLA-B*15:01H HLA- B*07:05M HLA-B*57:03M HLA-C*02:02H HLA-A*66:01M
  source 1..9: note = Severe acute respiratory syndrome coronavirus 2
STVFPPTSF

SEQ ID NO: 2998 - protein, 9 aa, Severe acute respiratory syndrome-related coronavirus
  REGION 1..9: note = Table A: HLA-A*34:01M HLA-A*34:02H HLA-B*38:02H HLA-A*66:01M
  source 1..9: note = Severe acute respiratory syndrome coronavirus 2
TVFPPTSFG

SEQ ID NO: 2999 - protein, 9 aa, Severe acute respiratory syndrome-related coronavirus
  REGION 1..9: note = Table A: HLA-C*15:05H
  source 1..9: note = Severe acute respiratory syndrome coronavirus 2
FPPTSFGPL

SEQ ID NO: 3000 - protein, 9 aa, Severe acute respiratory syndrome-related coronavirus
  REGION 1..9: note = Table A: HLA-A*34:02H HLA-A*66:01H
  source 1..9: note = Severe acute respiratory syndrome coronavirus 2
PTSFGPLVR

SEQ ID NO: 3001 - protein, 9 aa, Severe acute respiratory syndrome-related coronavirus
  REGION 1..9: note = Table A: HLA-A*11:303H HLA-A*03:01H HLA-A*11:01M HLA-A*11:02M HLA-A*34:02M HLA-C*07:27H
  source 1..9: note = Severe acute respiratory syndrome coronavirus 2
TSFGPLVRK

SEQ ID NO: 3002 - protein, 9 aa, Severe acute respiratory syndrome-related coronavirus
  REGION 1..9: note = Table A: HLA-C*06:02H
  source 1..9: note = Severe acute respiratory syndrome coronavirus 2
SFGPLVRKI

SEQ ID NO: 3003 - protein, 9 aa, Severe acute respiratory syndrome-related coronavirus
  REGION 1..9: note = Table A: HLA-B*07:04H
  source 1..9: note = Severe acute respiratory syndrome coronavirus 2
GPLVRKIFV

SEQ ID NO: 3004 - protein, 9 aa, Severe acute respiratory syndrome-related coronavirus
  REGION 1..9: note = Table A: HLA-B*58:01H HLA-B*46:01H HLA-C*12:02H HLA-B*15:01H HLA-B*15:03H HLA-B*57:03M
  source 1..9: note = Severe acute respiratory syndrome coronavirus 2
KIFVDGVPF

SEQ ID NO: 3005 - protein, 9 aa, Severe acute respiratory syndrome-related coronavirus
  REGION 1..9: note = Table A: HLA-C*14:03H HLA-A*02:04H HLA-A*23:01H
  source 1..9: note = Severe acute respiratory syndrome coronavirus 2
IFVDGVPFV

SEQ ID NO: 3006 - protein, 9 aa, Severe acute respiratory syndrome-related coronavirus
  REGION 1..9: note = Table A: HLA-C*04:03H HLA-A*02:11M HLA-A*68:02M HLA-B*35:03M HLA-C*15:05H HLA-C*15:02H HLA-A*02:04H HLA-A*02:06H HLA-A*02:07H HLA-A*02:01H HLA-B*35:02H HLA-C*08:01M HLA-C*08:02M HLA-B*35:12H HLA-B*38:02M HLA-B*39:01H
  REGION 1..9: note = CONT. FROM ABOVE: HLA-C*05:01M HLA-B*13:02M
  source 1..9: note = Severe acute respiratory syndrome coronavirus 2
FVDGVPFVV

SEQ ID NO: 3007 - protein, 9 aa, Severe acute respiratory syndrome-related coronavirus
  REGION 1..9: note = Table A: HLA-B*46:01H HLA-A*29:01H HLA-A*29:02H HLA-B*18:01H HLA-B*27:02H HLA-B*53:01M HLA-A*30:02H HLA-C*15:05H HLA-B*35:01H HLA-B*35:08H HLA-B*35:07H HLA-B*38:02M HLA-B*15:01H HLA-B*15:02H HLA-B*15:03H HLA-B*07:05H
  REGION 1..9: note = CONT. FROM ABOVE: HLA-B*15:11H
  source 1..9: note = Severe acute respiratory syndrome coronavirus 2
VPFVVSTGY

SEQ ID NO: 3008 - protein, 9 aa, Severe acute respiratory syndrome-related coronavirus
  REGION 1..9: note = Table A: HLA-A*34:01H HLA-B*38:02H HLA-B*15:02H HLA-A*66:01H
  source 1..9: note = Severe acute respiratory syndrome coronavirus 2
FVVSTGYHF

SEQ ID NO: 3009 - protein, 9 aa, Severe acute respiratory syndrome-related coronavirus
  REGION 1..9: note = Table A: HLA-A*74:01M HLA-A*11:01H HLA-A*11:02H HLA-A*33:01H HLA-A*33:03H HLA-A*30:02H HLA-A*68:01H HLA-A*34:01H HLA-A*34:02H HLA-A*31:01H HLA-A*66:01M
  source 1..9: note = Severe acute respiratory syndrome coronavirus 2
VVSTGYHFR

SEQ ID NO: 3010 - protein, 9 aa, Severe acute respiratory syndrome-related coronavirus
  REGION 1..9: note = Table A: HLA-C*15:02H
  source 1..9: note = Severe acute respiratory syndrome coronavirus 2
STGYHFREL

SEQ ID NO: 3011 - protein, 9 aa, Severe acute respiratory syndrome-related coronavirus
  REGION 1..9: note = Table A: HLA-B*13:02H
  source 1..9: note = Severe acute respiratory syndrome coronavirus 2
GYHFRELGV

SEQ ID NO: 3012 - protein, 9 aa, Severe acute respiratory syndrome-related coronavirus
  REGION 1..9: note = Table A: HLA-B*38:02H HLA-B*15:10H
  source 1..9: note = Severe acute respiratory syndrome coronavirus 2
YHFRELGVV

SEQ ID NO: 3013 - protein, 9 aa, Severe acute respiratory syndrome-related coronavirus
  REGION 1..9: note = Table A: HLA-A*11:303H HLA-A*02:11H HLA-A*68:02H HLA-C*15:05H HLA-A*02:05M HLA-A*02:06M HLA-A*02:07H HLA-A*02:08M HLA-A*02:01H HLA-A*02:02M HLA-B*35:02M HLA-C*08:01M HLA-B*35:12H HLA-B*38:01H HLA-B*38:02H
  REGION 1..9: note = CONT. FROM ABOVE: HLA-B*57:03H HLA-B*13:01H HLA-C*07:04H
  source 1..9: note = Severe acute respiratory syndrome coronavirus 2
VVHNQDVNL

SEQ ID NO: 3014 - protein, 9 aa, Severe acute respiratory syndrome-related coronavirus
  REGION 1..9: note = Table A: HLA-B*38:02H
  source 1..9: note = Severe acute respiratory syndrome coronavirus 2
VHNQDVNLH

SEQ ID NO: 3015 - protein, 9 aa, Severe acute respiratory syndrome-related coronavirus
  REGION 1..9: note = Table A: HLA-B*39:01H
  source 1..9: note = Severe acute respiratory syndrome coronavirus 2
NQDVNLHSS

SEQ ID NO: 3016 - protein, 9 aa, Severe acute respiratory syndrome-related coronavirus
  REGION 1..9: note = Table A: HLA-A*68:01H
  source 1..9: note = Severe acute respiratory syndrome coronavirus 2
QDVNLHSSR

SEQ ID NO: 3017 - protein, 9 aa, Severe acute respiratory syndrome-related coronavirus
  REGION 1..9: note = Table A: HLA-A*33:01M HLA-A*33:03M HLA-A*26:03H HLA-A*68:01H HLA-A*68:02H HLA-C*15:05H HLA-A*34:01H HLA-A*34:02H HLA-B*38:02H HLA-B*15:02H HLA-A*66:01M
  source 1..9: note = Severe acute respiratory syndrome coronavirus 2
DVNLHSSRL

SEQ ID NO: 3018 - protein, 9 aa, Severe acute respiratory syndrome-related coronavirus
  REGION 1..9: note = Table A: HLA-B*38:02H HLA-B*15:02M
  source 1..9: note = Severe acute respiratory syndrome coronavirus 2
NLHSSRLSF

SEQ ID NO: 3019 - protein, 9 aa, Severe acute respiratory syndrome-related coronavirus
  REGION 1..9: note = Table A: HLA-B*07:04H
  source 1..9: note = Severe acute respiratory syndrome coronavirus 2
SSRLSFKEL

SEQ ID NO: 3020 - protein, 9 aa, Severe acute respiratory syndrome-related coronavirus
  REGION 1..9: note = Table A: HLA-B*27:05H HLA-B*14:02H HLA-B*38:02H
  source 1..9: note = Severe acute respiratory syndrome coronavirus 2
SRLSFKELL

SEQ ID NO: 3021 - protein, 9 aa, Severe acute respiratory syndrome-related coronavirus
  REGION 1..9: note = Table A: HLA-C*15:02M HLA-A*02:02H HLA-B*38:02H HLA-B*13:01H HLA-B*13:02M
  source 1..9: note = Severe acute respiratory syndrome coronavirus 2
RLSFKELLV

SEQ ID NO: 3022 - protein, 9 aa, Severe acute respiratory syndrome-related coronavirus
  REGION 1..9: note = Table A: HLA-B*58:01M HLA-B*58:02H HLA-A*36:01M HLA-B*57:01H HLA-B*46:01H HLA-A*29:02H HLA-C*03:02M HLA-C*15:05H HLA-C*12:03H HLA-C*15:02H HLA-B*35:07H HLA-B*38:02H HLA-B*15:01H HLA-B*15:02H HLA-B*15:03H HLA-B*57:03M
  REGION 1..9: note = CONT. FROM ABOVE: HLA-C*02:02H
  source 1..9: note = Severe acute respiratory syndrome coronavirus 2
LSFKELLVY

SEQ ID NO: 3023 - protein, 9 aa, Severe acute respiratory syndrome-related coronavirus
  REGION 1..9: note = Table A: HLA-A*11:303H HLA-A*02:11H HLA-B*35:03H HLA-C*15:05H HLA-A*02:06H HLA-B*35:01M HLA-B*35:02H HLA-B*35:08H HLA-B*35:07H HLA-C*08:01H HLA-B*35:12M HLA-B*38:02M HLA-B*15:01H HLA-B*15:02H HLA-B*39:01H
  REGION 1..9: note = CONT. FROM ABOVE: HLA-B*07:05H
  source 1..9: note = Severe acute respiratory syndrome coronavirus 2
LVYAADPAM

SEQ ID NO: 3024 - protein, 9 aa, Severe acute respiratory syndrome-related coronavirus
  REGION 1..9: note = Table A: HLA-C*14:03H HLA-A*24:02H
  source 1..9: note = Severe acute respiratory syndrome coronavirus 2
VYAADPAMH

SEQ ID NO: 3025 - protein, 9 aa, Severe acute respiratory syndrome-related coronavirus
  REGION 1..9: note = Table A: HLA-A*11:303M HLA-C*16:01H HLA-C*16:04M HLA-B*46:01M HLA-B*56:01M HLA-A*26:03H HLA-C*03:03M HLA-C*12:05M HLA-A*02:11M HLA-B*55:02M HLA-C*03:02M HLA-C*03:04M HLA-A*68:01H HLA-A*68:02M HLA-B*35:03H
  REGION 1..9: note = CONT. FROM ABOVE: HLA-C*15:05H HLA-B*55:01H HLA-C*12:02M HLA- C*12:03M HLA-A*02:05M HLA-A*02:06H HLA-A*02:02H HLA-A*02:03H HLA-A*34:01M HLA-A*34:02H HLA-C*07:27H HLA-B*35:01H HLA-B*35 :02H HLA-B*51:01H HLA-B*35:07H HLA-C*08:01M HLA-B*35:12H
  REGION 1..9: note = CONT. FROM ABOVE: HLA-B*38:02M HLA-B*54:01H HLA-B*39:01H HLA- B*07:05H HLA-C*02:02H HLA-B*13:02H HLA-A*66:01M HLA-B*50:01H
  source 1..9: note = Severe acute respiratory syndrome coronavirus 2
YAADPAMHA

SEQ ID NO: 3026 - protein, 9 aa, Severe acute respiratory syndrome-related coronavirus
  REGION 1..9: note = Table A: HLA-A*11:303M HLA-C*16:04H HLA-B*56:01M HLA-B*45:01M HLA-C*03:03H HLA-A*02:11H HLA-B*55:02M HLA-C*03:02H HLA-C*03:04H HLA-A*68:02H HLA-B*35:03H HLA-C*15:05H HLA-B*55:01H HLA-A*02:05M HLA-A*02:06M
  REGION 1..9: note = CONT. FROM ABOVE: HLA-A*02:07M HLA-A*02:08H HLA-B*14:01H HLA- A*02:01H HLA-C*07:27H HLA-B*35:02M HLA-C*08:01M HLA-C*08:02M HLA-B*35:12M HLA-B*38:02M HLA-B*39:06H HLA-B*54:01M HLA-B*39 :01H HLA-B*07:05H HLA-B*50:01H
  source 1..9: note = Severe acute respiratory syndrome coronavirus 2
AADPAMHAA

SEQ ID NO: 3027 - protein, 9 aa, Severe acute respiratory syndrome-related coronavirus
  REGION 1..9: note = Table A: HLA-B*38:01H HLA-B*38:02H HLA-B*39:01H HLA-B*15:10H
  source 1..9: note = Severe acute respiratory syndrome coronavirus 2
MHAASGNLL

SEQ ID NO: 3028 - protein, 9 aa, Severe acute respiratory syndrome-related coronavirus
  REGION 1..9: note = Table A: HLA-C*12:05H HLA-B*53:01M HLA-C*03:04H HLA-B*35:03M HLA-C*15:05H HLA-C*15:02H HLA-A*34:01H HLA-B*35:02H HLA-C*17:01M HLA-B*35:07H HLA-B*35:12H HLA-B*38:02M HLA-B*57:03H
  source 1..9: note = Severe acute respiratory syndrome coronavirus 2
HAASGNLLL

SEQ ID NO: 3029 - protein, 9 aa, Severe acute respiratory syndrome-related coronavirus
  REGION 1..9: note = Table A: HLA-A*11:01M HLA-A*11:02H HLA-A*36:01H HLA-A*34:02H HLA-C*07:27H
  source 1..9: note = Severe acute respiratory syndrome coronavirus 2
ASGNLLLDK

SEQ ID NO: 3030 - protein, 9 aa, Severe acute respiratory syndrome-related coronavirus
  REGION 1..9: note = Table A: HLA-A*33:03H HLA-A*31:01H
  source 1..9: note = Severe acute respiratory syndrome coronavirus 2
SGNLLLDKR

SEQ ID NO: 3031 - protein, 9 aa, Severe acute respiratory syndrome-related coronavirus
  REGION 1..9: note = Table A: HLA-B*38:02H
  source 1..9: note = Severe acute respiratory syndrome coronavirus 2
LLDKRTTCF

SEQ ID NO: 3032 - protein, 9 aa, Severe acute respiratory syndrome-related coronavirus
  REGION 1..9: note = Table A: HLA-A*68:02M HLA-C*15:05H
  source 1..9: note = Severe acute respiratory syndrome coronavirus 2
TTCFSVAAL

SEQ ID NO: 3033 - protein, 9 aa, Severe acute respiratory syndrome-related coronavirus
  REGION 1..9: note = Table A: HLA-A*11:303H HLA-A*11:01H HLA-A*11:02H HLA-C*12:05H HLA-A*02:11M HLA-A*68:01H HLA-A*68:02H HLA-C*15:05H HLA-A*02:04H HLA-A*02:05H HLA-A*02:06M HLA-A*02:07H HLA-A*02:08H HLA-B*14:01H HLA-A*02:01M
  REGION 1..9: note = CONT. FROM ABOVE: HLA-A*02:02H HLA-A*02:03H HLA-A*34:01H HLA- B*38:02M HLA-B*07:05H HLA-B*13:02M
  source 1..9: note = Severe acute respiratory syndrome coronavirus 2
SVAALTNNV

SEQ ID NO: 3034 - protein, 9 aa, Severe acute respiratory syndrome-related coronavirus
  REGION 1..9: note = Table A: HLA-B*58:01H HLA-A*11:303M HLA-B*44:05H HLA-C*16:01H HLA-C*16:04H HLA-B*46:01M HLA-C*03:02H HLA-C*03:04H HLA-C*15:05M HLA-C*12:02H HLA-C*07:27H HLA-B*35:01M HLA-B*35:07H HLA-C*08:01H HLA-B*38:02H
  REGION 1..9: note = CONT. FROM ABOVE: HLA-B*15:01H HLA-B*15:02H HLA-B*15:03H HLA- B*39:01H HLA-B*07:05H HLA-B*57:03M
  source 1..9: note = Severe acute respiratory syndrome coronavirus 2
AALTNNVAF

SEQ ID NO: 3035 - protein, 9 aa, Severe acute respiratory syndrome-related coronavirus
  REGION 1..9: note = Table A: HLA-A*68:02H
  source 1..9: note = Severe acute respiratory syndrome coronavirus 2
LTNNVAFQT

SEQ ID NO: 3036 - protein, 9 aa, Severe acute respiratory syndrome-related coronavirus
  REGION 1..9: note = Table A: HLA-A*68:02H HLA-C*15:05H HLA-C*15:02H HLA-B*38:02H HLA-B*49:01H
  source 1..9: note = Severe acute respiratory syndrome coronavirus 2
TNNVAFQTV

SEQ ID NO: 3037 - protein, 9 aa, Severe acute respiratory syndrome-related coronavirus
  REGION 1..9: note = Table A: HLA-A*34:02H
  source 1..9: note = Severe acute respiratory syndrome coronavirus 2
NNVAFQTVK

SEQ ID NO: 3038 - protein, 9 aa, Severe acute respiratory syndrome-related coronavirus
  REGION 1..9: note = Table A: HLA-B*38:02H
  source 1..9: note = Severe acute respiratory syndrome coronavirus 2
FQTVKPGNF

SEQ ID NO: 3039 - protein, 9 aa, Severe acute respiratory syndrome-related coronavirus
  REGION 1..9: note = Table A: HLA-A*11:303H HLA-A*74:01M HLA-A*03:01M HLA-A*03:02M HLA-A*11:01M HLA-A*11:02M HLA-A*33:01H HLA-A*33:03M HLA-A*26:03H HLA-A*30:01M HLA-A*30:02H HLA-A*68:01H HLA-A*34:01H HLA-A*34:02M HLA-C*07:27H
  REGION 1..9: note = CONT. FROM ABOVE: HLA-A*31:01H HLA-A*66:01H
  source 1..9: note = Severe acute respiratory syndrome coronavirus 2
TVKPGNFNK

SEQ ID NO: 3040 - protein, 9 aa, Severe acute respiratory syndrome-related coronavirus
  REGION 1..9: note = Table A: HLA-B*07:04H
  source 1..9: note = Severe acute respiratory syndrome coronavirus 2
KPGNFNKDF

SEQ ID NO: 3041 - protein, 9 aa, Severe acute respiratory syndrome-related coronavirus
  REGION 1..9: note = Table A: HLA-A*24:07H
  source 1..9: note = Severe acute respiratory syndrome coronavirus 2
NFNKDFYDF

SEQ ID NO: 3042 - protein, 9 aa, Severe acute respiratory syndrome-related coronavirus
  REGION 1..9: note = Table A: HLA-A*33:01M HLA-A*33:03M HLA-A*68:01H HLA-A*34:01H HLA-A*34:02M HLA-A*66:01H
  source 1..9: note = Severe acute respiratory syndrome coronavirus 2
DFYDFAVSK

SEQ ID NO: 3043 - protein, 9 aa, Severe acute respiratory syndrome-related coronavirus
  REGION 1..9: note = Table A: HLA-C*04:03H
  source 1..9: note = Severe acute respiratory syndrome coronavirus 2
FYDFAVSKG

SEQ ID NO: 3044 - protein, 9 aa, Severe acute respiratory syndrome-related coronavirus
  REGION 1..9: note = Table A: HLA-B*37:01H
  source 1..9: note = Severe acute respiratory syndrome coronavirus 2
YDFAVSKGF

SEQ ID NO: 3045 - protein, 9 aa, Severe acute respiratory syndrome-related coronavirus
  REGION 1..9: note = Table A: HLA-A*34:01H HLA-A*34:02M HLA-A*66:01M
  source 1..9: note = Severe acute respiratory syndrome coronavirus 2
FAVSKGFFK

SEQ ID NO: 3046 - protein, 9 aa, Severe acute respiratory syndrome-related coronavirus
  REGION 1..9: note = Table A: HLA-C*14:02H HLA-C*14:03H HLA-B*52:01H
  source 1..9: note = Severe acute respiratory syndrome coronavirus 2
GFFKEGSSV

SEQ ID NO: 3047 - protein, 9 aa, Severe acute respiratory syndrome-related coronavirus
  REGION 1..9: note = Table A: HLA-B*48:01H HLA-C*08:02H HLA-B*38:02M HLA-B*15:03H HLA-B*39:01M HLA-B*15:10H
  source 1..9: note = Severe acute respiratory syndrome coronavirus 2
FKEGSSVEL

SEQ ID NO: 3048 - protein, 9 aa, Severe acute respiratory syndrome-related coronavirus
  REGION 1..9: note = Table A: HLA-B*58:01H HLA-B*58:02M HLA-B*57:01H HLA-B*57:03H
  source 1..9: note = Severe acute respiratory syndrome coronavirus 2
SSVELKHFF

SEQ ID NO: 3049 - protein, 9 aa, Severe acute respiratory syndrome-related coronavirus
  REGION 1..9: note = Table A: HLA-B*45:01H HLA-B*40:06M HLA-B*50:01H
  source 1..9: note = Severe acute respiratory syndrome coronavirus 2
VELKHFFFA

SEQ ID NO: 3050 - protein, 9 aa, Severe acute respiratory syndrome-related coronavirus
  REGION 1..9: note = Table A: HLA-C*14:03H
  source 1..9: note = Severe acute respiratory syndrome coronavirus 2
FFFAQDGNA

SEQ ID NO: 3051 - protein, 9 aa, Severe acute respiratory syndrome-related coronavirus
  REGION 1..9: note = Table A: HLA-A*11:303M HLA-C*16:04H HLA-B*46:01M HLA-C*03:03M HLA-C*12:05H HLA-B*53:01H HLA-C*03:02M HLA-C*03:04M HLA-A*68:02H HLA-B*35:03M HLA-C*15:05H HLA-A*02:05H HLA-C*07:27H HLA-B*35:01H HLA-B*35:02M
  REGION 1..9: note = CONT. FROM ABOVE: HLA-B*35:08H HLA-B*51:01H HLA-C*08:01M HLA- C*08:02H HLA-B*35:12H HLA-B*38:02H HLA-B*39:01H
  source 1..9: note = Severe acute respiratory syndrome coronavirus 2
FAQDGNAAI

SEQ ID NO: 3052 - protein, 9 aa, Severe acute respiratory syndrome-related coronavirus
  REGION 1..9: note = Table A: HLA-B*35:01H HLA-B*35:08M HLA-B*35:07H
  source 1..9: note = Severe acute respiratory syndrome coronavirus 2
NAAISDYDY

SEQ ID NO: 3053 - protein, 9 aa, Severe acute respiratory syndrome-related coronavirus
  REGION 1..9: note = Table A: HLA-B*58:01H HLA-A*11:303H HLA-C*16:04H HLA-A*36:01H HLA-B*46:01H HLA-A*26:01H HLA-A*29:02H HLA-A*30:02H HLA-C*12:02H HLA-B*35:01M HLA-B*35:08M HLA-B*35:07H HLA-C*08:01H HLA-B*38:02H HLA-B*15:01H
  REGION 1..9: note = CONT. FROM ABOVE: HLA-B*39:01H HLA-C*02:02H
  source 1..9: note = Severe acute respiratory syndrome coronavirus 2
AAISDYDYY

SEQ ID NO: 3054 - protein, 9 aa, Severe acute respiratory syndrome-related coronavirus
  REGION 1..9: note = Table A: HLA-A*74:01M HLA-A*11:01H HLA-A*11:02H HLA-A*36:01H
  source 1..9: note = Severe acute respiratory syndrome coronavirus 2
AISDYDYYR

SEQ ID NO: 3055 - protein, 9 aa, Severe acute respiratory syndrome-related coronavirus
  REGION 1..9: note = Table A: HLA-B*58:01H HLA-A*36:01H HLA-A*01:01M
  source 1..9: note = Severe acute respiratory syndrome coronavirus 2
ISDYDYYRY

SEQ ID NO: 3056 - protein, 9 aa, Severe acute respiratory syndrome-related coronavirus
  REGION 1..9: note = Table A: HLA-C*14:02H HLA-C*14:03H HLA-A*24:02H HLA-A*24:07H
  source 1..9: note = Severe acute respiratory syndrome coronavirus 2
YYRYNLPTM

SEQ ID NO: 3057 - protein, 9 aa, Severe acute respiratory syndrome-related coronavirus
  REGION 1..9: note = Table A: HLA-B*39:06H
  source 1..9: note = Severe acute respiratory syndrome coronavirus 2
YRYNLPTMC

SEQ ID NO: 3058 - protein, 9 aa, Severe acute respiratory syndrome-related coronavirus
  REGION 1..9: note = Table A: HLA-A*02:11H HLA-A*02:02M HLA-B*38:02H
  source 1..9: note = Severe acute respiratory syndrome coronavirus 2
TMCDIRQLL

SEQ ID NO: 3059 - protein, 9 aa, Severe acute respiratory syndrome-related coronavirus
  REGION 1..9: note = Table A: HLA-B*48:01H HLA-A*02:11M HLA-C*15:02M HLA-A*02:04H HLA-A*02:06M HLA-B*52:01M HLA-B*38:02H HLA-B*40:06H HLA-B*15:03H HLA-B*13:02H
  source 1..9: note = Severe acute respiratory syndrome coronavirus 2
RQLLFVVEV

SEQ ID NO: 3060 - protein, 9 aa, Severe acute respiratory syndrome-related coronavirus
  REGION 1..9: note = Table A: HLA-A*02:11H HLA-A*02:04H HLA-B*38:02H
  source 1..9: note = Severe acute respiratory syndrome coronavirus 2
QLLFVVEVV

SEQ ID NO: 3061 - protein, 9 aa, Severe acute respiratory syndrome-related coronavirus
  REGION 1..9: note = Table A: HLA-B*58:01H HLA-A*11:303H HLA-C*16:04H HLA-A*36:01H HLA-A*25:01M HLA-B*46:01H HLA-A*26:01H HLA-A*26:02H HLA-A*26:03M HLA-A*29:01M HLA-A*29:02M HLA-A*01:01H HLA-B*53:01M HLA-A*30:02M HLA-A*68:01H
  REGION 1..9: note = CONT. FROM ABOVE: HLA-A*68:02H HLA-C*15:05H HLA-C*12:02H HLA- A*02:05H HLA-A*02:02H HLA-A*34:01H HLA-A*34:02H HLA-B*35:01H HLA-B*35:08M HLA-B*35:07H HLA-B*38:02H HLA-B*15:01M HLA-B*15 :02H HLA-B*39:01M HLA-B*07:05H HLA-C*02:02H HLA-A*66:01H
  source 1..9: note = Severe acute respiratory syndrome coronavirus 2
FVVEVVDKY

SEQ ID NO: 3062 - protein, 9 aa, Severe acute respiratory syndrome-related coronavirus
  REGION 1..9: note = Table A: HLA-A*26:01H HLA-A*26:03H HLA-A*68:02M
  source 1..9: note = Severe acute respiratory syndrome coronavirus 2
EVVDKYFDC

SEQ ID NO: 3063 - protein, 9 aa, Severe acute respiratory syndrome-related coronavirus
  REGION 1..9: note = Table A: HLA-A*36:01H HLA-A*01:01H
  source 1..9: note = Severe acute respiratory syndrome coronavirus 2
VVDKYFDCY

SEQ ID NO: 3064 - protein, 9 aa, Severe acute respiratory syndrome-related coronavirus
  REGION 1..9: note = Table A: HLA-A*11:303H HLA-A*03:01H HLA-A*03:02H HLA-A*11:01M HLA-A*11:02M HLA-A*36:01M HLA-B*27:02H HLA-A*30:02H HLA-A*68:01H HLA-A*34:01H HLA-A*34:02M HLA-C*07:27H HLA-A*66:01H
  source 1..9: note = Severe acute respiratory syndrome coronavirus 2
QVIVNNLDK

SEQ ID NO: 3065 - protein, 9 aa, Severe acute respiratory syndrome-related coronavirus
  REGION 1..9: note = Table A: HLA-A*11:303H HLA-A*74:01M HLA-A*03:01H HLA-A*03:02M HLA-A*11:01M HLA-A*11:02M HLA-A*36:01H HLA-A*34:02H HLA-C*07:27H
  source 1..9: note = Severe acute respiratory syndrome coronavirus 2
KSAGFPFNK

SEQ ID NO: 3066 - protein, 9 aa, Severe acute respiratory syndrome-related coronavirus
  REGION 1..9: note = Table A: HLA-B*58:01H HLA-B*57:01H HLA-B*53:01M HLA-A*34:01H HLA-A*34:02H HLA-B*57:03M
  source 1..9: note = Severe acute respiratory syndrome coronavirus 2
SAGFPFNKW

SEQ ID NO: 3067 - protein, 9 aa, Severe acute respiratory syndrome-related coronavirus
  REGION 1..9: note = Table A: HLA-B*56:01M HLA-B*55:02H HLA-B*55:01M HLA-B*54:01M
  source 1..9: note = Severe acute respiratory syndrome coronavirus 2
FPFNKWGKA

SEQ ID NO: 3068 - protein, 9 aa, Severe acute respiratory syndrome-related coronavirus
  REGION 1..9: note = Table A: HLA-A*29:02H
  source 1..9: note = Severe acute respiratory syndrome coronavirus 2
KWGKARLYY

SEQ ID NO: 3069 - protein, 9 aa, Severe acute respiratory syndrome-related coronavirus
  REGION 1..9: note = Table A: HLA-C*16:01H HLA-B*57:03H
  source 1..9: note = Severe acute respiratory syndrome coronavirus 2
KARLYYDSM

SEQ ID NO: 3070 - protein, 9 aa, Severe acute respiratory syndrome-related coronavirus
  REGION 1..9: note = Table A: HLA-A*03:01H HLA-A*36:01M HLA-A*29:02H HLA-A*30:02M HLA-B*38:02H HLA-B*15:01M HLA-B*15:03M
  source 1..9: note = Severe acute respiratory syndrome coronavirus 2
RLYYDSMSY

SEQ ID NO: 3071 - protein, 9 aa, Severe acute respiratory syndrome-related coronavirus
  REGION 1..9: note = Table A: HLA-A*11:303H HLA-A*68:02H HLA-B*35:03M HLA-C*15:05H HLA-B*14:01H HLA-B*35:01H HLA-B*35:02M HLA-C*08:01M HLA-B*35:12H HLA-B*38:02M HLA-B*39:01H
  source 1..9: note = Severe acute respiratory syndrome coronavirus 2
MSYEDQDAL

SEQ ID NO: 3072 - protein, 9 aa, Severe acute respiratory syndrome-related coronavirus
  REGION 1..9: note = Table A: HLA-C*04:01H HLA-C*04:03H HLA-A*24:02M HLA-A*24:07H HLA-A*23:01M HLA-B*39:01H
  source 1..9: note = Severe acute respiratory syndrome coronavirus 2
SYEDQDALF

SEQ ID NO: 3073 - protein, 9 aa, Severe acute respiratory syndrome-related coronavirus
  REGION 1..9: note = Table A: HLA-B*49:01H
  source 1..9: note = Severe acute respiratory syndrome coronavirus 2
YEDQDALFA

SEQ ID NO: 3074 - protein, 9 aa, Severe acute respiratory syndrome-related coronavirus
  REGION 1..9: note = Table A: HLA-B*27:02H HLA-B*37:01H
  source 1..9: note = Severe acute respiratory syndrome coronavirus 2
QDALFAYTK

SEQ ID NO: 3075 - protein, 9 aa, Severe acute respiratory syndrome-related coronavirus
  REGION 1..9: note = Table A: HLA-A*33:01H HLA-A*33:03M HLA-A*26:03H HLA-A*68:01H HLA-A*34:01H HLA-A*34:02M HLA-A*66:01H
  source 1..9: note = Severe acute respiratory syndrome coronavirus 2
DALFAYTKR

SEQ ID NO: 3076 - protein, 9 aa, Severe acute respiratory syndrome-related coronavirus
  REGION 1..9: note = Table A: HLA-C*16:01H HLA-B*08:01H HLA-C*03:02H HLA-C*12:03H HLA-B*51:01M HLA-B*38:02H
  source 1..9: note = Severe acute respiratory syndrome coronavirus 2
FAYTKRNVI

SEQ ID NO: 3077 - protein, 9 aa, Severe acute respiratory syndrome-related coronavirus
  REGION 1..9: note = Table A: HLA-B*38:02H
  source 1..9: note = Severe acute respiratory syndrome coronavirus 2
TKRNVIPTI

SEQ ID NO: 3078 - protein, 9 aa, Severe acute respiratory syndrome-related coronavirus
  REGION 1..9: note = Table A: HLA-A*11:303M HLA-A*25:01M HLA-B*46:01M HLA-A*26:01H HLA-A*26:02H HLA-A*26:03H HLA-C*03:03H HLA-A*02:11H HLA-B*53:01H HLA-C*03:02H HLA-C*03:04H HLA-A*68:01H HLA-A*68:02M HLA-B*35:03H HLA-C*15:05M
  REGION 1..9: note = CONT. FROM ABOVE: HLA-C*12:02M HLA-C*12:03H HLA-A*02:04M HLA- A*02:05H HLA-A*02:06M HLA-A*02:07H HLA-A*02:08H HLA-A*02:01H HLA-A*02:02M HLA-A*02:03M HLA-A*34:01M HLA-A*34:02H HLA-C*07 :27H HLA-B*35:01H HLA-B*35:02H HLA-B*35:08H HLA-C*17:01H
  REGION 1..9: note = CONT. FROM ABOVE: HLA-B*35:07M HLA-C*08:01M HLA-B*35:12H HLA- B*38:02H HLA-B*15:01M HLA-B*15:02H HLA-B*39:01H HLA-B*07:05M HLA-C*02:02H HLA-C*07:04M HLA-A*66:01M
  source 1..9: note = Severe acute respiratory syndrome coronavirus 2
NVIPTITQM

SEQ ID NO: 3079 - protein, 9 aa, Severe acute respiratory syndrome-related coronavirus
  REGION 1..9: note = Table A: HLA-B*53:01H HLA-B*35:03H HLA-C*15:05M HLA-B*07:02H HLA-B*07:05H
  source 1..9: note = Severe acute respiratory syndrome coronavirus 2
IPTITQMNL

SEQ ID NO: 3080 - protein, 9 aa, Severe acute respiratory syndrome-related coronavirus
  REGION 1..9: note = Table A: HLA-A*34:02H
  source 1..9: note = Severe acute respiratory syndrome coronavirus 2
PTITQMNLK

SEQ ID NO: 3081 - protein, 9 aa, Severe acute respiratory syndrome-related coronavirus
  REGION 1..9: note = Table A: HLA-B*58:01M HLA-A*36:01M HLA-A*29:01M HLA-A*29:02H HLA-A*01:01H HLA-A*30:02H HLA-C*15:05H HLA-A*34:02H HLA-B*35:01H HLA-B*38:02H HLA-B*15:02H HLA-B*07:05H
  source 1..9: note = Severe acute respiratory syndrome coronavirus 2
TITQMNLKY

SEQ ID NO: 3082 - protein, 9 aa, Severe acute respiratory syndrome-related coronavirus
  REGION 1..9: note = Table A: HLA-A*02:11M HLA-A*02:04H HLA-A*02:06H HLA-B*52:01H HLA-B*38:01H HLA-B*38:02H HLA-B*13:01H HLA-B*13:02H
  source 1..9: note = Severe acute respiratory syndrome coronavirus 2
TQMNLKYAI

SEQ ID NO: 3083 - protein, 9 aa, Severe acute respiratory syndrome-related coronavirus
  REGION 1..9: note = Table A: HLA-B*39:06H HLA-B*54:01M
  source 1..9: note = Severe acute respiratory syndrome coronavirus 2
MNLKYAISA

SEQ ID NO: 3084 - protein, 9 aa, Severe acute respiratory syndrome-related coronavirus
  REGION 1..9: note = Table A: HLA-A*33:03H HLA-A*26:03H HLA-A*34:01H HLA-A*34:02H
  source 1..9: note = Severe acute respiratory syndrome coronavirus 2
NLKYAISAK

SEQ ID NO: 3085 - protein, 9 aa, Severe acute respiratory syndrome-related coronavirus
  REGION 1..9: note = Table A: HLA-A*74:01H HLA-A*33:01H HLA-A*33:03H HLA-A*31:01H
  source 1..9: note = Severe acute respiratory syndrome coronavirus 2
KYAISAKNR

SEQ ID NO: 3086 - protein, 9 aa, Severe acute respiratory syndrome-related coronavirus
  REGION 1..9: note = Table A: HLA-B*54:01H
  source 1..9: note = Severe acute respiratory syndrome coronavirus 2
YAISAKNRA

SEQ ID NO: 3087 - protein, 9 aa, Severe acute respiratory syndrome-related coronavirus
  REGION 1..9: note = Table A: HLA-A*74:01H
  source 1..9: note = Severe acute respiratory syndrome coronavirus 2
AISAKNRAR

SEQ ID NO: 3088 - protein, 9 aa, Severe acute respiratory syndrome-related coronavirus
  REGION 1..9: note = Table A: HLA-B*08:01H HLA-B*07:04H
  source 1..9: note = Severe acute respiratory syndrome coronavirus 2
SAKNRARTV

SEQ ID NO: 3089 - protein, 9 aa, Severe acute respiratory syndrome-related coronavirus
  REGION 1..9: note = Table A: HLA-A*68:02H HLA-B*14:01M HLA-B*38:02H HLA-B*39:01H
  source 1..9: note = Severe acute respiratory syndrome coronavirus 2
NRARTVAGV

SEQ ID NO: 3090 - protein, 9 aa, Severe acute respiratory syndrome-related coronavirus
  REGION 1..9: note = Table A: HLA-B*27:05H HLA-B*27:02M HLA-B*14:01H HLA-B*38:02H HLA-B*39:01H
  source 1..9: note = Severe acute respiratory syndrome coronavirus 2
ARTVAGVSI

SEQ ID NO: 3091 - protein, 9 aa, Severe acute respiratory syndrome-related coronavirus
  REGION 1..9: note = Table A: HLA-A*02:08H
  source 1..9: note = Severe acute respiratory syndrome coronavirus 2
RTVAGVSIC

SEQ ID NO: 3092 - protein, 9 aa, Severe acute respiratory syndrome-related coronavirus
  REGION 1..9: note = Table A: HLA-A*11:303H HLA-A*74:01H HLA-A*03:01H HLA-A*03:02H HLA-A*11:01H HLA-A*11:02H HLA-A*33:03H HLA-A*26:03H HLA-A*68:01H HLA-A*34:01M HLA-A*34:02H HLA-A*31:01H HLA-A*66:01H
  source 1..9: note = Severe acute respiratory syndrome coronavirus 2
SICSTMTNR

SEQ ID NO: 3093 - protein, 9 aa, Severe acute respiratory syndrome-related coronavirus
  REGION 1..9: note = Table A: HLA-B*58:02H HLA-C*16:01H
  source 1..9: note = Severe acute respiratory syndrome coronavirus 2
CSTMTNRQF

SEQ ID NO: 3094 - protein, 9 aa, Severe acute respiratory syndrome-related coronavirus
  REGION 1..9: note = Table A: HLA-A*11:01H HLA-A*11:02H HLA-A*34:02H
  source 1..9: note = Severe acute respiratory syndrome coronavirus 2
STMTNRQFH

SEQ ID NO: 3095 - protein, 9 aa, Severe acute respiratory syndrome-related coronavirus
  REGION 1..9: note = Table A: HLA-A*74:01H HLA-A*03:02H HLA-A*11:01H HLA-A*11:02H HLA-A*33:01H HLA-A*33:03M HLA-A*30:02H HLA-A*68:01H HLA-A*34:02H HLA-A*31:01H HLA-A*66:01H
  source 1..9: note = Severe acute respiratory syndrome coronavirus 2
MTNRQFHQK

SEQ ID NO: 3096 - protein, 9 aa, Severe acute respiratory syndrome-related coronavirus
  REGION 1..9: note = Table A: HLA-C*06:02H
  source 1..9: note = Severe acute respiratory syndrome coronavirus 2
NRQFHQKLL

SEQ ID NO: 3097 - protein, 9 aa, Severe acute respiratory syndrome-related coronavirus
  REGION 1..9: note = Table A: HLA-A*74:01M HLA-A*03:01M HLA-A*11:01M HLA-A*11:02H HLA-A*36:01H HLA-B*27:05H HLA-A*30:01M HLA-A*30:02H HLA-A*31:01H HLA-B*13:02M
  source 1..9: note = Severe acute respiratory syndrome coronavirus 2
RQFHQKLLK

SEQ ID NO: 3098 - protein, 9 aa, Severe acute respiratory syndrome-related coronavirus
  REGION 1..9: note = Table A: HLA-B*38:02M HLA-B*15:10H
  source 1..9: note = Severe acute respiratory syndrome coronavirus 2
FHQKLLKSI

SEQ ID NO: 3099 - protein, 9 aa, Severe acute respiratory syndrome-related coronavirus
  REGION 1..9: note = Table A: HLA-B*39:06H
  source 1..9: note = Severe acute respiratory syndrome coronavirus 2
HQKLLKSIA

SEQ ID NO: 3100 - protein, 9 aa, Severe acute respiratory syndrome-related coronavirus
  REGION 1..9: note = Table A: HLA-B*55:02H HLA-B*39:06H
  source 1..9: note = Severe acute respiratory syndrome coronavirus 2
QKLLKSIAA

SEQ ID NO: 3101 - protein, 9 aa, Severe acute respiratory syndrome-related coronavirus
  REGION 1..9: note = Table A: HLA-A*02:11M HLA-A*02:01H
  source 1..9: note = Severe acute respiratory syndrome coronavirus 2
KLLKSIAAT

SEQ ID NO: 3102 - protein, 9 aa, Severe acute respiratory syndrome-related coronavirus
  REGION 1..9: note = Table A: HLA-A*74:01H HLA-A*33:01H HLA-A*33:03M HLA-A*26:03M HLA-A*68:01H HLA-A*34:01M HLA-A*31:01H HLA-A*66:01H
  source 1..9: note = Severe acute respiratory syndrome coronavirus 2
LLKSIAATR

SEQ ID NO: 3103 - protein, 9 aa, Severe acute respiratory syndrome-related coronavirus
  REGION 1..9: note = Table A: HLA-A*11:303H HLA-C*16:01H HLA-B*08:01M HLA-C*03:04H HLA-C*15:05M HLA-C*12:03H HLA-C*15:02H HLA-A*02:03H HLA-B*51:01H HLA-B*38:02M HLA-B*07:02H HLA-B*07:04H HLA-B*07:05H
  source 1..9: note = Severe acute respiratory syndrome coronavirus 2
IAATRGATV

SEQ ID NO: 3104 - protein, 9 aa, Severe acute respiratory syndrome-related coronavirus
  REGION 1..9: note = Table A: HLA-B*58:02H HLA-A*30:01H HLA-C*15:05H HLA-B*07:04H HLA-B*57:03H
  source 1..9: note = Severe acute respiratory syndrome coronavirus 2
ATRGATVVI

SEQ ID NO: 3105 - protein, 9 aa, Severe acute respiratory syndrome-related coronavirus
  REGION 1..9: note = Table A: HLA-A*11:303H HLA-A*74:01H HLA-A*03:01H HLA-A*03:02H HLA-A*11:01H HLA-A*11:02H HLA-A*36:01H HLA-B*57:01H HLA-C*03:03H HLA-A*30:01H HLA-A*30:02H HLA-A*68:01M HLA-A*34:01H HLA-A*34:02H HLA-C*07:27H
  REGION 1..9: note = CONT. FROM ABOVE: HLA-A*31:01H HLA-A*66:01M
  source 1..9: note = Severe acute respiratory syndrome coronavirus 2
ATVVIGTSK

SEQ ID NO: 3106 - protein, 9 aa, Severe acute respiratory syndrome-related coronavirus
  REGION 1..9: note = Table A: HLA-B*58:01H HLA-B*44:05H HLA-A*25:01M HLA-B*46:01H HLA-A*26:01M HLA-A*26:02H HLA-A*26:03M HLA-B*53:01H HLA-A*68:01H HLA-C*15:05H HLA-C*12:02H HLA-A*34:01M HLA-A*34:02H HLA-B*35:01M HLA-B*35:07H HLA-B*15:13M
  REGION 1..9: note = CONT. FROM ABOVE: HLA-B*38:01H HLA-B*38:02M HLA-B*15:01M HLA- B*15:02H HLA-B*15:03H HLA-B*07:05M HLA-B*57:03H HLA-C*02:02H HLA-A*66:01M
  source 1..9: note = Severe acute respiratory syndrome coronavirus 2
TVVIGTSKF

SEQ ID NO: 3107 - protein, 9 aa, Severe acute respiratory syndrome-related coronavirus
  REGION 1..9: note = Table A: HLA-B*46:01H HLA-A*26:01H HLA-A*26:03H HLA-A*29:01H HLA-A*29:02H HLA-A*30:02M HLA-A*34:01H HLA-B*38:02H HLA-B*15:01M HLA-B*15:02H
  source 1..9: note = Severe acute respiratory syndrome coronavirus 2
VVIGTSKFY

SEQ ID NO: 3108 - protein, 9 aa, Severe acute respiratory syndrome-related coronavirus
  REGION 1..9: note = Table A: HLA-B*58:01M HLA-B*57:01H HLA-A*25:01H HLA-A*32:01H HLA-B*57:03M
  source 1..9: note = Severe acute respiratory syndrome coronavirus 2
GTSKFYGGW

SEQ ID NO: 3109 - protein, 9 aa, Severe acute respiratory syndrome-related coronavirus
  REGION 1..9: note = Table A: HLA-C*14:02H HLA-C*14:03M HLA-A*02:11H HLA-A*30:02H HLA-A*24:07H
  source 1..9: note = Severe acute respiratory syndrome coronavirus 2
KFYGGWHNM

SEQ ID NO: 3110 - protein, 9 aa, Severe acute respiratory syndrome-related coronavirus
  REGION 1..9: note = Table A: HLA-C*14:02H HLA-C*14:03H HLA-C*06:02H HLA-C*07:02H HLA-A*24:02H HLA-A*24:07M HLA-A*23:01H
  source 1..9: note = Severe acute respiratory syndrome coronavirus 2
FYGGWHNML

SEQ ID NO: 3111 - protein, 9 aa, Severe acute respiratory syndrome-related coronavirus
  REGION 1..9: note = Table A: HLA-A*34:02H
  source 1..9: note = Severe acute respiratory syndrome coronavirus 2
YGGWHNMLK

SEQ ID NO: 3112 - protein, 9 aa, Severe acute respiratory syndrome-related coronavirus
  REGION 1..9: note = Table A: HLA-B*38:02H HLA-B*15:03H
  source 1..9: note = Severe acute respiratory syndrome coronavirus 2
WHNMLKTVY

SEQ ID NO: 3113 - protein, 9 aa, Severe acute respiratory syndrome-related coronavirus
  REGION 1..9: note = Table A: HLA-A*02:03H HLA-B*38:02H
  source 1..9: note = Severe acute respiratory syndrome coronavirus 2
MLKTVYSDV

SEQ ID NO: 3114 - protein, 9 aa, Severe acute respiratory syndrome-related coronavirus
  REGION 1..9: note = Table A: HLA-B*58:01H HLA-A*11:303M HLA-A*01:01H HLA-C*04:01H HLA-C*04:03H HLA-C*03:03H HLA-A*02:11H HLA-C*03:04M HLA-B*35:03H HLA-C*15:05H HLA-C*15:02H HLA-A*02:05H HLA-A*02:06M HLA-A*02:07M HLA-A*02:01H
  REGION 1..9: note = CONT. FROM ABOVE: HLA-B*35:02M HLA-B*35:08H HLA-C*17:01H HLA- C*08:01M HLA-C*08:02H HLA-B*35:12M HLA-B*38:01H HLA-B*38:02M HLA-B*40:01H HLA-B*39:01H HLA-B*57:03H HLA-C*05:01H HLA-B*13 :01M
  source 1..9: note = Severe acute respiratory syndrome coronavirus 2
YSDVENPHL

SEQ ID NO: 3115 - protein, 9 aa, Severe acute respiratory syndrome-related coronavirus
  REGION 1..9: note = Table A: HLA-B*44:05H HLA-B*37:01H HLA-B*40:02M HLA-B*41:02M HLA-C*07:04H
  source 1..9: note = Severe acute respiratory syndrome coronavirus 2
SDVENPHLM

SEQ ID NO: 3116 - protein, 9 aa, Severe acute respiratory syndrome-related coronavirus
  REGION 1..9: note = Table A: HLA-B*58:01M HLA-B*44:02M HLA-B*44:05M HLA-B*57:01H HLA-B*44:03H HLA-B*53:01H HLA-B*37:01M HLA-A*32:01H HLA-B*57:03H HLA-B*49:01H HLA-C*07:04H
  source 1..9: note = Severe acute respiratory syndrome coronavirus 2
VENPHLMGW

SEQ ID NO: 3117 - protein, 9 aa, Severe acute respiratory syndrome-related coronavirus
  REGION 1..9: note = Table A: HLA-B*35:01H HLA-B*35:07H
  source 1..9: note = Severe acute respiratory syndrome coronavirus 2
NPHLMGWDY

SEQ ID NO: 3118 - protein, 9 aa, Severe acute respiratory syndrome-related coronavirus
  REGION 1..9: note = Table A: HLA-A*74:01H HLA-A*11:02H HLA-A*34:02H
  source 1..9: note = Severe acute respiratory syndrome coronavirus 2
HLMGWDYPK

SEQ ID NO: 3119 - protein, 9 aa, Severe acute respiratory syndrome-related coronavirus
  REGION 1..9: note = Table A: HLA-A*34:01H
  source 1..9: note = Severe acute respiratory syndrome coronavirus 2
DRAMPNMLR

SEQ ID NO: 3120 - protein, 9 aa, Severe acute respiratory syndrome-related coronavirus
  REGION 1..9: note = Table A: HLA-B*58:01H HLA-B*58:02M HLA-C*12:05H HLA-C*15:05M HLA-C*15:02M HLA-B*51:01H HLA-C*08:01H HLA-B*38:02H HLA-B*07:05H HLA-B*57:03M HLA-B*13:02M
  source 1..9: note = Severe acute respiratory syndrome coronavirus 2
RAMPNMLRI

SEQ ID NO: 3121 - protein, 9 aa, Severe acute respiratory syndrome-related coronavirus
  REGION 1..9: note = Table A: HLA-C*14:03H
  source 1..9: note = Severe acute respiratory syndrome coronavirus 2
AMPNMLRIM

SEQ ID NO: 3122 - protein, 9 aa, Severe acute respiratory syndrome-related coronavirus
  REGION 1..9: note = Table A: HLA-B*56:01H HLA-B*55:02H HLA-C*15:05H HLA-B*55:01H HLA-B*39:06H HLA-B*54:01H HLA-B*07:02H HLA-B*07:04H
  source 1..9: note = Severe acute respiratory syndrome coronavirus 2
MPNMLRIMA

SEQ ID NO: 3123 - protein, 9 aa, Severe acute respiratory syndrome-related coronavirus
  REGION 1..9: note = Table A: HLA-A*02:11M
  source 1..9: note = Severe acute respiratory syndrome coronavirus 2
NMLRIMASL

SEQ ID NO: 3124 - protein, 9 aa, Severe acute respiratory syndrome-related coronavirus
  REGION 1..9: note = Table A: HLA-B*55:02H HLA-A*02:01H
  source 1..9: note = Severe acute respiratory syndrome coronavirus 2
RIMASLVLA

SEQ ID NO: 3125 - protein, 9 aa, Severe acute respiratory syndrome-related coronavirus
  REGION 1..9: note = Table A: HLA-A*74:01M HLA-A*36:01H HLA-A*33:03H HLA-A*34:01H HLA-A*31:01H HLA-A*66:01H
  source 1..9: note = Severe acute respiratory syndrome coronavirus 2
IMASLVLAR

SEQ ID NO: 3126 - protein, 9 aa, Severe acute respiratory syndrome-related coronavirus
  REGION 1..9: note = Table A: HLA-A*36:01H HLA-A*68:01H HLA-A*34:01H HLA-A*34:02H HLA-A*66:01H
  source 1..9: note = Severe acute respiratory syndrome coronavirus 2
MASLVLARK

SEQ ID NO: 3127 - protein, 9 aa, Severe acute respiratory syndrome-related coronavirus
  REGION 1..9: note = Table A: HLA-A*74:01H
  source 1..9: note = Severe acute respiratory syndrome coronavirus 2
CSLSHRFYR

SEQ ID NO: 3128 - protein, 9 aa, Severe acute respiratory syndrome-related coronavirus
  REGION 1..9: note = Table A: HLA-A*02:11H HLA-A*02:04M HLA-A*02:02H HLA-A*24:07H
  source 1..9: note = Severe acute respiratory syndrome coronavirus 2
SLSHRFYRL

SEQ ID NO: 3129 - protein, 9 aa, Severe acute respiratory syndrome-related coronavirus
  REGION 1..9: note = Table A: HLA-A*02:11H HLA-A*02:01H HLA-A*02:02M HLA-A*02:03M HLA-B*38:02H HLA-B*13:02H
  source 1..9: note = Severe acute respiratory syndrome coronavirus 2
RLANECAQV

SEQ ID NO: 3130 - protein, 9 aa, Severe acute respiratory syndrome-related coronavirus
  REGION 1..9: note = Table A: HLA-A*11:303H HLA-C*16:04H HLA-C*03:03M HLA-C*12:05H HLA-B*53:01H HLA-C*03:02H HLA-C*03:04M HLA-B*35:03H HLA-C*15:05H HLA-C*12:03H HLA-C*07:27H HLA-B*35:01H HLA-B*35:02H HLA-C*08:01H HLA-B*35:12H
  REGION 1..9: note = CONT. FROM ABOVE: HLA-B*38:02M HLA-C*07:04H
  source 1..9: note = Severe acute respiratory syndrome coronavirus 2
LANECAQVL

SEQ ID NO: 3131 - protein, 9 aa, Severe acute respiratory syndrome-related coronavirus
  REGION 1..9: note = Table A: HLA-A*26:01H HLA-A*26:02M HLA-A*26:03H HLA-A*34:01H HLA-B*35:01H HLA-B*38:02H HLA-B*15:02H
  source 1..9: note = Severe acute respiratory syndrome coronavirus 2
ECAQVLSEM

SEQ ID NO: 3132 - protein, 9 aa, Severe acute respiratory syndrome-related coronavirus
  REGION 1..9: note = Table A: HLA-B*48:01H HLA-A*11:303H HLA-B*38:02H HLA-B*15:01M HLA-B*15:02H HLA-B*15:03H HLA-B*39:01H HLA-B*13:01H HLA-B*13:02H HLA-B*15:10H
  source 1..9: note = Severe acute respiratory syndrome coronavirus 2
AQVLSEMVM

SEQ ID NO: 3133 - protein, 9 aa, Severe acute respiratory syndrome-related coronavirus
  REGION 1..9: note = Table A: HLA-A*02:06H HLA-A*02:01H
  source 1..9: note = Severe acute respiratory syndrome coronavirus 2
QVLSEMVMC

SEQ ID NO: 3134 - protein, 9 aa, Severe acute respiratory syndrome-related coronavirus
  REGION 1..9: note = Table A: HLA-A*02:01M HLA-A*02:02H HLA-A*02:03H HLA-B*38:02H
  source 1..9: note = Severe acute respiratory syndrome coronavirus 2
VLSEMVMCG

SEQ ID NO: 3135 - protein, 9 aa, Severe acute respiratory syndrome-related coronavirus
  REGION 1..9: note = Table A: HLA-A*34:02H HLA-B*38:02M HLA-B*15:01H HLA-B*15:02H HLA-B*15:11H
  source 1..9: note = Severe acute respiratory syndrome coronavirus 2
MVMCGGSLY

SEQ ID NO: 3136 - protein, 9 aa, Severe acute respiratory syndrome-related coronavirus
  REGION 1..9: note = Table A: HLA-B*13:02H
  source 1..9: note = Severe acute respiratory syndrome coronavirus 2
VMCGGSLYV

SEQ ID NO: 3137 - protein, 9 aa, Severe acute respiratory syndrome-related coronavirus
  REGION 1..9: note = Table A: HLA-A*34:02H
  source 1..9: note = Severe acute respiratory syndrome coronavirus 2
MCGGSLYVK

SEQ ID NO: 3138 - protein, 9 aa, Severe acute respiratory syndrome-related coronavirus
  REGION 1..9: note = Table A: HLA-A*02:11H HLA-A*02:03M HLA-C*08:03H
  source 1..9: note = Severe acute respiratory syndrome coronavirus 2
SLYVKPGGT

SEQ ID NO: 3139 - protein, 9 aa, Severe acute respiratory syndrome-related coronavirus
  REGION 1..9: note = Table A: HLA-B*46:01H HLA-A*26:03H HLA-B*55:01H HLA-B*38:02H HLA-B*15:01H HLA-B*15:02H
  source 1..9: note = Severe acute respiratory syndrome coronavirus 2
YVKPGGTSS

SEQ ID NO: 3140 - protein, 9 aa, Severe acute respiratory syndrome-related coronavirus
  REGION 1..9: note = Table A: HLA-A*11:303H HLA-B*46:01M HLA-A*30:02H HLA-B*35:01H HLA-B*38:02H HLA-B*15:01M HLA-B*15:02H HLA-B*39:01H HLA-B*07:05H HLA-B*15:11H
  source 1..9: note = Severe acute respiratory syndrome coronavirus 2
SSGDATTAY

SEQ ID NO: 3141 - protein, 9 aa, Severe acute respiratory syndrome-related coronavirus
  REGION 1..9: note = Table A: HLA-C*15:05H HLA-A*34:01H HLA-B*38:02H HLA-B*15:01H HLA-B*15:02M HLA-A*66:01H
  source 1..9: note = Severe acute respiratory syndrome coronavirus 2
TTAYANSVF

SEQ ID NO: 3142 - protein, 9 aa, Severe acute respiratory syndrome-related coronavirus
  REGION 1..9: note = Table A: HLA-C*14:03H HLA-A*24:02M HLA-A*24:07H HLA-C*08:01H HLA-A*23:01M
  source 1..9: note = Severe acute respiratory syndrome coronavirus 2
AYANSVFNI

SEQ ID NO: 3143 - protein, 9 aa, Severe acute respiratory syndrome-related coronavirus
  REGION 1..9: note = Table A: HLA-C*16:04M HLA-C*03:02H HLA-C*03:04H HLA-B*35:03H HLA-C*12:03H HLA-C*08:01H HLA-B*38:02H HLA-B*54:01H
  source 1..9: note = Severe acute respiratory syndrome coronavirus 2
YANSVFNIC

SEQ ID NO: 3144 - protein, 9 aa, Severe acute respiratory syndrome-related coronavirus
  REGION 1..9: note = Table A: HLA-A*68:02H HLA-B*54:01H
  source 1..9: note = Severe acute respiratory syndrome coronavirus 2
NSVFNICQA

SEQ ID NO: 3145 - protein, 9 aa, Severe acute respiratory syndrome-related coronavirus
  REGION 1..9: note = Table A: HLA-A*02:11M HLA-A*68:02M HLA-A*02:05H HLA-A*02:08H HLA-B*38:02H HLA-B*07:05H HLA-B*13:02M
  source 1..9: note = Severe acute respiratory syndrome coronavirus 2
SVFNICQAV

SEQ ID NO: 3146 - protein, 9 aa, Severe acute respiratory syndrome-related coronavirus
  REGION 1..9: note = Table A: HLA-B*54:01H
  source 1..9: note = Severe acute respiratory syndrome coronavirus 2
FNICQAVTA

SEQ ID NO: 3147 - protein, 9 aa, Severe acute respiratory syndrome-related coronavirus
  REGION 1..9: note = Table A: HLA-A*11:303H HLA-C*03:04H HLA-A*68:02H HLA-C*15:05M HLA-C*01:02H HLA-A*02:05M HLA-A*02:08M HLA-C*07:27H HLA-B*38:02H HLA-B*07:02H HLA-B*15:01H HLA-B*39:01H HLA-B*07:05H
  source 1..9: note = Severe acute respiratory syndrome coronavirus 2
AVTANVNAL

SEQ ID NO: 3148 - protein, 9 aa, Severe acute respiratory syndrome-related coronavirus
  REGION 1..9: note = Table A: HLA-B*58:01H HLA-B*57:01H HLA-A*02:11H HLA-A*68:02M HLA-C*15:05H HLA-C*15:02H HLA-A*02:05M HLA-A*02:06H HLA-A*02:08M HLA-A*02:01H HLA-A*02:02M HLA-C*08:01H HLA-B*38:02H HLA-B*57:03M
  source 1..9: note = Severe acute respiratory syndrome coronavirus 2
VTANVNALL

SEQ ID NO: 3149 - protein, 9 aa, Severe acute respiratory syndrome-related coronavirus
  REGION 1..9: note = Table A: HLA-A*02:02M HLA-B*38:02H HLA-B*13:01H
  source 1..9: note = Severe acute respiratory syndrome coronavirus 2
LLSTDGNKI

SEQ ID NO: 3150 - protein, 9 aa, Severe acute respiratory syndrome-related coronavirus
  REGION 1..9: note = Table A: HLA-B*18:01H HLA-A*30:02H HLA-B*35:01H HLA-B*39:01H HLA-B*07:05H
  source 1..9: note = Severe acute respiratory syndrome coronavirus 2
DGNKIADKY

SEQ ID NO: 3151 - protein, 9 aa, Severe acute respiratory syndrome-related coronavirus
  REGION 1..9: note = Table A: HLA-B*58:02M HLA-A*11:303H HLA-C*04:03H HLA-C*03:03H HLA-B*53:01H HLA-C*03:04M HLA-C*15:05H HLA-C*15:02H HLA-A*02:07H HLA-C*17:01H HLA-C*08:01H HLA-C*08:02M HLA-B*38:02H HLA-B*57:03H HLA-C*05:01M
  source 1..9: note = Severe acute respiratory syndrome coronavirus 2
IADKYVRNL

SEQ ID NO: 3152 - protein, 9 aa, Severe acute respiratory syndrome-related coronavirus
  REGION 1..9: note = Table A: HLA-A*33:03H
  source 1..9: note = Severe acute respiratory syndrome coronavirus 2
KYVRNLQHR

SEQ ID NO: 3153 - protein, 9 aa, Severe acute respiratory syndrome-related coronavirus
  REGION 1..9: note = Table A: HLA-A*02:02H HLA-B*07:04H
  source 1..9: note = Severe acute respiratory syndrome coronavirus 2
YVRNLQHRL

SEQ ID NO: 3154 - protein, 9 aa, Severe acute respiratory syndrome-related coronavirus
  REGION 1..9: note = Table A: HLA-B*13:01H
  source 1..9: note = Severe acute respiratory syndrome coronavirus 2
LQHRLYECL

SEQ ID NO: 3155 - protein, 9 aa, Severe acute respiratory syndrome-related coronavirus
  REGION 1..9: note = Table A: HLA-B*38:02M
  source 1..9: note = Severe acute respiratory syndrome coronavirus 2
QHRLYECLY

SEQ ID NO: 3156 - protein, 9 aa, Severe acute respiratory syndrome-related coronavirus
  REGION 1..9: note = Table A: HLA-B*39:01H
  source 1..9: note = Severe acute respiratory syndrome coronavirus 2
NRDVDTDFV

SEQ ID NO: 3157 - protein, 9 aa, Severe acute respiratory syndrome-related coronavirus
  REGION 1..9: note = Table A: HLA-B*44:05H HLA-B*18:01H HLA-A*24:02H HLA-A*23:01H HLA-B*37:01H HLA-B*38:02H HLA-B*40:02H HLA-B*07:05H HLA-C*07:04H
  source 1..9: note = Severe acute respiratory syndrome coronavirus 2
VDTDFVNEF

SEQ ID NO: 3158 - protein, 9 aa, Severe acute respiratory syndrome-related coronavirus
  REGION 1..9: note = Table A: HLA-B*58:01H HLA-A*36:01H HLA-A*01:01H
  source 1..9: note = Severe acute respiratory syndrome coronavirus 2
DTDFVNEFY

SEQ ID NO: 3159 - protein, 9 aa, Severe acute respiratory syndrome-related coronavirus
  REGION 1..9: note = Table A: HLA-A*29:02H
  source 1..9: note = Severe acute respiratory syndrome coronavirus 2
DFVNEFYAY

SEQ ID NO: 3160 - protein, 9 aa, Severe acute respiratory syndrome-related coronavirus
  REGION 1..9: note = Table A: HLA-A*33:03H HLA-A*26:01H HLA-A*26:03H HLA-A*29:02H HLA-C*03:03H HLA-A*02:11M HLA-B*53:01H HLA-C*03:02H HLA-C*03:04H HLA-A*68:02M HLA-B*35:03H HLA-C*15:02H HLA-A*02:04H HLA-A*02:05H HLA-A*02:06H HLA-A*02:07M
  REGION 1..9: note = CONT. FROM ABOVE: HLA-A*02:02M HLA-A*02:03H HLA-A*34:01H HLA- A*34:02H HLA-C*17:01H HLA-B*35:07H HLA-C*08:01H HLA-B*38:02M HLA-C*02:02H HLA-C*07:04H HLA-A*66:01H
  source 1..9: note = Severe acute respiratory syndrome coronavirus 2
FVNEFYAYL

SEQ ID NO: 3161 - protein, 9 aa, Severe acute respiratory syndrome-related coronavirus
  REGION 1..9: note = Table A: HLA-C*14:02H HLA-C*14:03H HLA-A*24:07M HLA-A*23:01H
  source 1..9: note = Severe acute respiratory syndrome coronavirus 2
FYAYLRKHF

SEQ ID NO: 3162 - protein, 9 aa, Severe acute respiratory syndrome-related coronavirus
  REGION 1..9: note = Table A: HLA-A*24:02H HLA-A*24:07M HLA-A*23:01H
  source 1..9: note = Severe acute respiratory syndrome coronavirus 2
AYLRKHFSM

SEQ ID NO: 3163 - protein, 9 aa, Severe acute respiratory syndrome-related coronavirus
  REGION 1..9: note = Table A: HLA-B*08:01H
  source 1..9: note = Severe acute respiratory syndrome coronavirus 2
YLRKHFSMM

SEQ ID NO: 3164 - protein, 9 aa, Severe acute respiratory syndrome-related coronavirus
  REGION 1..9: note = Table A: HLA-B*15:03M
  source 1..9: note = Severe acute respiratory syndrome coronavirus 2
RKHFSMMIL

SEQ ID NO: 3165 - protein, 9 aa, Severe acute respiratory syndrome-related coronavirus
  REGION 1..9: note = Table A: HLA-B*38:02H
  source 1..9: note = Severe acute respiratory syndrome coronavirus 2
MMILSDDAV

SEQ ID NO: 3166 - protein, 9 aa, Severe acute respiratory syndrome-related coronavirus
  REGION 1..9: note = Table A: HLA-A*02:01H HLA-B*38:02H
  source 1..9: note = Severe acute respiratory syndrome coronavirus 2
ILSDDAVVC

SEQ ID NO: 3167 - protein, 9 aa, Severe acute respiratory syndrome-related coronavirus
  REGION 1..9: note = Table A: HLA-B*58:01M HLA-A*11:303H HLA-A*01:01H HLA-C*04:01H HLA-C*04:03H HLA-C*15:05H HLA-A*02:07H HLA-B*35:01H HLA-B*35:02H HLA-B*35:08H HLA-C*08:01H HLA-C*08:02M HLA-B*35:12H HLA-B*38:02H HLA-B*39:01H
  REGION 1..9: note = CONT. FROM ABOVE: HLA-B*57:03H HLA-C*05:01H
  source 1..9: note = Severe acute respiratory syndrome coronavirus 2
LSDDAVVCF

SEQ ID NO: 3168 - protein, 9 aa, Severe acute respiratory syndrome-related coronavirus
  REGION 1..9: note = Table A: HLA-B*46:01H HLA-A*26:01H HLA-A*29:01H HLA-A*30:02H HLA-B*35:01H HLA-B*38:02M HLA-B*15:01M HLA-B*15:02H HLA-B*15:03H HLA-B*07:05H
  source 1..9: note = Severe acute respiratory syndrome coronavirus 2
AVVCFNSTY

SEQ ID NO: 3169 - protein, 9 aa, Severe acute respiratory syndrome-related coronavirus
  REGION 1..9: note = Table A: HLA-A*68:02H HLA-C*15:05H HLA-A*34:02H
  source 1..9: note = Severe acute respiratory syndrome coronavirus 2
STYASQGLV

SEQ ID NO: 3170 - protein, 9 aa, Severe acute respiratory syndrome-related coronavirus
  REGION 1..9: note = Table A: HLA-C*14:03H HLA-B*39:06H HLA-B*39:01H
  source 1..9: note = Severe acute respiratory syndrome coronavirus 2
TYASQGLVA

SEQ ID NO: 3171 - protein, 9 aa, Severe acute respiratory syndrome-related coronavirus
  REGION 1..9: note = Table A: HLA-B*54:01H
  source 1..9: note = Severe acute respiratory syndrome coronavirus 2
YASQGLVAS

SEQ ID NO: 3172 - protein, 9 aa, Severe acute respiratory syndrome-related coronavirus
  REGION 1..9: note = Table A: HLA-B*58:01H HLA-B*58:02H HLA-B*44:05H HLA-A*30:02H HLA-C*15:05M HLA-B*52:01H HLA-B*38:02H HLA-B*07:05H HLA-B*57:03H HLA-B*13:02H
  source 1..9: note = Severe acute respiratory syndrome coronavirus 2
ASQGLVASI

SEQ ID NO: 3173 - protein, 9 aa, Severe acute respiratory syndrome-related coronavirus
  REGION 1..9: note = Table A: HLA-A*03:02H HLA-A*11:01H HLA-A*11:02H
  source 1..9: note = Severe acute respiratory syndrome coronavirus 2
SQGLVASIK

SEQ ID NO: 3174 - protein, 9 aa, Severe acute respiratory syndrome-related coronavirus
  REGION 1..9: note = Table A: HLA-A*02:03H HLA-B*15:01H
  source 1..9: note = Severe acute respiratory syndrome coronavirus 2
GLVASIKNF

SEQ ID NO: 3175 - protein, 9 aa, Severe acute respiratory syndrome-related coronavirus
  REGION 1..9: note = Table A: HLA-A*11:02H HLA-A*68:01H HLA-A*34:02H HLA-A*66:01H
  source 1..9: note = Severe acute respiratory syndrome coronavirus 2
LVASIKNFK

SEQ ID NO: 3176 - protein, 9 aa, Severe acute respiratory syndrome-related coronavirus
  REGION 1..9: note = Table A: HLA-A*11:303H HLA-C*15:05H HLA-C*15:02M HLA-A*02:06H HLA-B*40:06H
  source 1..9: note = Severe acute respiratory syndrome coronavirus 2
ASIKNFKSV

SEQ ID NO: 3177 - protein, 9 aa, Severe acute respiratory syndrome-related coronavirus
  REGION 1..9: note = Table A: HLA-B*08:01H HLA-B*07:04M
  source 1..9: note = Severe acute respiratory syndrome coronavirus 2
SIKNFKSVL

SEQ ID NO: 3178 - protein, 9 aa, Severe acute respiratory syndrome-related coronavirus
  REGION 1..9: note = Table A: HLA-B*15:03H
  source 1..9: note = Severe acute respiratory syndrome coronavirus 2
IKNFKSVLY

SEQ ID NO: 3179 - protein, 9 aa, Severe acute respiratory syndrome-related coronavirus
  REGION 1..9: note = Table A: HLA-B*58:01H HLA-B*58:02M HLA-A*36:01M HLA-A*29:02M HLA-C*07:01H HLA-A*30:02H HLA-C*15:02H HLA-B*38:02H HLA-B*15:03H HLA-B*57:03H
  source 1..9: note = Severe acute respiratory syndrome coronavirus 2
KNFKSVLYY

SEQ ID NO: 3180 - protein, 9 aa, Severe acute respiratory syndrome-related coronavirus
  REGION 1..9: note = Table A: HLA-A*02:11H HLA-A*68:02H HLA-A*02:04H HLA-A*02:06H HLA-A*02:01H HLA-B*13:02H
  source 1..9: note = Severe acute respiratory syndrome coronavirus 2
SVLYYQNNV

SEQ ID NO: 3181 - protein, 9 aa, Severe acute respiratory syndrome-related coronavirus
  REGION 1..9: note = Table A: HLA-B*38:02H HLA-B*15:01H HLA-B*15:02H HLA-B*15:03H
  source 1..9: note = Severe acute respiratory syndrome coronavirus 2
VLYYQNNVF

SEQ ID NO: 3182 - protein, 9 aa, Severe acute respiratory syndrome-related coronavirus
  REGION 1..9: note = Table A: HLA-C*14:02H HLA-C*14:03M HLA-A*29:02H HLA-A*24:02H
  source 1..9: note = Severe acute respiratory syndrome coronavirus 2
LYYQNNVFM

SEQ ID NO: 3183 - protein, 9 aa, Severe acute respiratory syndrome-related coronavirus
  REGION 1..9: note = Table A: HLA-B*39:06H
  source 1..9: note = Severe acute respiratory syndrome coronavirus 2
QNNVFMSEA

SEQ ID NO: 3184 - protein, 9 aa, Severe acute respiratory syndrome-related coronavirus
  REGION 1..9: note = Table A: HLA-A*24:07H
  source 1..9: note = Severe acute respiratory syndrome coronavirus 2
VFMSEAKCW

SEQ ID NO: 3185 - protein, 9 aa, Severe acute respiratory syndrome-related coronavirus
  REGION 1..9: note = Table A: HLA-B*45:01M HLA-B*40:06H HLA-B*50:01H
  source 1..9: note = Severe acute respiratory syndrome coronavirus 2
TETDLTKGP

SEQ ID NO: 3186 - protein, 9 aa, Severe acute respiratory syndrome-related coronavirus
  REGION 1..9: note = Table A: HLA-B*18:01H HLA-B*40:02H HLA-B*07:05H HLA-B*41:02H
  source 1..9: note = Severe acute respiratory syndrome coronavirus 2
HEFCSQHTM

SEQ ID NO: 3187 - protein, 9 aa, Severe acute respiratory syndrome-related coronavirus
  REGION 1..9: note = Table A: HLA-A*11:303H HLA-A*03:01M HLA-A*03:02H HLA-A*11:01M HLA-A*11:02M HLA-A*34:02M HLA-C*07:27H
  source 1..9: note = Severe acute respiratory syndrome coronavirus 2
CSQHTMLVK

SEQ ID NO: 3188 - protein, 9 aa, Severe acute respiratory syndrome-related coronavirus
  REGION 1..9: note = Table A: HLA-B*39:06H
  source 1..9: note = Severe acute respiratory syndrome coronavirus 2
QHTMLVKQG

SEQ ID NO: 3189 - protein, 9 aa, Severe acute respiratory syndrome-related coronavirus
  REGION 1..9: note = Table A: HLA-B*38:02M HLA-B*15:01H HLA-B*15:02M HLA-B*39:01H
  source 1..9: note = Severe acute respiratory syndrome coronavirus 2
MLVKQGDDY

SEQ ID NO: 3190 - protein, 9 aa, Severe acute respiratory syndrome-related coronavirus
  REGION 1..9: note = Table A: HLA-A*02:05H HLA-B*38:02H
  source 1..9: note = Severe acute respiratory syndrome coronavirus 2
LVKQGDDYV

SEQ ID NO: 3191 - protein, 9 aa, Severe acute respiratory syndrome-related coronavirus
  REGION 1..9: note = Table A: HLA-B*15:03H
  source 1..9: note = Severe acute respiratory syndrome coronavirus 2
VKQGDDYVY

SEQ ID NO: 3192 - protein, 9 aa, Severe acute respiratory syndrome-related coronavirus
  REGION 1..9: note = Table A: HLA-A*02:05H HLA-A*02:02H HLA-B*13:01M
  source 1..9: note = Severe acute respiratory syndrome coronavirus 2
KQGDDYVYL

SEQ ID NO: 3193 - protein, 9 aa, Severe acute respiratory syndrome-related coronavirus
  REGION 1..9: note = Table A: HLA-B*42:01H HLA-B*56:01M HLA-B*53:01H HLA-B*55:02H HLA-A*68:02H HLA-B*35:03M HLA-C*15:05H HLA-B*55:01M HLA-A*34:01H HLA-B*35:01H HLA-B*35:02M HLA-B*51:01H HLA-B*35:07M HLA-B*52:01H HLA-C*08:01H HLA-B*35:12M
  REGION 1..9: note = CONT. FROM ABOVE: HLA-B*38:02M HLA-B*54:01M HLA-B*07:02H HLA- B*07:04H HLA-B*07:05M HLA-B*57:03H HLA-B*49:01H
  source 1..9: note = Severe acute respiratory syndrome coronavirus 2
LPYPDPSRI

SEQ ID NO: 3194 - protein, 9 aa, Severe acute respiratory syndrome-related coronavirus
  REGION 1..9: note = Table A: HLA-C*14:02H HLA-C*14:03H HLA-C*07:02H HLA-A*24:07H
  source 1..9: note = Severe acute respiratory syndrome coronavirus 2
PYPDPSRIL

SEQ ID NO: 3195 - protein, 9 aa, Severe acute respiratory syndrome-related coronavirus
  REGION 1..9: note = Table A: HLA-B*35:07H
  source 1..9: note = Severe acute respiratory syndrome coronavirus 2
YPDPSRILG

SEQ ID NO: 3196 - protein, 9 aa, Severe acute respiratory syndrome-related coronavirus
  REGION 1..9: note = Table A: HLA-B*35:02M HLA-B*35:12H
  source 1..9: note = Severe acute respiratory syndrome coronavirus 2
DIVKTDGTL

SEQ ID NO: 3197 - protein, 9 aa, Severe acute respiratory syndrome-related coronavirus
  REGION 1..9: note = Table A: HLA-C*15:05H HLA-B*38:02H HLA-B*15:01H HLA-B*15:02M
  source 1..9: note = Severe acute respiratory syndrome coronavirus 2
IVKTDGTLM

SEQ ID NO: 3198 - protein, 9 aa, Severe acute respiratory syndrome-related coronavirus
  REGION 1..9: note = Table A: HLA-B*18:01H HLA-B*07:05H
  source 1..9: note = Severe acute respiratory syndrome coronavirus 2
DGTLMIERF

SEQ ID NO: 3199 - protein, 9 aa, Severe acute respiratory syndrome-related coronavirus
  REGION 1..9: note = Table A: HLA-A*02:11H HLA-C*15:02H
  source 1..9: note = Severe acute respiratory syndrome coronavirus 2
GTLMIERFV

SEQ ID NO: 3200 - protein, 9 aa, Severe acute respiratory syndrome-related coronavirus
  REGION 1..9: note = Table A: HLA-B*58:02H HLA-C*14:02H HLA-C*14:03H HLA-A*11:303H HLA-C*16:01M HLA-B*46:01M HLA-B*08:01H HLA-C*03:03M HLA-A*02:11H HLA-C*03:02M HLA-C*03:04M HLA-B*14:02M HLA-C*12:03H HLA-C*15:02H HLA-A*02:04H
  REGION 1..9: note = CONT. FROM ABOVE: HLA-A*02:05H HLA-A*02:06M HLA-A*02:07M HLA- B*14:01H HLA-A*02:01H HLA-A*02:02H HLA-A*02:03M HLA-A*24:02H HLA-C*17:01H HLA-C*08:01M HLA-B*38:02M HLA-B*40:06M HLA-B*15 :01H HLA-B*15:02H HLA-B*57:03H HLA-C*07:04H
  source 1..9: note = Severe acute respiratory syndrome coronavirus 2
LMIERFVSL

SEQ ID NO: 3201 - protein, 9 aa, Severe acute respiratory syndrome-related coronavirus
  REGION 1..9: note = Table A: HLA-B*49:01H
  source 1..9: note = Severe acute respiratory syndrome coronavirus 2
IERFVSLAI

SEQ ID NO: 3202 - protein, 9 aa, Severe acute respiratory syndrome-related coronavirus
  REGION 1..9: note = Table A: HLA-A*36:01H HLA-A*29:02H HLA-B*35:01M HLA-B*35:08M HLA-B*35:07M HLA-B*38:02M HLA-B*15:01H HLA-B*15:02M HLA-B*39:01H
  source 1..9: note = Severe acute respiratory syndrome coronavirus 2
FVSLAIDAY

SEQ ID NO: 3203 - protein, 9 aa, Severe acute respiratory syndrome-related coronavirus
  REGION 1..9: note = Table A: HLA-A*02:04H HLA-A*02:02H
  source 1..9: note = Severe acute respiratory syndrome coronavirus 2
SLAIDAYPL

SEQ ID NO: 3204 - protein, 9 aa, Severe acute respiratory syndrome-related coronavirus
  REGION 1..9: note = Table A: HLA-A*11:303M HLA-A*03:01H HLA-A*03:02H HLA-A*11:01H HLA-A*11:02H HLA-A*36:01H HLA-A*01:01H HLA-C*04:03H HLA-C*03:03H HLA-B*27:02H HLA-A*30:02H HLA-C*15:05H HLA-A*02:07H HLA-A*34:02M HLA-C*07:27M
  REGION 1..9: note = CONT. FROM ABOVE: HLA-B*13:02M
  source 1..9: note = Severe acute respiratory syndrome coronavirus 2
AIDAYPLTK

SEQ ID NO: 3205 - protein, 9 aa, Severe acute respiratory syndrome-related coronavirus
  REGION 1..9: note = Table A: HLA-A*11:303H HLA-C*16:01H HLA-B*57:01H HLA-B*46:01H HLA-C*03:02H HLA-A*30:02H HLA-C*12:02M HLA-C*12:03H HLA-C*07:27H HLA-B*38:02H HLA-B*15:01M HLA-B*15:02H HLA-B*57:03H HLA-C*02:02H HLA-B*15:11H
  source 1..9: note = Severe acute respiratory syndrome coronavirus 2
LTKHPNQEY

SEQ ID NO: 3206 - protein, 9 aa, Severe acute respiratory syndrome-related coronavirus
  REGION 1..9: note = Table A: HLA-B*44:05H HLA-B*45:01H HLA-B*44:03H HLA-B*40:01M HLA-B*40:02H HLA-B*40:06H HLA-B*41:02H HLA-B*49:01M
  source 1..9: note = Severe acute respiratory syndrome coronavirus 2
QEYADVFHL

SEQ ID NO: 3207 - protein, 9 aa, Severe acute respiratory syndrome-related coronavirus
  REGION 1..9: note = Table A: HLA-A*33:03H HLA-A*26:01H HLA-A*29:02H HLA-A*30:02H HLA-A*24:02M HLA-A*24:07H HLA-A*23:01H
  source 1..9: note = Severe acute respiratory syndrome coronavirus 2
EYADVFHLY

SEQ ID NO: 3208 - protein, 9 aa, Severe acute respiratory syndrome-related coronavirus
  REGION 1..9: note = Table A: HLA-A*36:01H HLA-C*04:03H HLA-C*03:03H HLA-A*02:11H HLA-B*53:01H HLA-C*03:02H HLA-C*03:04M HLA-C*12:03H HLA-C*15:02M HLA-A*02:07M HLA-C*17:01M HLA-C*08:01M HLA-C*08:02M HLA-B*38:02M HLA-C*05:01H
  source 1..9: note = Severe acute respiratory syndrome coronavirus 2
YADVFHLYL

SEQ ID NO: 3209 - protein, 9 aa, Severe acute respiratory syndrome-related coronavirus
  REGION 1..9: note = Table A: HLA-A*25:01H HLA-A*26:01H HLA-A*26:02H HLA-A*26:03M HLA-A*29:01H HLA-A*29:02M HLA-A*34:01H HLA-A*34:02M HLA-B*35:01M HLA-B*35:07M HLA-B*38:02M HLA-B*15:02M HLA-B*07:05H HLA-A*66:01H
  source 1..9: note = Severe acute respiratory syndrome coronavirus 2
DVFHLYLQY

SEQ ID NO: 3210 - protein, 9 aa, Severe acute respiratory syndrome-related coronavirus
  REGION 1..9: note = Table A: HLA-C*14:03H HLA-A*24:02H HLA-A*24:07M HLA-A*23:01H
  source 1..9: note = Severe acute respiratory syndrome coronavirus 2
VFHLYLQYI

SEQ ID NO: 3211 - protein, 9 aa, Severe acute respiratory syndrome-related coronavirus
  REGION 1..9: note = Table A: HLA-C*14:03H HLA-A*02:04H HLA-A*24:02H HLA-A*24:07H HLA-A*23:01M
  source 1..9: note = Severe acute respiratory syndrome coronavirus 2
LYLQYIRKL

SEQ ID NO: 3212 - protein, 9 aa, Severe acute respiratory syndrome-related coronavirus
  REGION 1..9: note = Table A: HLA-B*08:01M HLA-A*02:02H HLA-B*38:02H HLA-B*07:04H
  source 1..9: note = Severe acute respiratory syndrome coronavirus 2
YIRKLHDEL

SEQ ID NO: 3213 - protein, 9 aa, Severe acute respiratory syndrome-related coronavirus
  REGION 1..9: note = Table A: HLA-A*02:02H
  source 1..9: note = Severe acute respiratory syndrome coronavirus 2
KLHDELTGH

SEQ ID NO: 3214 - protein, 9 aa, Severe acute respiratory syndrome-related coronavirus
  REGION 1..9: note = Table A: HLA-B*38:01H HLA-B*38:02M HLA-B*39:01H
  source 1..9: note = Severe acute respiratory syndrome coronavirus 2
LHDELTGHM

SEQ ID NO: 3215 - protein, 9 aa, Severe acute respiratory syndrome-related coronavirus
  REGION 1..9: note = Table A: HLA-B*37:01H HLA-B*38:01H HLA-B*38:02H
  source 1..9: note = Severe acute respiratory syndrome coronavirus 2
HDELTGHML

SEQ ID NO: 3216 - protein, 9 aa, Severe acute respiratory syndrome-related coronavirus
  REGION 1..9: note = Table A: HLA-A*26:01H HLA-A*26:03H HLA-A*34:01H HLA-B*15:02H
  source 1..9: note = Severe acute respiratory syndrome coronavirus 2
ELTGHMLDM

SEQ ID NO: 3217 - protein, 9 aa, Severe acute respiratory syndrome-related coronavirus
  REGION 1..9: note = Table A: HLA-A*36:01H
  source 1..9: note = Severe acute respiratory syndrome coronavirus 2
LTGHMLDMY

SEQ ID NO: 3218 - protein, 9 aa, Severe acute respiratory syndrome-related coronavirus
  REGION 1..9: note = Table A: HLA-B*38:02H HLA-B*39:06H HLA-B*15:10H
  source 1..9: note = Severe acute respiratory syndrome coronavirus 2
GHMLDMYSV

SEQ ID NO: 3219 - protein, 9 aa, Severe acute respiratory syndrome-related coronavirus
  REGION 1..9: note = Table A: HLA-B*38:02H HLA-B*15:02M
  source 1..9: note = Severe acute respiratory syndrome coronavirus 2
HMLDMYSVM

SEQ ID NO: 3220 - protein, 9 aa, Severe acute respiratory syndrome-related coronavirus
  REGION 1..9: note = Table A: HLA-A*02:07M HLA-A*02:01H HLA-B*38:02H
  source 1..9: note = Severe acute respiratory syndrome coronavirus 2
MLDMYSVML

SEQ ID NO: 3221 - protein, 9 aa, Severe acute respiratory syndrome-related coronavirus
  REGION 1..9: note = Table A: HLA-A*34:01H
  source 1..9: note = Severe acute respiratory syndrome coronavirus 2
MLTNDNTSR

SEQ ID NO: 3222 - protein, 9 aa, Severe acute respiratory syndrome-related coronavirus
  REGION 1..9: note = Table A: HLA-B*58:01H HLA-A*36:01H HLA-B*46:01H HLA-A*26:01H HLA-A*29:02H HLA-A*01:01M HLA-A*30:02M HLA-C*12:02H HLA-A*34:02H HLA-B*38:02H HLA-B*15:01M
  source 1..9: note = Severe acute respiratory syndrome coronavirus 2
LTNDNTSRY

SEQ ID NO: 3223 - protein, 9 aa, Severe acute respiratory syndrome-related coronavirus
  REGION 1..9: note = Table A: HLA-B*53:01H
  source 1..9: note = Severe acute respiratory syndrome coronavirus 2
TNDNTSRYW

SEQ ID NO: 3224 - protein, 9 aa, Severe acute respiratory syndrome-related coronavirus
  REGION 1..9: note = Table A: HLA-B*57:03H
  source 1..9: note = Severe acute respiratory syndrome coronavirus 2
TSRYWEPEF

SEQ ID NO: 3225 - protein, 9 aa, Severe acute respiratory syndrome-related coronavirus
  REGION 1..9: note = Table A: HLA-C*06:02H HLA-B*27:05H HLA-C*07:02H HLA-B*27:02H HLA-B*38:02H
  source 1..9: note = Severe acute respiratory syndrome coronavirus 2
SRYWEPEFY

SEQ ID NO: 3226 - protein, 9 aa, Severe acute respiratory syndrome-related coronavirus
  REGION 1..9: note = Table A: HLA-B*07:05H
  source 1..9: note = Severe acute respiratory syndrome coronavirus 2
WEPEFYEAM

SEQ ID NO: 3227 - protein, 9 aa, Severe acute respiratory syndrome-related coronavirus
  REGION 1..9: note = Table A: HLA-B*35:08H
  source 1..9: note = Severe acute respiratory syndrome coronavirus 2
EPEFYEAMY

SEQ ID NO: 3228 - protein, 9 aa, Severe acute respiratory syndrome-related coronavirus
  REGION 1..9: note = Table A: HLA-B*45:01H HLA-B*40:02H HLA-B*40:06H HLA-B*49:01M HLA-B*50:01H
  source 1..9: note = Severe acute respiratory syndrome coronavirus 2
YEAMYTPHT

SEQ ID NO: 3229 - protein, 9 aa, Severe acute respiratory syndrome-related coronavirus
  REGION 1..9: note = Table A: HLA-A*33:03H HLA-B*56:01H HLA-B*08:01H HLA-C*12:05H HLA-A*02:11H HLA-B*53:01H HLA-A*68:01H HLA-A*68:02H HLA-B*35:03H HLA-C*15:05H HLA-A*34:01M HLA-A*34:02H HLA-B*51:01H HLA-B*38:02M HLA-B*39:06H HLA-B*54:01M
  REGION 1..9: note = CONT. FROM ABOVE: HLA-B*07:05H HLA-B*13:02H HLA-A*66:01H
  source 1..9: note = Severe acute respiratory syndrome coronavirus 2
EAMYTPHTV

SEQ ID NO: 3230 - protein, 9 aa, Severe acute respiratory syndrome-related coronavirus
  REGION 1..9: note = Table A: HLA-A*11:303H HLA-A*02:11H HLA-A*02:02H HLA-B*52:01H HLA-B*38:02H HLA-B*15:01H HLA-B*15:02H HLA-B*15:03H
  source 1..9: note = Severe acute respiratory syndrome coronavirus 2
AMYTPHTVL

SEQ ID NO: 3231 - protein, 9 aa, Severe acute respiratory syndrome-related coronavirus
  REGION 1..9: note = Table A: HLA-A*24:07H
  source 1..9: note = Severe acute respiratory syndrome coronavirus 2
MYTPHTVLQ

SEQ ID NO: 3232 - protein, 9 aa, Severe acute respiratory syndrome-related coronavirus
  REGION 1..9: note = Table A: HLA-A*02:11H HLA-A*68:02H HLA-A*02:05H HLA-A*02:06H HLA-A*02:07H HLA-A*02:08H HLA-A*02:01H HLA-A*02:03H HLA-A*34:02H HLA-B*54:01H
  source 1..9: note = Severe acute respiratory syndrome coronavirus 2
YTPHTVLQA

SEQ ID NO: 3233 - protein, 9 aa, Severe acute respiratory syndrome-related coronavirus
  REGION 1..9: note = Table A: HLA-B*42:01H HLA-B*56:01H HLA-B*55:02H HLA-A*68:02H HLA-B*35:03H HLA-C*15:05M HLA-B*55:01M HLA-B*51:01M HLA-C*08:01H HLA-B*38:02M HLA-B*39:06H HLA-B*54:01M HLA-B*07:02H HLA-B*07:04H HLA-B*07:05M HLA-B*13:02H
  source 1..9: note = Severe acute respiratory syndrome coronavirus 2
TPHTVLQAV

SEQ ID NO: 3234 - protein, 9 aa, Severe acute respiratory syndrome-related coronavirus
  REGION 1..9: note = Table A: HLA-B*54:01H
  source 1..9: note = Severe acute respiratory syndrome coronavirus 2
HTVLQAVGA

SEQ ID NO: 3235 - protein, 9 aa, Severe acute respiratory syndrome-related coronavirus
  REGION 1..9: note = Table A: HLA-B*38:02H HLA-B*13:02H
  source 1..9: note = Severe acute respiratory syndrome coronavirus 2
VLQAVGACV

SEQ ID NO: 3236 - protein, 9 aa, Severe acute respiratory syndrome-related coronavirus
  REGION 1..9: note = Table A: HLA-B*48:01H HLA-B*38:02H HLA-B*15:01H HLA-B*39:01H HLA-B*15:10H
  source 1..9: note = Severe acute respiratory syndrome coronavirus 2
LQAVGACVL

SEQ ID NO: 3237 - protein, 9 aa, Severe acute respiratory syndrome-related coronavirus
  REGION 1..9: note = Table A: HLA-A*11:303H HLA-C*15:05H HLA-B*14:01H HLA-A*02:01H HLA-A*02:02H HLA-A*02:03H HLA-B*38:02H
  source 1..9: note = Severe acute respiratory syndrome coronavirus 2
VLCNSQTSL

SEQ ID NO: 3238 - protein, 9 aa, Severe acute respiratory syndrome-related coronavirus
  REGION 1..9: note = Table A: HLA-B*39:06H
  source 1..9: note = Severe acute respiratory syndrome coronavirus 2
SQTSLRCGA

SEQ ID NO: 3239 - protein, 9 aa, Severe acute respiratory syndrome-related coronavirus
  REGION 1..9: note = Table A: HLA-B*18:01H
  source 1..9: note = Severe acute respiratory syndrome coronavirus 2
YDHVISTSH

SEQ ID NO: 3240 - protein, 9 aa, Severe acute respiratory syndrome-related coronavirus
  REGION 1..9: note = Table A: HLA-B*58:01H HLA-B*58:02H HLA-A*11:303H HLA-A*25:01H HLA-A*26:01M HLA-A*26:02H HLA-A*26:03M HLA-A*02:11H HLA-B*53:01M HLA-C*03:04H HLA-A*30:02M HLA-A*68:01H HLA-A*68:02M HLA-B*35:03M HLA-C*15:05H
  REGION 1..9: note = CONT. FROM ABOVE: HLA-A*02:04H HLA-A*02:05H HLA-A*02:06M HLA- A*02:07H HLA-A*02:08H HLA-A*02:01H HLA-A*02:02H HLA-A*02:03H HLA-A*34:01H HLA-A*34:02H HLA-B*35:01H HLA-B*35:07H HLA-C*08 :01H HLA-B*38:01H HLA-B*38:02H HLA-B*40:06H HLA-B*07:04H
  REGION 1..9: note = CONT. FROM ABOVE: HLA-B*15:01H HLA-B*15:02M HLA-B*39:01H HLA- B*57:03M HLA-B*13:01M HLA-B*13:02H HLA-B*15:10H HLA-C*07:04H HLA-A*66:01M
  source 1..9: note = Severe acute respiratory syndrome coronavirus 2
HVISTSHKL

SEQ ID NO: 3241 - protein, 9 aa, Severe acute respiratory syndrome-related coronavirus
  REGION 1..9: note = Table A: HLA-B*58:01H HLA-B*58:02H HLA-C*16:01M HLA-C*03:03H HLA-C*07:01H HLA-C*03:04M HLA-C*15:05M HLA-C*15:02H HLA-C*17:01H HLA-B*07:04H HLA-B*57:03H HLA-C*07:04M
  source 1..9: note = Severe acute respiratory syndrome coronavirus 2
ISTSHKLVL

SEQ ID NO: 3242 - protein, 9 aa, Severe acute respiratory syndrome-related coronavirus
  REGION 1..9: note = Table A: HLA-A*02:11H HLA-A*68:02H HLA-C*15:05H HLA-C*15:02M HLA-A*02:03H HLA-B*52:01H HLA-C*08:01H HLA-B*38:02H HLA-B*13:02M
  source 1..9: note = Severe acute respiratory syndrome coronavirus 2
TSHKLVLSV

SEQ ID NO: 3243 - protein, 9 aa, Severe acute respiratory syndrome-related coronavirus
  REGION 1..9: note = Table A: HLA-B*38:02H HLA-B*15:01H
  source 1..9: note = Severe acute respiratory syndrome coronavirus 2
KLVLSVNPY

SEQ ID NO: 3244 - protein, 9 aa, Severe acute respiratory syndrome-related coronavirus
  REGION 1..9: note = Table A: HLA-A*02:11M HLA-A*68:02H HLA-A*02:04H HLA-A*02:06H HLA-A*02:07H HLA-A*02:01H
  source 1..9: note = Severe acute respiratory syndrome coronavirus 2
LVLSVNPYV

SEQ ID NO: 3245 - protein, 9 aa, Severe acute respiratory syndrome-related coronavirus
  REGION 1..9: note = Table A: HLA-A*02:11H HLA-A*68:02H HLA-A*02:05M HLA-A*02:06H HLA-A*02:08M HLA-A*02:01H HLA-A*02:02H HLA-A*02:03H HLA-B*38:02H HLA-A*31:01H
  source 1..9: note = Severe acute respiratory syndrome coronavirus 2
SVNPYVCNA

SEQ ID NO: 3246 - protein, 9 aa, Severe acute respiratory syndrome-related coronavirus
  REGION 1..9: note = Table A: HLA-B*58:01H HLA-C*16:04H HLA-A*25:01H HLA-A*26:01H HLA-A*26:02H HLA-A*26:03H HLA-A*29:01M HLA-A*29:02M HLA-B*44:03H HLA-B*18:01H HLA-B*53:01H HLA-A*30:02H HLA-A*68:01M HLA-A*68:02M HLA-C*15:05H HLA-A*34:01M
  REGION 1..9: note = CONT. FROM ABOVE: HLA-A*34:02H HLA-B*35:01H HLA-B*35:08H HLA- B*35:07M HLA-B*38:02H HLA-B*15:01H HLA-B*15:02M HLA-B*39:01H HLA-B*07:05M HLA-A*66:01M
  source 1..9: note = Severe acute respiratory syndrome coronavirus 2
DVTDVTQLY

SEQ ID NO: 3247 - protein, 9 aa, Severe acute respiratory syndrome-related coronavirus
  REGION 1..9: note = Table A: HLA-B*58:01M HLA-A*11:303H HLA-A*36:01M HLA-A*01:01M HLA-C*04:01H HLA-C*04:03H HLA-C*03:04H HLA-C*15:05H HLA-C*15:02M HLA-A*02:07M HLA-A*02:01H HLA-C*17:01H HLA-C*08:01M HLA-C*08:02M HLA-B*38:02M
  REGION 1..9: note = CONT. FROM ABOVE: HLA-B*07:05H HLA-B*57:03H HLA-C*05:01M HLA- B*13:01H
  source 1..9: note = Severe acute respiratory syndrome coronavirus 2
VTDVTQLYL

SEQ ID NO: 3248 - protein, 9 aa, Severe acute respiratory syndrome-related coronavirus
  REGION 1..9: note = Table A: HLA-A*11:303H HLA-A*03:01H HLA-B*46:01H HLA-A*29:02H HLA-B*38:02H HLA-B*15:01M HLA-B*15:02H HLA-B*15:03H HLA-B*07:05H HLA-B*15:11H
  source 1..9: note = Severe acute respiratory syndrome coronavirus 2
QLYLGGMSY

SEQ ID NO: 3249 - protein, 9 aa, Severe acute respiratory syndrome-related coronavirus
  REGION 1..9: note = Table A: HLA-C*14:02M HLA-C*14:03M HLA-A*29:02M HLA-A*30:02H
  source 1..9: note = Severe acute respiratory syndrome coronavirus 2
LYLGGMSYY

SEQ ID NO: 3250 - protein, 9 aa, Severe acute respiratory syndrome-related coronavirus
  REGION 1..9: note = Table A: HLA-A*02:02M
  source 1..9: note = Severe acute respiratory syndrome coronavirus 2
YLGGMSYYC

SEQ ID NO: 3251 - protein, 9 aa, Severe acute respiratory syndrome-related coronavirus
  REGION 1..9: note = Table A: HLA-A*34:02H
  source 1..9: note = Severe acute respiratory syndrome coronavirus 2
MSYYCKSHK

SEQ ID NO: 3252 - protein, 9 aa, Severe acute respiratory syndrome-related coronavirus
  REGION 1..9: note = Table A: HLA-B*58:01M HLA-B*58:02H HLA-B*57:01M HLA-B*46:01H HLA-C*15:05H HLA-C*12:02H HLA-A*32:01H HLA-B*07:04H HLA-B*15:01H HLA-B*15:03H HLA-B*57:03H
  source 1..9: note = Severe acute respiratory syndrome coronavirus 2
KSHKPPISF

SEQ ID NO: 3253 - protein, 9 aa, Severe acute respiratory syndrome-related coronavirus
  REGION 1..9: note = Table A: HLA-B*38:02H
  source 1..9: note = Severe acute respiratory syndrome coronavirus 2
SHKPPISFP

SEQ ID NO: 3254 - protein, 9 aa, Severe acute respiratory syndrome-related coronavirus
  REGION 1..9: note = Table A: HLA-C*06:02H HLA-C*07:02H HLA-A*68:02H
  source 1..9: note = Severe acute respiratory syndrome coronavirus 2
HKPPISFPL

SEQ ID NO: 3255 - protein, 9 aa, Severe acute respiratory syndrome-related coronavirus
  REGION 1..9: note = Table A: HLA-B*56:01H HLA-B*55:02H HLA-C*15:05H HLA-B*55:01H
  source 1..9: note = Severe acute respiratory syndrome coronavirus 2
KPPISFPLC

SEQ ID NO: 3256 - protein, 9 aa, Severe acute respiratory syndrome-related coronavirus
  REGION 1..9: note = Table A: HLA-B*56:01H HLA-B*55:02H HLA-C*15:05H HLA-B*54:01H
  source 1..9: note = Severe acute respiratory syndrome coronavirus 2
PPISFPLCA

SEQ ID NO: 3257 - protein, 9 aa, Severe acute respiratory syndrome-related coronavirus
  REGION 1..9: note = Table A: HLA-C*16:04H
  source 1..9: note = Severe acute respiratory syndrome coronavirus 2
CANGQVFGL

SEQ ID NO: 3258 - protein, 9 aa, Severe acute respiratory syndrome-related coronavirus
  REGION 1..9: note = Table A: HLA-A*29:02H HLA-A*30:02H
  source 1..9: note = Severe acute respiratory syndrome coronavirus 2
ANGQVFGLY

SEQ ID NO: 3259 - protein, 9 aa, Severe acute respiratory syndrome-related coronavirus
  REGION 1..9: note = Table A: HLA-A*36:01H HLA-A*34:02H
  source 1..9: note = Severe acute respiratory syndrome coronavirus 2
NGQVFGLYK

SEQ ID NO: 3260 - protein, 9 aa, Severe acute respiratory syndrome-related coronavirus
  REGION 1..9: note = Table A: HLA-A*68:02H
  source 1..9: note = Severe acute respiratory syndrome coronavirus 2
NVTDFNAIA

SEQ ID NO: 3261 - protein, 9 aa, Severe acute respiratory syndrome-related coronavirus
  REGION 1..9: note = Table A: HLA-A*68:02H HLA-B*50:01H
  source 1..9: note = Severe acute respiratory syndrome coronavirus 2
TDFNAIATC

SEQ ID NO: 3262 - protein, 9 aa, Severe acute respiratory syndrome-related coronavirus
  REGION 1..9: note = Table A: HLA-B*35:03M HLA-B*35:02H
  source 1..9: note = Severe acute respiratory syndrome coronavirus 2
WTNAGDYIL

SEQ ID NO: 3263 - protein, 9 aa, Severe acute respiratory syndrome-related coronavirus
  REGION 1..9: note = Table A: HLA-B*50:01H
  source 1..9: note = Severe acute respiratory syndrome coronavirus 2
GDYILANTC

SEQ ID NO: 3264 - protein, 9 aa, Severe acute respiratory syndrome-related coronavirus
  REGION 1..9: note = Table A: HLA-A*74:01H HLA-A*34:01H
  source 1..9: note = Severe acute respiratory syndrome coronavirus 2
ILANTCTER

SEQ ID NO: 3265 - protein, 9 aa, Severe acute respiratory syndrome-related coronavirus
  REGION 1..9: note = Table A: HLA-C*15:05H
  source 1..9: note = Severe acute respiratory syndrome coronavirus 2
LANTCTERL

SEQ ID NO: 3266 - protein, 9 aa, Severe acute respiratory syndrome-related coronavirus
  REGION 1..9: note = Table A: HLA-C*16:01H
  source 1..9: note = Severe acute respiratory syndrome coronavirus 2
TCTERLKLF

SEQ ID NO: 3267 - protein, 9 aa, Severe acute respiratory syndrome-related coronavirus
  REGION 1..9: note = Table A: HLA-B*45:01M HLA-B*40:06M HLA-B*41:02H HLA-B*50:01M
  source 1..9: note = Severe acute respiratory syndrome coronavirus 2
TERLKLFAA

SEQ ID NO: 3268 - protein, 9 aa, Severe acute respiratory syndrome-related coronavirus
  REGION 1..9: note = Table A: HLA-A*74:01H HLA-A*03:01M HLA-A*03:02M HLA-A*11:01H HLA-A*11:02H HLA-A*36:01H
  source 1..9: note = Severe acute respiratory syndrome coronavirus 2
KLFAAETLK

SEQ ID NO: 3269 - protein, 9 aa, Severe acute respiratory syndrome-related coronavirus
  REGION 1..9: note = Table A: HLA-C*16:04H
  source 1..9: note = Severe acute respiratory syndrome coronavirus 2
FAAETLKAT

SEQ ID NO: 3270 - protein, 9 aa, Severe acute respiratory syndrome-related coronavirus
  REGION 1..9: note = Table A: HLA-B*57:01H HLA-B*46:01M HLA-C*12:02H HLA-A*02:02H HLA-B*15:13M HLA-B*38:01H HLA-B*38:02H HLA-B*15:01H HLA-B*15:02H HLA-B*15:03M HLA-B*57:03H HLA-B*13:01M HLA-B*15:11H
  source 1..9: note = Severe acute respiratory syndrome coronavirus 2
TLKATEETF

SEQ ID NO: 3271 - protein, 9 aa, Severe acute respiratory syndrome-related coronavirus
  REGION 1..9: note = Table A: HLA-B*58:01M HLA-B*58:02H HLA-A*11:303H HLA-C*16:01H HLA-B*57:01H HLA-C*12:05H HLA-A*02:11H HLA-B*53:01H HLA-C*03:04H HLA-A*68:02H HLA-B*35:03H HLA-C*15:05H HLA-C*12:03H HLA-C*15:02M HLA-A*02:05M
  REGION 1..9: note = CONT. FROM ABOVE: HLA-A*02:06M HLA-A*02:08H HLA-A*02:02M HLA- B*35:02H HLA-C*17:01H HLA-C*08:01M HLA-B*35:12H HLA-B*38:02H HLA-B*40:06H HLA-B*57:03H HLA-B*13:01H HLA-B*13:02H HLA-C*07 :04H
  source 1..9: note = Severe acute respiratory syndrome coronavirus 2
KATEETFKL

SEQ ID NO: 3272 - protein, 9 aa, Severe acute respiratory syndrome-related coronavirus
  REGION 1..9: note = Table A: HLA-B*58:01H HLA-B*44:02M HLA-B*44:05H HLA-C*16:04H HLA-A*36:01H HLA-A*29:02H HLA-B*45:01H HLA-B*44:03H HLA-B*18:01H HLA-C*07:01H HLA-B*35:01H HLA-B*38:02H HLA-B*07:05M
  source 1..9: note = Severe acute respiratory syndrome coronavirus 2
TEETFKLSY

SEQ ID NO: 3273 - protein, 9 aa, Severe acute respiratory syndrome-related coronavirus
  REGION 1..9: note = Table A: HLA-A*68:02H HLA-B*57:03H
  source 1..9: note = Severe acute respiratory syndrome coronavirus 2
ETFKLSYGI

SEQ ID NO: 3274 - protein, 9 aa, Severe acute respiratory syndrome-related coronavirus
  REGION 1..9: note = Table A: HLA-A*02:11H HLA-A*02:04M HLA-A*02:05H HLA-A*02:06H HLA-A*02:07H HLA-A*02:08M HLA-B*14:01H HLA-A*02:01M HLA-A*02:02H HLA-A*02:03H HLA-B*38:02M HLA-B*40:06H HLA-B*13:02H
  source 1..9: note = Severe acute respiratory syndrome coronavirus 2
KLSYGIATV

SEQ ID NO: 3275 - protein, 9 aa, Severe acute respiratory syndrome-related coronavirus
  REGION 1..9: note = Table A: HLA-A*74:01M HLA-A*33:03H HLA-A*68:01M HLA-A*34:01M HLA-A*34:02M HLA-A*31:01H HLA-A*66:01M
  source 1..9: note = Severe acute respiratory syndrome coronavirus 2
LSYGIATVR

SEQ ID NO: 3276 - protein, 9 aa, Severe acute respiratory syndrome-related coronavirus
  REGION 1..9: note = Table A: HLA-A*11:303H HLA-C*16:01H HLA-B*46:01H HLA-C*06:02H HLA-C*03:03H HLA-C*12:05M HLA-A*02:11H HLA-C*03:02H HLA-C*03:04H HLA-A*68:02H HLA-C*15:05H HLA-C*12:03H HLA-C*15:02M HLA-A*02:04H HLA-A*02:05H
  REGION 1..9: note = CONT. FROM ABOVE: HLA-A*02:06H HLA-A*02:01H HLA-A*02:02H HLA- A*02:03M HLA-B*51:01H HLA-C*08:01H HLA-B*38:02M HLA-B*13:02H HLA-B*49:01H
  source 1..9: note = Severe acute respiratory syndrome coronavirus 2
YGIATVREV

SEQ ID NO: 3277 - protein, 9 aa, Severe acute respiratory syndrome-related coronavirus
  REGION 1..9: note = Table A: HLA-B*48:01H HLA-A*02:11H HLA-C*15:05H HLA-A*02:05H HLA-A*02:02M HLA-C*08:01H HLA-B*38:02H HLA-B*07:02M HLA-B*07:04H HLA-B*07:05H HLA-B*41:02H HLA-B*13:01H
  source 1..9: note = Severe acute respiratory syndrome coronavirus 2
GIATVREVL

SEQ ID NO: 3278 - protein, 9 aa, Severe acute respiratory syndrome-related coronavirus
  REGION 1..9: note = Table A: HLA-A*74:01M HLA-A*33:01H HLA-A*33:03M HLA-A*26:03H HLA-A*68:01H HLA-A*34:01M HLA-A*34:02H HLA-A*31:01H HLA-A*66:01M
  source 1..9: note = Severe acute respiratory syndrome coronavirus 2
TVREVLSDR

SEQ ID NO: 3279 - protein, 9 aa, Severe acute respiratory syndrome-related coronavirus
  REGION 1..9: note = Table A: HLA-B*40:01H HLA-B*40:02H HLA-B*41:02H
  source 1..9: note = Severe acute respiratory syndrome coronavirus 2
REVLSDREL

SEQ ID NO: 3280 - protein, 9 aa, Severe acute respiratory syndrome-related coronavirus
  REGION 1..9: note = Table A: HLA-A*02:11M HLA-C*15:02M HLA-A*02:04M HLA-A*02:05H HLA-A*02:06H HLA-A*02:07H HLA-B*14:01H HLA-A*02:01M HLA-A*02:02H HLA-A*02:03M HLA-C*17:01H HLA-C*08:01H HLA-B*38:02M HLA-B*13:01M HLA-B*13:02H HLA-C*07:04H
  source 1..9: note = Severe acute respiratory syndrome coronavirus 2
VLSDRELHL

SEQ ID NO: 3281 - protein, 9 aa, Severe acute respiratory syndrome-related coronavirus
  REGION 1..9: note = Table A: HLA-B*44:03H
  source 1..9: note = Severe acute respiratory syndrome coronavirus 2
SDRELHLSW

SEQ ID NO: 3282 - protein, 9 aa, Severe acute respiratory syndrome-related coronavirus
  REGION 1..9: note = Table A: HLA-B*45:01H HLA-B*40:02H HLA-B*40:06H HLA-B*13:02H HLA-B*49:01H
  source 1..9: note = Severe acute respiratory syndrome coronavirus 2
RELHLSWEV

SEQ ID NO: 3283 - protein, 9 aa, Severe acute respiratory syndrome-related coronavirus
  REGION 1..9: note = Table A: HLA-A*74:01H HLA-A*34:01H HLA-A*66:01H
  source 1..9: note = Severe acute respiratory syndrome coronavirus 2
LSWEVGKPR

SEQ ID NO: 3284 - protein, 9 aa, Severe acute respiratory syndrome-related coronavirus
  REGION 1..9: note = Table A: HLA-B*40:06H HLA-B*50:01M
  source 1..9: note = Severe acute respiratory syndrome coronavirus 2
WEVGKPRPP

SEQ ID NO: 3285 - protein, 9 aa, Severe acute respiratory syndrome-related coronavirus
  REGION 1..9: note = Table A: HLA-A*33:03H HLA-A*26:03H HLA-A*68:02H HLA-A*34:01M HLA-A*34:02H HLA-B*07:04H HLA-A*66:01H
  source 1..9: note = Severe acute respiratory syndrome coronavirus 2
EVGKPRPPL

SEQ ID NO: 3286 - protein, 9 aa, Severe acute respiratory syndrome-related coronavirus
  REGION 1..9: note = Table A: HLA-B*55:01H
  source 1..9: note = Severe acute respiratory syndrome coronavirus 2
KPRPPLNRN

SEQ ID NO: 3287 - protein, 9 aa, Severe acute respiratory syndrome-related coronavirus
  REGION 1..9: note = Table A: HLA-C*15:05H HLA-B*07:04H
  source 1..9: note = Severe acute respiratory syndrome coronavirus 2
RPPLNRNYV

SEQ ID NO: 3288 - protein, 9 aa, Severe acute respiratory syndrome-related coronavirus
  REGION 1..9: note = Table A: HLA-A*24:07H
  source 1..9: note = Severe acute respiratory syndrome coronavirus 2
PPLNRNYVF

SEQ ID NO: 3289 - protein, 9 aa, Severe acute respiratory syndrome-related coronavirus
  REGION 1..9: note = Table A: HLA-B*27:05H HLA-B*27:02H
  source 1..9: note = Severe acute respiratory syndrome coronavirus 2
NRNYVFTGY

SEQ ID NO: 3290 - protein, 9 aa, Severe acute respiratory syndrome-related coronavirus
  REGION 1..9: note = Table A: HLA-A*74:01H
  source 1..9: note = Severe acute respiratory syndrome coronavirus 2
RNYVFTGYR

SEQ ID NO: 3291 - protein, 9 aa, Severe acute respiratory syndrome-related coronavirus
  REGION 1..9: note = Table A: HLA-A*24:07H HLA-C*08:01H
  source 1..9: note = Severe acute respiratory syndrome coronavirus 2
NYVFTGYRV

SEQ ID NO: 3292 - protein, 9 aa, Severe acute respiratory syndrome-related coronavirus
  REGION 1..9: note = Table A: HLA-B*54:01H
  source 1..9: note = Severe acute respiratory syndrome coronavirus 2
YVFTGYRVT

SEQ ID NO: 3293 - protein, 9 aa, Severe acute respiratory syndrome-related coronavirus
  REGION 1..9: note = Table A: HLA-C*14:03H HLA-A*30:01H HLA-A*24:07H HLA-A*23:01H
  source 1..9: note = Severe acute respiratory syndrome coronavirus 2
VFTGYRVTK

SEQ ID NO: 3294 - protein, 9 aa, Severe acute respiratory syndrome-related coronavirus
  REGION 1..9: note = Table A: HLA-B*58:02H HLA-B*57:03M
  source 1..9: note = Severe acute respiratory syndrome coronavirus 2
VTKNSKVQI

SEQ ID NO: 3295 - protein, 9 aa, Severe acute respiratory syndrome-related coronavirus
  REGION 1..9: note = Table A: HLA-A*25:01H HLA-B*46:01M HLA-A*26:01M HLA-A*26:02H HLA-A*01:01H HLA-A*30:02H HLA-C*12:02M HLA-B*35:01H HLA-B*38:02H HLA-B*15:01H HLA-B*15:02M HLA-B*15:11H
  source 1..9: note = Severe acute respiratory syndrome coronavirus 2
NSKVQIGEY

SEQ ID NO: 3296 - protein, 9 aa, Severe acute respiratory syndrome-related coronavirus
  REGION 1..9: note = Table A: HLA-B*58:01M HLA-B*58:02H HLA-B*57:01H HLA-A*30:02H HLA-A*24:02H HLA-A*24:07H HLA-A*23:01H HLA-A*32:01H HLA-B*15:01M HLA-B*57:03H HLA-B*13:01M
  source 1..9: note = Severe acute respiratory syndrome coronavirus 2
KVQIGEYTF

SEQ ID NO: 3297 - protein, 9 aa, Severe acute respiratory syndrome-related coronavirus
  REGION 1..9: note = Table A: HLA-A*03:02M HLA-A*11:01M HLA-A*11:02H HLA-A*36:01H HLA-A*34:02M HLA-C*07:27H
  source 1..9: note = Severe acute respiratory syndrome coronavirus 2
QIGEYTFEK

SEQ ID NO: 3298 - protein, 9 aa, Severe acute respiratory syndrome-related coronavirus
  REGION 1..9: note = Table A: HLA-B*18:01H HLA-B*27:02H HLA-B*35:01H HLA-C*08:03H HLA-B*38:02H HLA-B*15:01H HLA-B*15:03H HLA-B*39:01H HLA-B*07:05H
  source 1..9: note = Severe acute respiratory syndrome coronavirus 2
GDYGDAVVY

SEQ ID NO: 3299 - protein, 9 aa, Severe acute respiratory syndrome-related coronavirus
  REGION 1..9: note = Table A: HLA-A*33:01H HLA-A*33:03H HLA-A*68:01M HLA-A*34:01M HLA-A*34:02H HLA-A*31:01H HLA-A*66:01H
  source 1..9: note = Severe acute respiratory syndrome coronavirus 2
DYGDAVVYR

SEQ ID NO: 3300 - protein, 9 aa, Severe acute respiratory syndrome-related coronavirus
  REGION 1..9: note = Table A: HLA-B*58:01M HLA-B*58:02H HLA-C*14:02H HLA-C*14:03M HLA-A*11:303H HLA-C*16:04H HLA-A*03:01M HLA-A*03:02H HLA-A*11:01H HLA-A*11:02H HLA-B*57:01H HLA-A*25:01H HLA-B*46:01H HLA-A*26:01M HLA-A*26:02H HLA-A*26:03H
  REGION 1..9: note = CONT. FROM ABOVE: HLA-A*29:01M HLA-A*29:02M HLA-B*53:01H HLA- C*03:02M HLA-A*30:02H HLA-C*15:05M HLA-C*12:02H HLA-C*12:03M HLA-A*02:03H HLA-A*34:01M HLA-A*34:02M HLA-C*07:27H HLA-B*35 :01M HLA-B*35:07M HLA-B*52:01H HLA-B*38:02H HLA-A*32:01H
  REGION 1..9: note = CONT. FROM ABOVE: HLA-B*15:01H HLA-B*15:02H HLA-B*15:03H HLA- B*07:05H HLA-B*57:03M HLA-C*02:02M HLA-B*15:11H HLA-A*66:01H
  source 1..9: note = Severe acute respiratory syndrome coronavirus 2
VVYRGTTTY

SEQ ID NO: 3301 - protein, 9 aa, Severe acute respiratory syndrome-related coronavirus
  REGION 1..9: note = Table A: HLA-A*33:03H
  source 1..9: note = Severe acute respiratory syndrome coronavirus 2
VYRGTTTYK

SEQ ID NO: 3302 - protein, 9 aa, Severe acute respiratory syndrome-related coronavirus
  REGION 1..9: note = Table A: HLA-C*07:01H HLA-C*07:02H
  source 1..9: note = Severe acute respiratory syndrome coronavirus 2
YRGTTTYKL

SEQ ID NO: 3303 - protein, 9 aa, Severe acute respiratory syndrome-related coronavirus
  REGION 1..9: note = Table A: HLA-C*15:05H HLA-C*15:02H HLA-B*13:02M
  source 1..9: note = Severe acute respiratory syndrome coronavirus 2
GTTTYKLNV

SEQ ID NO: 3304 - protein, 9 aa, Severe acute respiratory syndrome-related coronavirus
  REGION 1..9: note = Table A: HLA-A*30:02H
  source 1..9: note = Severe acute respiratory syndrome coronavirus 2
TYKLNVGDY

SEQ ID NO: 3305 - protein, 9 aa, Severe acute respiratory syndrome-related coronavirus
  REGION 1..9: note = Table A: HLA-B*38:02H HLA-B*15:03H
  source 1..9: note = Severe acute respiratory syndrome coronavirus 2
YKLNVGDYF

SEQ ID NO: 3306 - protein, 9 aa, Severe acute respiratory syndrome-related coronavirus
  REGION 1..9: note = Table A: HLA-A*02:11M HLA-A*02:02M HLA-B*13:02H
  source 1..9: note = Severe acute respiratory syndrome coronavirus 2
KLNVGDYFV

SEQ ID NO: 3307 - protein, 9 aa, Severe acute respiratory syndrome-related coronavirus
  REGION 1..9: note = Table A: HLA-C*14:02H HLA-C*14:03M HLA-A*24:07H HLA-B*38:02H HLA-B*49:01H
  source 1..9: note = Severe acute respiratory syndrome coronavirus 2
YFVLTSHTV

SEQ ID NO: 3308 - protein, 9 aa, Severe acute respiratory syndrome-related coronavirus
  REGION 1..9: note = Table A: HLA-A*11:303H HLA-C*03:04H HLA-B*38:02H HLA-B*15:02H HLA-C*07:04H
  source 1..9: note = Severe acute respiratory syndrome coronavirus 2
FVLTSHTVM

SEQ ID NO: 3309 - protein, 9 aa, Severe acute respiratory syndrome-related coronavirus
  REGION 1..9: note = Table A: HLA-A*68:02H
  source 1..9: note = Severe acute respiratory syndrome coronavirus 2
LTSHTVMPL

SEQ ID NO: 3310 - protein, 9 aa, Severe acute respiratory syndrome-related coronavirus
  REGION 1..9: note = Table A: HLA-B*38:02H HLA-B*39:06H HLA-B*39:01H HLA-B*15:10H
  source 1..9: note = Severe acute respiratory syndrome coronavirus 2
SHTVMPLSA

SEQ ID NO: 3311 - protein, 9 aa, Severe acute respiratory syndrome-related coronavirus
  REGION 1..9: note = Table A: HLA-A*68:02H HLA-A*34:02H
  source 1..9: note = Severe acute respiratory syndrome coronavirus 2
HTVMPLSAP

SEQ ID NO: 3312 - protein, 9 aa, Severe acute respiratory syndrome-related coronavirus
  REGION 1..9: note = Table A: HLA-C*14:03H HLA-C*04:03H HLA-A*02:11H HLA-C*15:05H HLA-C*01:02M HLA-A*02:07M HLA-A*02:01H HLA-A*24:02H HLA-A*24:07H HLA-B*52:01H HLA-A*23:01H HLA-B*38:02H
  source 1..9: note = Severe acute respiratory syndrome coronavirus 2
VMPLSAPTL

SEQ ID NO: 3313 - protein, 9 aa, Severe acute respiratory syndrome-related coronavirus
  REGION 1..9: note = Table A: HLA-B*56:01H HLA-B*55:02H HLA-B*35:03H HLA-C*15:05H HLA-B*51:01H HLA-B*54:01M
  source 1..9: note = Severe acute respiratory syndrome coronavirus 2
MPLSAPTLV

SEQ ID NO: 3314 - protein, 9 aa, Severe acute respiratory syndrome-related coronavirus
  REGION 1..9: note = Table A: HLA-C*15:05H HLA-B*07:05H
  source 1..9: note = Severe acute respiratory syndrome coronavirus 2
APTLVPQEH

SEQ ID NO: 3315 - protein, 9 aa, Severe acute respiratory syndrome-related coronavirus
  REGION 1..9: note = Table A: HLA-A*02:11M HLA-A*68:02H HLA-A*02:04H HLA-A*02:05H HLA-A*02:06H HLA-A*02:07H HLA-A*02:01H HLA-A*02:02H HLA-A*02:03H HLA-B*38:02M HLA-B*13:02H
  source 1..9: note = Severe acute respiratory syndrome coronavirus 2
TLVPQEHYV

SEQ ID NO: 3316 - protein, 9 aa, Severe acute respiratory syndrome-related coronavirus
  REGION 1..9: note = Table A: HLA-B*42:01H HLA-B*56:01H HLA-B*53:01H HLA-B*55:02H HLA-B*35:03H HLA-C*15:05M HLA-B*55:01H HLA-B*51:01H HLA-C*08:01M HLA-B*35:12H HLA-B*38:02H HLA-B*54:01H HLA-B*07:02H HLA-B*07:04M HLA-B*07:05H
  source 1..9: note = Severe acute respiratory syndrome coronavirus 2
VPQEHYVRI

SEQ ID NO: 3317 - protein, 9 aa, Severe acute respiratory syndrome-related coronavirus
  REGION 1..9: note = Table A: HLA-B*14:02H HLA-B*14:01H HLA-B*38:01H HLA-B*38:02M HLA-B*39:06H HLA-B*39:01H HLA-B*15:10M
  source 1..9: note = Severe acute respiratory syndrome coronavirus 2
EHYVRITGL

SEQ ID NO: 3318 - protein, 9 aa, Severe acute respiratory syndrome-related coronavirus
  REGION 1..9: note = Table A: HLA-A*29:02H HLA-A*30:02M
  source 1..9: note = Severe acute respiratory syndrome coronavirus 2
HYVRITGLY

SEQ ID NO: 3319 - protein, 9 aa, Severe acute respiratory syndrome-related coronavirus
  REGION 1..9: note = Table A: HLA-B*58:01H HLA-B*58:02H HLA-C*03:03H HLA-A*02:11H HLA-C*03:04H HLA-C*15:05H HLA-C*15:02M HLA-A*02:04H HLA-A*02:06H HLA-A*02:07H HLA-A*02:02H HLA-C*17:01H HLA-A*24:07H HLA-C*08:01H HLA-A*23:01H HLA-A*32:01H
  REGION 1..9: note = CONT. FROM ABOVE: HLA-B*40:06H HLA-B*57:03M HLA-B*13:01H HLA- B*13:02H
  source 1..9: note = Severe acute respiratory syndrome coronavirus 2
RITGLYPTL

SEQ ID NO: 3320 - protein, 9 aa, Severe acute respiratory syndrome-related coronavirus
  REGION 1..9: note = Table A: HLA-B*51:01H HLA-B*13:02H
  source 1..9: note = Severe acute respiratory syndrome coronavirus 2
TGLYPTLNI

SEQ ID NO: 3321 - protein, 9 aa, Severe acute respiratory syndrome-related coronavirus
  REGION 1..9: note = Table A: HLA-C*04:03H HLA-A*02:11H HLA-C*15:05H HLA-A*02:07H HLA-C*08:02M HLA-B*38:02H HLA-C*05:01M
  source 1..9: note = Severe acute respiratory syndrome coronavirus 2
ISDEFSSNV

SEQ ID NO: 3322 - protein, 9 aa, Severe acute respiratory syndrome-related coronavirus
  REGION 1..9: note = Table A: HLA-B*45:01H
  source 1..9: note = Severe acute respiratory syndrome coronavirus 2
SDEFSSNVA

SEQ ID NO: 3323 - protein, 9 aa, Severe acute respiratory syndrome-related coronavirus
  REGION 1..9: note = Table A: HLA-B*18:01H HLA-B*07:05H
  source 1..9: note = Severe acute respiratory syndrome coronavirus 2
DEFSSNVAN

SEQ ID NO: 3324 - protein, 9 aa, Severe acute respiratory syndrome-related coronavirus
  REGION 1..9: note = Table A: HLA-A*33:03H HLA-A*26:01H HLA-A*26:02H HLA-A*26:03M HLA-A*29:01H HLA-A*29:02H HLA-A*34:02H HLA-B*38:02H HLA-B*07:05H
  source 1..9: note = Severe acute respiratory syndrome coronavirus 2
EFSSNVANY

SEQ ID NO: 3325 - protein, 9 aa, Severe acute respiratory syndrome-related coronavirus
  REGION 1..9: note = Table A: HLA-A*11:303M HLA-A*74:01H HLA-A*03:01H HLA-A*03:02H HLA-A*11:01H HLA-A*11:02H HLA-A*36:01H HLA-A*33:03H HLA-A*30:02M HLA-A*68:01H HLA-A*34:02M HLA-C*07:27H HLA-A*31:01H
  source 1..9: note = Severe acute respiratory syndrome coronavirus 2
SSNVANYQK

SEQ ID NO: 3326 - protein, 9 aa, Severe acute respiratory syndrome-related coronavirus
  REGION 1..9: note = Table A: HLA-A*68:02H
  source 1..9: note = Severe acute respiratory syndrome coronavirus 2
SNVANYQKV

SEQ ID NO: 3327 - protein, 9 aa, Severe acute respiratory syndrome-related coronavirus
  REGION 1..9: note = Table A: HLA-A*11:303H HLA-C*16:01H HLA-B*08:01H HLA-C*03:04H HLA-C*15:05M
  source 1..9: note = Severe acute respiratory syndrome coronavirus 2
VANYQKVGM

SEQ ID NO: 3328 - protein, 9 aa, Severe acute respiratory syndrome-related coronavirus
  REGION 1..9: note = Table A: HLA-A*33:03M
  source 1..9: note = Severe acute respiratory syndrome coronavirus 2
NYQKVGMQK

SEQ ID NO: 3329 - protein, 9 aa, Severe acute respiratory syndrome-related coronavirus
  REGION 1..9: note = Table A: HLA-B*46:01M HLA-A*26:01H HLA-A*30:02M HLA-C*12:02H HLA-C*12:03H HLA-B*38:02H HLA-B*15:01H HLA-B*15:02H HLA-B*15:03H HLA-C*02:02M HLA-B*15:11H
  source 1..9: note = Severe acute respiratory syndrome coronavirus 2
YQKVGMQKY

SEQ ID NO: 3330 - protein, 9 aa, Severe acute respiratory syndrome-related coronavirus
  REGION 1..9: note = Table A: HLA-A*11:303H HLA-B*08:01H HLA-C*03:04H HLA-C*15:05H HLA-B*14:02H HLA-B*14:01H HLA-B*07:05H HLA-C*07:04H
  source 1..9: note = Severe acute respiratory syndrome coronavirus 2
VGMQKYSTL

SEQ ID NO: 3331 - protein, 9 aa, Severe acute respiratory syndrome-related coronavirus
  REGION 1..9: note = Table A: HLA-A*11:303H HLA-A*03:01M HLA-A*03:02M HLA-A*11:01M HLA-A*11:02M HLA-A*30:02H HLA-A*34:01H HLA-A*34:02M HLA-C*07:27H HLA-B*15:01H HLA-B*13:02H
  source 1..9: note = Severe acute respiratory syndrome coronavirus 2
LQGPPGTGK

SEQ ID NO: 3332 - protein, 9 aa, Severe acute respiratory syndrome-related coronavirus
  REGION 1..9: note = Table A: HLA-B*48:01H
  source 1..9: note = Severe acute respiratory syndrome coronavirus 2
GKSHFAIGL

SEQ ID NO: 3333 - protein, 9 aa, Severe acute respiratory syndrome-related coronavirus
  REGION 1..9: note = Table A: HLA-B*38:01H HLA-B*38:02H HLA-B*39:06H HLA-B*39:01H HLA-B*15:10H
  source 1..9: note = Severe acute respiratory syndrome coronavirus 2
SHFAIGLAL

SEQ ID NO: 3334 - protein, 9 aa, Severe acute respiratory syndrome-related coronavirus
  REGION 1..9: note = Table A: HLA-A*29:02H
  source 1..9: note = Severe acute respiratory syndrome coronavirus 2
HFAIGLALY

SEQ ID NO: 3335 - protein, 9 aa, Severe acute respiratory syndrome-related coronavirus
  REGION 1..9: note = Table A: HLA-C*16:01H HLA-C*16:04H HLA-C*06:02H HLA-A*29:01H HLA-A*29:02M HLA-B*53:01H HLA-C*03:02H HLA-C*12:02H HLA-C*12:03H HLA-A*34:02H HLA-B*35:01H HLA-B*35:07H HLA-B*38:02M HLA-C*02:02H
  source 1..9: note = Severe acute respiratory syndrome coronavirus 2
FAIGLALYY

SEQ ID NO: 3336 - protein, 9 aa, Severe acute respiratory syndrome-related coronavirus
  REGION 1..9: note = Table A: HLA-A*02:04H
  source 1..9: note = Severe acute respiratory syndrome coronavirus 2
GLALYYPSA

SEQ ID NO: 3337 - protein, 9 aa, Severe acute respiratory syndrome-related coronavirus
  REGION 1..9: note = Table A: HLA-A*66:01H
  source 1..9: note = Severe acute respiratory syndrome coronavirus 2
LALYYPSAR

SEQ ID NO: 3338 - protein, 9 aa, Severe acute respiratory syndrome-related coronavirus
  REGION 1..9: note = Table A: HLA-A*02:11H HLA-B*52:01H HLA-B*38:02H HLA-B*13:02H
  source 1..9: note = Severe acute respiratory syndrome coronavirus 2
ALYYPSARI

SEQ ID NO: 3339 - protein, 9 aa, Severe acute respiratory syndrome-related coronavirus
  REGION 1..9: note = Table A: HLA-C*14:02H HLA-C*14:03M HLA-C*06:02H
  source 1..9: note = Severe acute respiratory syndrome coronavirus 2
LYYPSARIV

SEQ ID NO: 3340 - protein, 9 aa, Severe acute respiratory syndrome-related coronavirus
  REGION 1..9: note = Table A: HLA-C*14:02H HLA-C*14:03H HLA-C*06:02H HLA-A*29:02H HLA-C*07:02M HLA-A*24:07H
  source 1..9: note = Severe acute respiratory syndrome coronavirus 2
YYPSARIVY

SEQ ID NO: 3341 - protein, 9 aa, Severe acute respiratory syndrome-related coronavirus
  REGION 1..9: note = Table A: HLA-B*42:01H HLA-B*56:01H HLA-B*08:01H HLA-B*53:01M HLA-B*55:02M HLA-A*68:02H HLA-B*35:03H HLA-C*15:05H HLA-B*55:01H HLA-A*34:01H HLA-B*51:01H HLA-B*35:07H HLA-B*54:01M HLA-B*07:02H HLA-B*07:04H
  source 1..9: note = Severe acute respiratory syndrome coronavirus 2
YPSARIVYT

SEQ ID NO: 3342 - protein, 9 aa, Severe acute respiratory syndrome-related coronavirus
  REGION 1..9: note = Table A: HLA-B*56:01H HLA-A*68:02H
  source 1..9: note = Severe acute respiratory syndrome coronavirus 2
PSARIVYTA

SEQ ID NO: 3343 - protein, 9 aa, Severe acute respiratory syndrome-related coronavirus
  REGION 1..9: note = Table A: HLA-B*54:01H
  source 1..9: note = Severe acute respiratory syndrome coronavirus 2
SARIVYTAC

SEQ ID NO: 3344 - protein, 9 aa, Severe acute respiratory syndrome-related coronavirus
  REGION 1..9: note = Table A: HLA-A*68:02H
  source 1..9: note = Severe acute respiratory syndrome coronavirus 2
YTACSHAAV

SEQ ID NO: 3345 - protein, 9 aa, Severe acute respiratory syndrome-related coronavirus
  REGION 1..9: note = Table A: HLA-A*11:303H HLA-C*15:05H HLA-C*08:01H HLA-B*38:02H HLA-B*39:01H
  source 1..9: note = Severe acute respiratory syndrome coronavirus 2
CSHAAVDAL

SEQ ID NO: 3346 - protein, 9 aa, Severe acute respiratory syndrome-related coronavirus
  REGION 1..9: note = Table A: HLA-B*38:01H HLA-B*38:02M HLA-B*39:06H HLA-B*39:01H HLA-B*15:10H
  source 1..9: note = Severe acute respiratory syndrome coronavirus 2
SHAAVDALC

SEQ ID NO: 3347 - protein, 9 aa, Severe acute respiratory syndrome-related coronavirus
  REGION 1..9: note = Table A: HLA-A*11:303M HLA-A*03:01H HLA-A*03:02H HLA-A*11:01M HLA-A*11:02M HLA-B*46:01M HLA-C*03:03H HLA-C*03:02H HLA-A*68:01H HLA-A*34:01H HLA-A*34:02M HLA-C*07:27M HLA-C*08:01H HLA-A*66:01H
  source 1..9: note = Severe acute respiratory syndrome coronavirus 2
AAVDALCEK

SEQ ID NO: 3348 - protein, 9 aa, Severe acute respiratory syndrome-related coronavirus
  REGION 1..9: note = Table A: HLA-A*34:02H
  source 1..9: note = Severe acute respiratory syndrome coronavirus 2
DALCEKALK

SEQ ID NO: 3349 - protein, 9 aa, Severe acute respiratory syndrome-related coronavirus
  REGION 1..9: note = Table A: HLA-A*03:01H HLA-A*29:01M HLA-A*29:02H HLA-C*15:05H HLA-B*38:02H HLA-B*15:01H HLA-B*15:02H
  source 1..9: note = Severe acute respiratory syndrome coronavirus 2
ALCEKALKY

SEQ ID NO: 3350 - protein, 9 aa, Severe acute respiratory syndrome-related coronavirus
  REGION 1..9: note = Table A: HLA-A*74:01H HLA-A*30:01M HLA-A*30:02H
  source 1..9: note = Severe acute respiratory syndrome coronavirus 2
ALKYLPIDK

SEQ ID NO: 3351 - protein, 9 aa, Severe acute respiratory syndrome-related coronavirus
  REGION 1..9: note = Table A: HLA-B*53:01H HLA-B*51:01M
  source 1..9: note = Severe acute respiratory syndrome coronavirus 2
LPIDKCSRI

SEQ ID NO: 3352 - protein, 9 aa, Severe acute respiratory syndrome-related coronavirus
  REGION 1..9: note = Table A: HLA-A*74:01M
  source 1..9: note = Severe acute respiratory syndrome coronavirus 2
KCSRIIPAR

SEQ ID NO: 3353 - protein, 9 aa, Severe acute respiratory syndrome-related coronavirus
  REGION 1..9: note = Table A: HLA-B*27:05H
  source 1..9: note = Severe acute respiratory syndrome coronavirus 2
SRIIPARAR

SEQ ID NO: 3354 - protein, 9 aa, Severe acute respiratory syndrome-related coronavirus
  REGION 1..9: note = Table A: HLA-B*38:02H
  source 1..9: note = Severe acute respiratory syndrome coronavirus 2
ARVECFDKF

SEQ ID NO: 3355 - protein, 9 aa, Severe acute respiratory syndrome-related coronavirus
  REGION 1..9: note = Table A: HLA-B*58:01M HLA-A*03:01H HLA-A*03:02H HLA-A*36:01M HLA-B*46:01H HLA-A*29:01H HLA-A*29:02H HLA-A*30:02H HLA-A*02:08H HLA-B*35:01H HLA-B*38:02M HLA-A*32:01H HLA-B*15:01H HLA-B*15:02H HLA-B*07:05H HLA-B*57:03H
  source 1..9: note = Severe acute respiratory syndrome coronavirus 2
KVNSTLEQY

SEQ ID NO: 3356 - protein, 9 aa, Severe acute respiratory syndrome-related coronavirus
  REGION 1..9: note = Table A: HLA-A*68:02H HLA-A*02:06H HLA-A*02:01H
  source 1..9: note = Severe acute respiratory syndrome coronavirus 2
STLEQYVFC

SEQ ID NO: 3357 - protein, 9 aa, Severe acute respiratory syndrome-related coronavirus
  REGION 1..9: note = Table A: HLA-B*45:01H HLA-B*40:02H HLA-B*40:06H HLA-B*49:01M HLA-B*50:01H
  source 1..9: note = Severe acute respiratory syndrome coronavirus 2
LEQYVFCTV

SEQ ID NO: 3358 - protein, 9 aa, Severe acute respiratory syndrome-related coronavirus
  REGION 1..9: note = Table A: HLA-A*68:02H HLA-B*38:02H HLA-B*15:02M
  source 1..9: note = Severe acute respiratory syndrome coronavirus 2
YVFCTVNAL

SEQ ID NO: 3359 - protein, 9 aa, Severe acute respiratory syndrome-related coronavirus
  REGION 1..9: note = Table A: HLA-C*01:02H HLA-A*02:07H HLA-A*02:02H HLA-B*38:02H HLA-B*13:02H
  source 1..9: note = Severe acute respiratory syndrome coronavirus 2
ALPETTADI

SEQ ID NO: 3360 - protein, 9 aa, Severe acute respiratory syndrome-related coronavirus
  REGION 1..9: note = Table A: HLA-B*35:03H HLA-B*35:02H HLA-B*35:12H
  source 1..9: note = Severe acute respiratory syndrome coronavirus 2
LPETTADIV

SEQ ID NO: 3361 - protein, 9 aa, Severe acute respiratory syndrome-related coronavirus
  REGION 1..9: note = Table A: HLA-A*25:01H HLA-A*26:02H
  source 1..9: note = Severe acute respiratory syndrome coronavirus 2
ETTADIVVF

SEQ ID NO: 3362 - protein, 9 aa, Severe acute respiratory syndrome-related coronavirus
  REGION 1..9: note = Table A: HLA-B*44:05H HLA-C*08:01H HLA-B*38:02H HLA-B*40:02H HLA-B*41:02H HLA-B*49:01H
  source 1..9: note = Severe acute respiratory syndrome coronavirus 2
ADIVVFDEI

SEQ ID NO: 3363 - protein, 9 aa, Severe acute respiratory syndrome-related coronavirus
  REGION 1..9: note = Table A: HLA-B*35:03H HLA-B*35:01H HLA-B*35:02M HLA-B*35:08M HLA-C*08:01H HLA-B*35:12M HLA-B*38:02H HLA-C*07:04H
  source 1..9: note = Severe acute respiratory syndrome coronavirus 2
IVVFDEISM

SEQ ID NO: 3364 - protein, 9 aa, Severe acute respiratory syndrome-related coronavirus
  REGION 1..9: note = Table A: HLA-A*02:05M HLA-A*02:08H HLA-A*02:02H HLA-A*02:03H HLA-B*38:02H
  source 1..9: note = Severe acute respiratory syndrome coronavirus 2
VVFDEISMA

SEQ ID NO: 3365 - protein, 9 aa, Severe acute respiratory syndrome-related coronavirus
  REGION 1..9: note = Table A: HLA-B*44:02H HLA-B*44:05H HLA-A*26:01H HLA-B*44:03M HLA-B*18:01H HLA-B*27:02H HLA-B*35:01H HLA-B*38:02H HLA-B*15:02H HLA-B*07:05H
  source 1..9: note = Severe acute respiratory syndrome coronavirus 2
DEISMATNY

SEQ ID NO: 3366 - protein, 9 aa, Severe acute respiratory syndrome-related coronavirus
  REGION 1..9: note = Table A: HLA-B*58:01H HLA-C*15:05H HLA-B*57:03H
  source 1..9: note = Severe acute respiratory syndrome coronavirus 2
ISMATNYDL

SEQ ID NO: 3367 - protein, 9 aa, Severe acute respiratory syndrome-related coronavirus
  REGION 1..9: note = Table A: HLA-C*12:05H HLA-B*35:03H HLA-B*13:02H
  source 1..9: note = Severe acute respiratory syndrome coronavirus 2
MATNYDLSV

SEQ ID NO: 3368 - protein, 9 aa, Severe acute respiratory syndrome-related coronavirus
  REGION 1..9: note = Table A: HLA-C*15:02H
  source 1..9: note = Severe acute respiratory syndrome coronavirus 2
ATNYDLSVV

SEQ ID NO: 3369 - protein, 9 aa, Severe acute respiratory syndrome-related coronavirus
  REGION 1..9: note = Table A: HLA-C*04:01M HLA-C*04:03H HLA-B*39:01H
  source 1..9: note = Severe acute respiratory syndrome coronavirus 2
NYDLSVVNA

SEQ ID NO: 3370 - protein, 9 aa, Severe acute respiratory syndrome-related coronavirus
  REGION 1..9: note = Table A: HLA-A*33:01H HLA-A*33:03H HLA-B*27:02H HLA-A*68:01H HLA-A*34:02H HLA-A*66:01H
  source 1..9: note = Severe acute respiratory syndrome coronavirus 2
YDLSVVNAR

SEQ ID NO: 3371 - protein, 9 aa, Severe acute respiratory syndrome-related coronavirus
  REGION 1..9: note = Table A: HLA-B*44:05H HLA-A*02:11H HLA-A*68:01H HLA-A*68:02M HLA-A*02:04H HLA-A*02:05H HLA-B*14:01H HLA-A*02:01H HLA-A*02:02H HLA-A*02:03H HLA-A*34:01M HLA-B*38:02M HLA-B*07:05H HLA-A*66:01H
  source 1..9: note = Severe acute respiratory syndrome coronavirus 2
DLSVVNARL

SEQ ID NO: 3372 - protein, 9 aa, Severe acute respiratory syndrome-related coronavirus
  REGION 1..9: note = Table A: HLA-A*03:01H HLA-A*11:01H HLA-A*11:02H HLA-A*34:02H
  source 1..9: note = Severe acute respiratory syndrome coronavirus 2
VVNARLRAK

SEQ ID NO: 3373 - protein, 9 aa, Severe acute respiratory syndrome-related coronavirus
  REGION 1..9: note = Table A: HLA-A*74:01H HLA-A*30:02H HLA-A*32:01H HLA-B*15:03H
  source 1..9: note = Severe acute respiratory syndrome coronavirus 2
RLRAKHYVY

SEQ ID NO: 3374 - protein, 9 aa, Severe acute respiratory syndrome-related coronavirus
  REGION 1..9: note = Table A: HLA-C*06:02H HLA-A*02:02H
  source 1..9: note = Severe acute respiratory syndrome coronavirus 2
LRAKHYVYI

SEQ ID NO: 3375 - protein, 9 aa, Severe acute respiratory syndrome-related coronavirus
  REGION 1..9: note = Table A: HLA-C*08:01H HLA-B*54:01H
  source 1..9: note = Severe acute respiratory syndrome coronavirus 2
HYVYIGDPA

SEQ ID NO: 3376 - protein, 9 aa, Severe acute respiratory syndrome-related coronavirus
  REGION 1..9: note = Table A: HLA-B*35:03H
  source 1..9: note = Severe acute respiratory syndrome coronavirus 2
YVYIGDPAQ

SEQ ID NO: 3377 - protein, 9 aa, Severe acute respiratory syndrome-related coronavirus
  REGION 1..9: note = Table A: HLA-C*14:02H HLA-C*14:03H HLA-B*44:05H HLA-A*29:01M HLA-A*29:02H HLA-C*04:01M HLA-C*04:03M HLA-C*07:02H HLA-A*30:02H HLA-C*15:05H HLA-A*02:02H HLA-A*24:02H HLA-A*24:07H HLA-C*08:01M HLA-A*23:01H HLA-B*38:01H
  REGION 1..9: note = CONT. FROM ABOVE: HLA-B*38:02H HLA-B*40:01H HLA-B*39:01M HLA- B*07:05H
  source 1..9: note = Severe acute respiratory syndrome coronavirus 2
VYIGDPAQL

SEQ ID NO: 3378 - protein, 9 aa, Severe acute respiratory syndrome-related coronavirus
  REGION 1..9: note = Table A: HLA-A*33:01M HLA-A*33:03M HLA-A*26:03M HLA-A*68:01H HLA-A*34:01H HLA-A*34:02H HLA-A*66:01H
  source 1..9: note = Severe acute respiratory syndrome coronavirus 2
DPAQLPAPR

SEQ ID NO: 3379 - protein, 9 aa, Severe acute respiratory syndrome-related coronavirus
  REGION 1..9: note = Table A: HLA-B*48:01H HLA-B*38:02H HLA-B*15:01H HLA-B*15:03H HLA-B*13:02H HLA-B*15:10H
  source 1..9: note = Severe acute respiratory syndrome coronavirus 2
AQLPAPRTL

SEQ ID NO: 3380 - protein, 9 aa, Severe acute respiratory syndrome-related coronavirus
  REGION 1..9: note = Table A: HLA-A*34:01H
  source 1..9: note = Severe acute respiratory syndrome coronavirus 2
QLPAPRTLL

SEQ ID NO: 3381 - protein, 9 aa, Severe acute respiratory syndrome-related coronavirus
  REGION 1..9: note = Table A: HLA-B*53:01H HLA-C*15:05H HLA-B*51:01H HLA-B*07:02H HLA-B*07:04H
  source 1..9: note = Severe acute respiratory syndrome coronavirus 2
LPAPRTLLT

SEQ ID NO: 3382 - protein, 9 aa, Severe acute respiratory syndrome-related coronavirus
  REGION 1..9: note = Table A: HLA-A*34:02H
  source 1..9: note = Severe acute respiratory syndrome coronavirus 2
PAPRTLLTK

SEQ ID NO: 3383 - protein, 9 aa, Severe acute respiratory syndrome-related coronavirus
  REGION 1..9: note = Table A: HLA-B*15:03H
  source 1..9: note = Severe acute respiratory syndrome coronavirus 2
TKGTLEPEY

SEQ ID NO: 3384 - protein, 9 aa, Severe acute respiratory syndrome-related coronavirus
  REGION 1..9: note = Table A: HLA-B*45:01H HLA-A*68:02H HLA-A*02:07H HLA-B*40:02H HLA-B*40:06H HLA-B*49:01H HLA-B*50:01M
  source 1..9: note = Severe acute respiratory syndrome coronavirus 2
LEPEYFNSV

SEQ ID NO: 3385 - protein, 9 aa, Severe acute respiratory syndrome-related coronavirus
  REGION 1..9: note = Table A: HLA-A*33:03M HLA-A*24:02H HLA-A*24:07H HLA-A*23:01H
  source 1..9: note = Severe acute respiratory syndrome coronavirus 2
EYFNSVCRL

SEQ ID NO: 3386 - protein, 9 aa, Severe acute respiratory syndrome-related coronavirus
  REGION 1..9: note = Table A: HLA-B*46:01H HLA-A*02:02H HLA-A*02:03H HLA-B*38:02H HLA-B*15:02H
  source 1..9: note = Severe acute respiratory syndrome coronavirus 2
LMKTIGPDM

SEQ ID NO: 3387 - protein, 9 aa, Severe acute respiratory syndrome-related coronavirus
  REGION 1..9: note = Table A: HLA-B*58:01H HLA-B*58:02M HLA-A*11:303H HLA-C*03:03H HLA-A*02:11H HLA-C*03:04H HLA-A*68:02H HLA-C*15:05H HLA-C*15:02M HLA-A*02:05H HLA-A*02:06H HLA-A*02:08M HLA-C*08:01H HLA-B*57:03H HLA-B*13:01H
  source 1..9: note = Severe acute respiratory syndrome coronavirus 2
KTIGPDMFL

SEQ ID NO: 3388 - protein, 9 aa, Severe acute respiratory syndrome-related coronavirus
  REGION 1..9: note = Table A: HLA-A*02:07H
  source 1..9: note = Severe acute respiratory syndrome coronavirus 2
IGPDMFLGT

SEQ ID NO: 3389 - protein, 9 aa, Severe acute respiratory syndrome-related coronavirus
  REGION 1..9: note = Table A: HLA-C*15:05H
  source 1..9: note = Severe acute respiratory syndrome coronavirus 2
GPDMFLGTC

SEQ ID NO: 3390 - protein, 9 aa, Severe acute respiratory syndrome-related coronavirus
  REGION 1..9: note = Table A: HLA-A*33:01H HLA-A*33:03H HLA-A*34:01H
  source 1..9: note = Severe acute respiratory syndrome coronavirus 2
DMFLGTCRR

SEQ ID NO: 3391 - protein, 9 aa, Severe acute respiratory syndrome-related coronavirus
  REGION 1..9: note = Table A: HLA-B*56:01M HLA-B*53:01H HLA-B*55:02M HLA-A*68:02M HLA-B*35:03H HLA-C*15:05M HLA-A*02:05H HLA-B*35:01H HLA-B*35:02M HLA-B*51:01M HLA-C*08:01H HLA-B*35:12M HLA-B*38:02H HLA-B*54:01H HLA-B*39:01H HLA-B*07:05M
  source 1..9: note = Severe acute respiratory syndrome coronavirus 2
CPAEIVDTV

SEQ ID NO: 3392 - protein, 9 aa, Severe acute respiratory syndrome-related coronavirus
  REGION 1..9: note = Table A: HLA-B*44:05H HLA-B*45:01H HLA-B*44:03H HLA-B*39:06H HLA-B*40:01H HLA-B*40:02M HLA-B*40:06H HLA-B*41:02M HLA-B*49:01M HLA-B*50:01H
  source 1..9: note = Severe acute respiratory syndrome coronavirus 2
AEIVDTVSA

SEQ ID NO: 3393 - protein, 9 aa, Severe acute respiratory syndrome-related coronavirus
  REGION 1..9: note = Table A: HLA-A*11:303H HLA-A*25:01H HLA-A*26:01H HLA-A*26:02H HLA-A*26:03H HLA-A*68:02M HLA-B*35:03H HLA-C*01:02H HLA-A*02:05H HLA-A*02:08H HLA-A*34:01M HLA-B*35:01H HLA-C*08:01H HLA-B*38:02M HLA-B*15:02H
  REGION 1..9: note = CONT. FROM ABOVE: HLA-B*39:01M HLA-A*66:01H
  source 1..9: note = Severe acute respiratory syndrome coronavirus 2
EIVDTVSAL

SEQ ID NO: 3394 - protein, 9 aa, Severe acute respiratory syndrome-related coronavirus
  REGION 1..9: note = Table A: HLA-C*04:03M HLA-A*02:11H HLA-A*02:07M HLA-B*38:02H HLA-C*05:01H
  source 1..9: note = Severe acute respiratory syndrome coronavirus 2
IVDTVSALV

SEQ ID NO: 3395 - protein, 9 aa, Severe acute respiratory syndrome-related coronavirus
  REGION 1..9: note = Table A: HLA-A*03:02H HLA-A*11:01H HLA-A*11:02H HLA-A*36:01H
  source 1..9: note = Severe acute respiratory syndrome coronavirus 2
VSALVYDNK

SEQ ID NO: 3396 - protein, 9 aa, Severe acute respiratory syndrome-related coronavirus
  REGION 1..9: note = Table A: HLA-B*58:01H HLA-A*11:303H HLA-B*53:01H HLA-B*35:03M HLA-C*15:05H HLA-A*02:04H HLA-A*02:05H HLA-A*02:06H HLA-B*35:02M HLA-C*08:01M HLA-B*35:12M HLA-B*38:02H HLA-B*57:03H
  source 1..9: note = Severe acute respiratory syndrome coronavirus 2
SALVYDNKL

SEQ ID NO: 3397 - protein, 9 aa, Severe acute respiratory syndrome-related coronavirus
  REGION 1..9: note = Table A: HLA-B*56:01H HLA-A*02:11M HLA-B*55:02H HLA-A*68:02H HLA-B*55:01H HLA-A*02:05H HLA-A*02:03H HLA-A*34:02H HLA-C*08:01H HLA-B*38:02H HLA-B*40:06H HLA-B*54:01M HLA-B*13:02H HLA-A*66:01H HLA-B*50:01H
  source 1..9: note = Severe acute respiratory syndrome coronavirus 2
LVYDNKLKA

SEQ ID NO: 3398 - protein, 9 aa, Severe acute respiratory syndrome-related coronavirus
  REGION 1..9: note = Table A: HLA-C*14:03H
  source 1..9: note = Severe acute respiratory syndrome coronavirus 2
VYDNKLKAH

SEQ ID NO: 3399 - protein, 9 aa, Severe acute respiratory syndrome-related coronavirus
  REGION 1..9: note = Table A: HLA-B*38:02M HLA-B*15:03H
  source 1..9: note = Severe acute respiratory syndrome coronavirus 2
HKDKSAQCF

SEQ ID NO: 3400 - protein, 9 aa, Severe acute respiratory syndrome-related coronavirus
  REGION 1..9: note = Table A: HLA-B*58:02H HLA-B*57:03H
  source 1..9: note = Severe acute respiratory syndrome coronavirus 2
KSAQCFKMF

SEQ ID NO: 3401 - protein, 9 aa, Severe acute respiratory syndrome-related coronavirus
  REGION 1..9: note = Table A: HLA-A*30:02H
  source 1..9: note = Severe acute respiratory syndrome coronavirus 2
SAQCFKMFY

SEQ ID NO: 3402 - protein, 9 aa, Severe acute respiratory syndrome-related coronavirus
  REGION 1..9: note = Table A: HLA-A*11:01H HLA-A*11:02H
  source 1..9: note = Severe acute respiratory syndrome coronavirus 2
AQCFKMFYK

SEQ ID NO: 3403 - protein, 9 aa, Severe acute respiratory syndrome-related coronavirus
  REGION 1..9: note = Table A: HLA-C*14:02H HLA-C*14:03M HLA-A*34:02H HLA-B*15:02H
  source 1..9: note = Severe acute respiratory syndrome coronavirus 2
MFYKGVITH

SEQ ID NO: 3404 - protein, 9 aa, Severe acute respiratory syndrome-related coronavirus
  REGION 1..9: note = Table A: HLA-A*02:05H
  source 1..9: note = Severe acute respiratory syndrome coronavirus 2
GVITHDVSS

SEQ ID NO: 3405 - protein, 9 aa, Severe acute respiratory syndrome-related coronavirus
  REGION 1..9: note = Table A: HLA-B*58:01H HLA-B*58:02H HLA-A*11:303H HLA-B*57:01H HLA-B*46:01H HLA-C*03:03H HLA-A*02:11M HLA-C*03:04H HLA-A*68:02M HLA-C*15:05M HLA-A*02:05H HLA-A*02:02H HLA-A*02:03H HLA-C*08:01H HLA-B*38:02M
  REGION 1..9: note = CONT. FROM ABOVE: HLA-B*57:03M HLA-B*13:02H
  source 1..9: note = Severe acute respiratory syndrome coronavirus 2
ITHDVSSAI

SEQ ID NO: 3406 - protein, 9 aa, Severe acute respiratory syndrome-related coronavirus
  REGION 1..9: note = Table A: HLA-B*39:01H
  source 1..9: note = Severe acute respiratory syndrome coronavirus 2
THDVSSAIN

SEQ ID NO: 3407 - protein, 9 aa, Severe acute respiratory syndrome-related coronavirus
  REGION 1..9: note = Table A: HLA-A*68:01H
  source 1..9: note = Severe acute respiratory syndrome coronavirus 2
HDVSSAINR

SEQ ID NO: 3408 - protein, 9 aa, Severe acute respiratory syndrome-related coronavirus
  REGION 1..9: note = Table A: HLA-A*68:01H HLA-A*68:02H HLA-A*34:01H HLA-A*34:02H HLA-A*66:01H
  source 1..9: note = Severe acute respiratory syndrome coronavirus 2
DVSSAINRP

SEQ ID NO: 3409 - protein, 9 aa, Severe acute respiratory syndrome-related coronavirus
  REGION 1..9: note = Table A: HLA-B*58:02H HLA-C*15:05H HLA-B*57:03H
  source 1..9: note = Severe acute respiratory syndrome coronavirus 2
SSAINRPQI

SEQ ID NO: 3410 - protein, 9 aa, Severe acute respiratory syndrome-related coronavirus
  REGION 1..9: note = Table A: HLA-A*02:11H HLA-B*13:02H
  source 1..9: note = Severe acute respiratory syndrome coronavirus 2
AINRPQIGV

SEQ ID NO: 3411 - protein, 9 aa, Severe acute respiratory syndrome-related coronavirus
  REGION 1..9: note = Table A: HLA-C*15:05H
  source 1..9: note = Severe acute respiratory syndrome coronavirus 2
INRPQIGVV

SEQ ID NO: 3412 - protein, 9 aa, Severe acute respiratory syndrome-related coronavirus
  REGION 1..9: note = Table A: HLA-B*15:01H HLA-B*15:02H
  source 1..9: note = Severe acute respiratory syndrome coronavirus 2
PQIGVVREF

SEQ ID NO: 3413 - protein, 9 aa, Severe acute respiratory syndrome-related coronavirus
  REGION 1..9: note = Table A: HLA-A*02:11H HLA-A*02:02H
  source 1..9: note = Severe acute respiratory syndrome coronavirus 2
QIGVVREFL

SEQ ID NO: 3414 - protein, 9 aa, Severe acute respiratory syndrome-related coronavirus
  REGION 1..9: note = Table A: HLA-A*26:03H HLA-A*68:01H HLA-A*34:01H HLA-A*66:01H
  source 1..9: note = Severe acute respiratory syndrome coronavirus 2
GVVREFLTR

SEQ ID NO: 3415 - protein, 9 aa, Severe acute respiratory syndrome-related coronavirus
  REGION 1..9: note = Table A: HLA-B*45:01H HLA-B*40:06H HLA-B*50:01M
  source 1..9: note = Severe acute respiratory syndrome coronavirus 2
REFLTRNPA

SEQ ID NO: 3416 - protein, 9 aa, Severe acute respiratory syndrome-related coronavirus
  REGION 1..9: note = Table A: HLA-A*25:01H HLA-B*44:03H HLA-A*24:02H HLA-A*24:07M HLA-A*23:01H
  source 1..9: note = Severe acute respiratory syndrome coronavirus 2
EFLTRNPAW

SEQ ID NO: 3417 - protein, 9 aa, Severe acute respiratory syndrome-related coronavirus
  REGION 1..9: note = Table A: HLA-A*11:02H HLA-A*30:01H HLA-A*34:02H
  source 1..9: note = Severe acute respiratory syndrome coronavirus 2
LTRNPAWRK

SEQ ID NO: 3418 - protein, 9 aa, Severe acute respiratory syndrome-related coronavirus
  REGION 1..9: note = Table A: HLA-B*39:06H
  source 1..9: note = Severe acute respiratory syndrome coronavirus 2
TRNPAWRKA

SEQ ID NO: 3419 - protein, 9 aa, Severe acute respiratory syndrome-related coronavirus
  REGION 1..9: note = Table A: HLA-B*42:01H HLA-B*08:01H HLA-B*35:07H HLA-B*07:02H HLA-B*07:04M
  source 1..9: note = Severe acute respiratory syndrome coronavirus 2
NPAWRKAVF

SEQ ID NO: 3420 - protein, 9 aa, Severe acute respiratory syndrome-related coronavirus
  REGION 1..9: note = Table A: HLA-B*57:03H
  source 1..9: note = Severe acute respiratory syndrome coronavirus 2
PAWRKAVFI

SEQ ID NO: 3421 - protein, 9 aa, Severe acute respiratory syndrome-related coronavirus
  REGION 1..9: note = Table A: HLA-B*15:03H
  source 1..9: note = Severe acute respiratory syndrome coronavirus 2
RKAVFISPY

SEQ ID NO: 3422 - protein, 9 aa, Severe acute respiratory syndrome-related coronavirus
  REGION 1..9: note = Table A: HLA-C*14:03H
  source 1..9: note = Severe acute respiratory syndrome coronavirus 2
VFISPYNSQ

SEQ ID NO: 3423 - protein, 9 aa, Severe acute respiratory syndrome-related coronavirus
  REGION 1..9: note = Table A: HLA-B*42:01H HLA-B*56:01H HLA-B*55:02H HLA-B*35:03H HLA-C*15:05H HLA-B*55:01H HLA-B*14:01H HLA-B*35:01H HLA-B*51:01H HLA-C*08:01H HLA-B*38:02M HLA-B*39:06H HLA-B*54:01M HLA-B*07:02M HLA-B*07:04M HLA-B*39:01H
  REGION 1..9: note = CONT. FROM ABOVE: HLA-B*07:05H HLA-B*15:10H
  source 1..9: note = Severe acute respiratory syndrome coronavirus 2
SPYNSQNAV

SEQ ID NO: 3424 - protein, 9 aa, Severe acute respiratory syndrome-related coronavirus
  REGION 1..9: note = Table A: HLA-B*44:05H HLA-A*02:05M HLA-A*02:06H HLA-A*02:08H HLA-A*02:02H HLA-A*02:03H HLA-B*52:01H HLA-B*38:01H HLA-B*38:02M HLA-B*15:01H HLA-B*13:01M HLA-B*13:02H
  source 1..9: note = Severe acute respiratory syndrome coronavirus 2
SQNAVASKI

SEQ ID NO: 3425 - protein, 9 aa, Severe acute respiratory syndrome-related coronavirus
  REGION 1..9: note = Table A: HLA-A*03:01M HLA-A*11:01H HLA-A*11:02H HLA-A*25:01H HLA-A*26:01H HLA-A*26:03H HLA-B*08:01H HLA-A*02:11H HLA-A*68:02H HLA-C*15:05M HLA-C*15:02H HLA-A*02:04M HLA-A*02:05M HLA-A*02:06M HLA-A*02:07H HLA-A*02:08H
  REGION 1..9: note = CONT. FROM ABOVE: HLA-B*14:01H HLA-A*02:01H HLA-A*02:02M HLA- A*02:03H HLA-B*38:02H HLA-B*07:04H HLA-B*13:02H HLA-C*07:04H
  source 1..9: note = Severe acute respiratory syndrome coronavirus 2
AVASKILGL

SEQ ID NO: 3426 - protein, 9 aa, Severe acute respiratory syndrome-related coronavirus
  REGION 1..9: note = Table A: HLA-A*02:11M HLA-A*02:08H HLA-A*02:01H HLA-B*13:02H
  source 1..9: note = Severe acute respiratory syndrome coronavirus 2
KILGLPTQT

SEQ ID NO: 3427 - protein, 9 aa, Severe acute respiratory syndrome-related coronavirus
  REGION 1..9: note = Table A: HLA-A*02:11H HLA-C*15:05H HLA-A*02:07H HLA-B*14:01H HLA-A*02:01H HLA-A*02:02H HLA-A*02:03M HLA-B*38:02M HLA-B*13:02M
  source 1..9: note = Severe acute respiratory syndrome coronavirus 2
ILGLPTQTV

SEQ ID NO: 3428 - protein, 9 aa, Severe acute respiratory syndrome-related coronavirus
  REGION 1..9: note = Table A: HLA-A*30:02H
  source 1..9: note = Severe acute respiratory syndrome coronavirus 2
SSQGSEYDY

SEQ ID NO: 3429 - protein, 9 aa, Severe acute respiratory syndrome-related coronavirus
  REGION 1..9: note = Table A: HLA-B*45:01H HLA-B*40:02H HLA-B*40:06H HLA-B*49:01M HLA-B*50:01H
  source 1..9: note = Severe acute respiratory syndrome coronavirus 2
SEYDYVIFT

SEQ ID NO: 3430 - protein, 9 aa, Severe acute respiratory syndrome-related coronavirus
  REGION 1..9: note = Table A: HLA-B*50:01H
  source 1..9: note = Severe acute respiratory syndrome coronavirus 2
YDYVIFTQT

SEQ ID NO: 3431 - protein, 9 aa, Severe acute respiratory syndrome-related coronavirus
  REGION 1..9: note = Table A: HLA-A*11:303H HLA-B*46:01H HLA-C*15:05H HLA-A*02:03H HLA-B*38:02H
  source 1..9: note = Severe acute respiratory syndrome coronavirus 2
VIFTQTTET

SEQ ID NO: 3432 - protein, 9 aa, Severe acute respiratory syndrome-related coronavirus
  REGION 1..9: note = Table A: HLA-B*46:01H
  source 1..9: note = Severe acute respiratory syndrome coronavirus 2
FTQTTETAH

SEQ ID NO: 3433 - protein, 9 aa, Severe acute respiratory syndrome-related coronavirus
  REGION 1..9: note = Table A: HLA-B*49:01M
  source 1..9: note = Severe acute respiratory syndrome coronavirus 2
TETAHSCNV

SEQ ID NO: 3434 - protein, 9 aa, Severe acute respiratory syndrome-related coronavirus
  REGION 1..9: note = Table A: HLA-A*33:03M HLA-A*68:01H HLA-A*34:01H HLA-A*66:01H
  source 1..9: note = Severe acute respiratory syndrome coronavirus 2
TAHSCNVNR

SEQ ID NO: 3435 - protein, 9 aa, Severe acute respiratory syndrome-related coronavirus
  REGION 1..9: note = Table A: HLA-B*38:01H HLA-B*38:02M
  source 1..9: note = Severe acute respiratory syndrome coronavirus 2
AHSCNVNRF

SEQ ID NO: 3436 - protein, 9 aa, Severe acute respiratory syndrome-related coronavirus
  REGION 1..9: note = Table A: HLA-A*02:11H HLA-A*68:02H HLA-C*15:05H HLA-B*38:02H HLA-B*07:05H HLA-B*57:03H
  source 1..9: note = Severe acute respiratory syndrome coronavirus 2
NVNRFNVAI

SEQ ID NO: 3437 - protein, 9 aa, Severe acute respiratory syndrome-related coronavirus
  REGION 1..9: note = Table A: HLA-B*27:05H HLA-B*27:02H HLA-A*68:01H
  source 1..9: note = Severe acute respiratory syndrome coronavirus 2
NRFNVAITR

SEQ ID NO: 3438 - protein, 9 aa, Severe acute respiratory syndrome-related coronavirus
  REGION 1..9: note = Table A: HLA-A*34:02H HLA-A*66:01H
  source 1..9: note = Severe acute respiratory syndrome coronavirus 2
FNVAITRAK

SEQ ID NO: 3439 - protein, 9 aa, Severe acute respiratory syndrome-related coronavirus
  REGION 1..9: note = Table A: HLA-A*68:02H
  source 1..9: note = Severe acute respiratory syndrome coronavirus 2
NVAITRAKV

SEQ ID NO: 3440 - protein, 9 aa, Severe acute respiratory syndrome-related coronavirus
  REGION 1..9: note = Table A: HLA-B*07:04M
  source 1..9: note = Severe acute respiratory syndrome coronavirus 2
ITRAKVGIL

SEQ ID NO: 3441 - protein, 9 aa, Severe acute respiratory syndrome-related coronavirus
  REGION 1..9: note = Table A: HLA-B*58:02H HLA-B*07:04H HLA-B*13:02H
  source 1..9: note = Severe acute respiratory syndrome coronavirus 2
RAKVGILCI

SEQ ID NO: 3442 - protein, 9 aa, Severe acute respiratory syndrome-related coronavirus
  REGION 1..9: note = Table A: HLA-B*15:03H
  source 1..9: note = Severe acute respiratory syndrome coronavirus 2
AKVGILCIM

SEQ ID NO: 3443 - protein, 9 aa, Severe acute respiratory syndrome-related coronavirus
  REGION 1..9: note = Table A: HLA-A*30:02H
  source 1..9: note = Severe acute respiratory syndrome coronavirus 2
CIMSDRDLY

SEQ ID NO: 3444 - protein, 9 aa, Severe acute respiratory syndrome-related coronavirus
  REGION 1..9: note = Table A: HLA-B*40:02H
  source 1..9: note = Severe acute respiratory syndrome coronavirus 2
SDRDLYDKL

SEQ ID NO: 3445 - protein, 9 aa, Severe acute respiratory syndrome-related coronavirus
  REGION 1..9: note = Table A: HLA-B*37:01M HLA-C*07:04H
  source 1..9: note = Severe acute respiratory syndrome coronavirus 2
RDLYDKLQF

SEQ ID NO: 3446 - protein, 9 aa, Severe acute respiratory syndrome-related coronavirus
  REGION 1..9: note = Table A: HLA-A*68:02H HLA-B*38:02H
  source 1..9: note = Severe acute respiratory syndrome coronavirus 2
DLYDKLQFT

SEQ ID NO: 3447 - protein, 9 aa, Severe acute respiratory syndrome-related coronavirus
  REGION 1..9: note = Table A: HLA-B*37:01H HLA-B*40:02H HLA-B*41:02H
  source 1..9: note = Severe acute respiratory syndrome coronavirus 2
YDKLQFTSL

SEQ ID NO: 3448 - protein, 9 aa, Severe acute respiratory syndrome-related coronavirus
  REGION 1..9: note = Table A: HLA-B*13:02H
  source 1..9: note = Severe acute respiratory syndrome coronavirus 2
KLQFTSLEI

SEQ ID NO: 3449 - protein, 9 aa, Severe acute respiratory syndrome-related coronavirus
  REGION 1..9: note = Table A: HLA-A*33:01H HLA-A*33:03H HLA-A*31:01H
  source 1..9: note = Severe acute respiratory syndrome coronavirus 2
QFTSLEIPR

SEQ ID NO: 3450 - protein, 9 aa, Severe acute respiratory syndrome-related coronavirus
  REGION 1..9: note = Table A: HLA-A*68:01H HLA-A*34:02H HLA-A*66:01H
  source 1..9: note = Severe acute respiratory syndrome coronavirus 2
FTSLEIPRR

SEQ ID NO: 3451 - protein, 9 aa, Severe acute respiratory syndrome-related coronavirus
  REGION 1..9: note = Table A: HLA-B*45:01H HLA-B*40:06H HLA-B*50:01H
  source 1..9: note = Severe acute respiratory syndrome coronavirus 2
LEIPRRNVA

SEQ ID NO: 3452 - protein, 9 aa, Severe acute respiratory syndrome-related coronavirus
  REGION 1..9: note = Table A: HLA-B*42:01M HLA-B*08:01H HLA-C*15:05M HLA-B*55:01H HLA-B*51:01H HLA-B*07:02H HLA-B*07:04H HLA-B*07:05H
  source 1..9: note = Severe acute respiratory syndrome coronavirus 2
IPRRNVATL

SEQ ID NO: 3453 - protein, 9 aa, Severe acute respiratory syndrome-related coronavirus
  REGION 1..9: note = Table A: HLA-B*48:01H HLA-A*11:303H HLA-A*02:11H HLA-A*02:04H HLA-A*02:05H HLA-A*02:06H HLA-A*02:08M HLA-B*14:01H HLA-A*02:01H HLA-A*02:02M HLA-A*02:03M HLA-B*38:02M HLA-B*15:01H HLA-B*39:01H HLA-B*13:02H
  source 1..9: note = Severe acute respiratory syndrome coronavirus 2
LQAENVTGL

SEQ ID NO: 3454 - protein, 9 aa, Severe acute respiratory syndrome-related coronavirus
  REGION 1..9: note = Table A: HLA-C*04:03H HLA-B*53:01H HLA-B*35:01H HLA-B*38:02H HLA-C*05:01H
  source 1..9: note = Severe acute respiratory syndrome coronavirus 2
QAENVTGLF

SEQ ID NO: 3455 - protein, 9 aa, Severe acute respiratory syndrome-related coronavirus
  REGION 1..9: note = Table A: HLA-A*03:01H HLA-A*11:01H HLA-A*11:02H HLA-A*34:02H HLA-B*49:01H
  source 1..9: note = Severe acute respiratory syndrome coronavirus 2
AENVTGLFK

SEQ ID NO: 3456 - protein, 9 aa, Severe acute respiratory syndrome-related coronavirus
  REGION 1..9: note = Table A: HLA-A*68:02M HLA-C*15:05H HLA-B*38:02H HLA-B*07:05H
  source 1..9: note = Severe acute respiratory syndrome coronavirus 2
DCSKVITGL

SEQ ID NO: 3457 - protein, 9 aa, Severe acute respiratory syndrome-related coronavirus
  REGION 1..9: note = Table A: HLA-A*02:11H HLA-B*55:02H HLA-A*02:05M HLA-A*02:06H HLA-A*02:08H HLA-A*02:01H HLA-B*40:06H
  source 1..9: note = Severe acute respiratory syndrome coronavirus 2
KVITGLHPT

SEQ ID NO: 3458 - protein, 9 aa, Severe acute respiratory syndrome-related coronavirus
  REGION 1..9: note = Table A: HLA-A*02:03H
  source 1..9: note = Severe acute respiratory syndrome coronavirus 2
ITGLHPTQA

SEQ ID NO: 3459 - protein, 9 aa, Severe acute respiratory syndrome-related coronavirus
  REGION 1..9: note = Table A: HLA-B*42:01H HLA-B*53:01H HLA-B*35:03H HLA-C*15:05M HLA-A*34:01H HLA-B*35:01M HLA-B*35:02M HLA-B*35:07H HLA-B*35:12M HLA-B*38:02H HLA-B*07:02M HLA-B*07:04M HLA-B*39:01H HLA-B*07:05M
  source 1..9: note = Severe acute respiratory syndrome coronavirus 2
HPTQAPTHL

SEQ ID NO: 3460 - protein, 9 aa, Severe acute respiratory syndrome-related coronavirus
  REGION 1..9: note = Table A: HLA-C*16:04H HLA-A*02:11H HLA-C*15:05H HLA-B*14:02H HLA-C*15:02H HLA-A*02:05M HLA-A*02:06M HLA-A*02:08H HLA-B*14:01H HLA-A*02:01H HLA-A*02:02H HLA-A*02:03M HLA-B*52:01M HLA-C*08:01H HLA-B*38:01H HLA-B*38:02H
  REGION 1..9: note = CONT. FROM ABOVE: HLA-B*39:06H HLA-B*15:01M HLA-B*15:02M HLA- B*39:01M HLA-B*13:01H HLA-B*13:02H HLA-B*15:10M
  source 1..9: note = Severe acute respiratory syndrome coronavirus 2
TQAPTHLSV

SEQ ID NO: 3461 - protein, 9 aa, Severe acute respiratory syndrome-related coronavirus
  REGION 1..9: note = Table A: HLA-B*55:02H
  source 1..9: note = Severe acute respiratory syndrome coronavirus 2
APTHLSVDT

SEQ ID NO: 3462 - protein, 9 aa, Severe acute respiratory syndrome-related coronavirus
  REGION 1..9: note = Table A: HLA-B*38:01H HLA-B*38:02H HLA-B*39:01H
  source 1..9: note = Severe acute respiratory syndrome coronavirus 2
THLSVDTKF

SEQ ID NO: 3463 - protein, 9 aa, Severe acute respiratory syndrome-related coronavirus
  REGION 1..9: note = Table A: HLA-A*25:01H HLA-A*33:03H HLA-A*26:01M HLA-A*26:02H HLA-A*26:03M HLA-B*08:01M HLA-A*68:02M HLA-A*34:01H HLA-A*66:01M
  source 1..9: note = Severe acute respiratory syndrome coronavirus 2
DTKFKTEGL

SEQ ID NO: 3464 - protein, 9 aa, Severe acute respiratory syndrome-related coronavirus
  REGION 1..9: note = Table A: HLA-A*02:04H HLA-A*02:01H
  source 1..9: note = Severe acute respiratory syndrome coronavirus 2
GLCVDIPGI

SEQ ID NO: 3465 - protein, 9 aa, Severe acute respiratory syndrome-related coronavirus
  REGION 1..9: note = Table A: HLA-A*11:303M HLA-A*03:01M HLA-A*03:02H HLA-A*11:01H HLA-A*11:02H HLA-A*36:01H HLA-A*34:02H HLA-C*07:27H HLA-A*66:01H
  source 1..9: note = Severe acute respiratory syndrome coronavirus 2
CVDIPGIPK

SEQ ID NO: 3466 - protein, 9 aa, Severe acute respiratory syndrome-related coronavirus
  REGION 1..9: note = Table A: HLA-A*26:03H HLA-A*34:01H
  source 1..9: note = Severe acute respiratory syndrome coronavirus 2
DIPGIPKDM

SEQ ID NO: 3467 - protein, 9 aa, Severe acute respiratory syndrome-related coronavirus
  REGION 1..9: note = Table A: HLA-C*16:01H HLA-B*08:01H HLA-C*03:04H HLA-B*14:02H HLA-C*15:02H HLA-A*34:02H HLA-B*57:03H
  source 1..9: note = Severe acute respiratory syndrome coronavirus 2
MTYRRLISM

SEQ ID NO: 3468 - protein, 9 aa, Severe acute respiratory syndrome-related coronavirus
  REGION 1..9: note = Table A: HLA-B*27:05M
  source 1..9: note = Severe acute respiratory syndrome coronavirus 2
RRLISMMGF

SEQ ID NO: 3469 - protein, 9 aa, Severe acute respiratory syndrome-related coronavirus
  REGION 1..9: note = Table A: HLA-A*03:01H HLA-A*11:02H HLA-A*29:01H HLA-A*29:02M HLA-A*30:02M HLA-B*38:02M HLA-A*32:01H HLA-B*15:01H HLA-B*15:02H HLA-B*15:03H HLA-B*07:05H
  source 1..9: note = Severe acute respiratory syndrome coronavirus 2
SMMGFKMNY

SEQ ID NO: 3470 - protein, 9 aa, Severe acute respiratory syndrome-related coronavirus
  REGION 1..9: note = Table A: HLA-A*02:11H HLA-A*68:02H HLA-A*02:02H
  source 1..9: note = Severe acute respiratory syndrome coronavirus 2
MGFKMNYQV

SEQ ID NO: 3471 - protein, 9 aa, Severe acute respiratory syndrome-related coronavirus
  REGION 1..9: note = Table A: HLA-A*36:01H HLA-A*30:02M HLA-B*38:02H HLA-A*32:01H HLA-B*15:01M HLA-B*15:03H
  source 1..9: note = Severe acute respiratory syndrome coronavirus 2
KMNYQVNGY

SEQ ID NO: 3472 - protein, 9 aa, Severe acute respiratory syndrome-related coronavirus
  REGION 1..9: note = Table A: HLA-A*11:303H HLA-A*02:05H HLA-A*02:06H HLA-C*17:01H HLA-C*08:01H HLA-B*38:01H HLA-B*38:02M HLA-B*15:01H HLA-B*15:02H HLA-B*39:01H HLA-B*13:01H HLA-B*13:02H
  source 1..9: note = Severe acute respiratory syndrome coronavirus 2
YQVNGYPNM

SEQ ID NO: 3473 - protein, 9 aa, Severe acute respiratory syndrome-related coronavirus
  REGION 1..9: note = Table A: HLA-A*33:03H HLA-A*31:01H
  source 1..9: note = Severe acute respiratory syndrome coronavirus 2
GYPNMFITR

SEQ ID NO: 3474 - protein, 9 aa, Severe acute respiratory syndrome-related coronavirus
  REGION 1..9: note = Table A: HLA-C*14:03H HLA-B*08:01H HLA-B*38:02H
  source 1..9: note = Severe acute respiratory syndrome coronavirus 2
MFITREEAI

SEQ ID NO: 3475 - protein, 9 aa, Severe acute respiratory syndrome-related coronavirus
  REGION 1..9: note = Table A: HLA-A*34:02H
  source 1..9: note = Severe acute respiratory syndrome coronavirus 2
ITREEAIRH

SEQ ID NO: 3476 - protein, 9 aa, Severe acute respiratory syndrome-related coronavirus
  REGION 1..9: note = Table A: HLA-C*06:02H HLA-B*14:01H HLA-B*38:02H
  source 1..9: note = Severe acute respiratory syndrome coronavirus 2
TREEAIRHV

SEQ ID NO: 3477 - protein, 9 aa, Severe acute respiratory syndrome-related coronavirus
  REGION 1..9: note = Table A: HLA-B*45:01H
  source 1..9: note = Severe acute respiratory syndrome coronavirus 2
EEAIRHVRA

SEQ ID NO: 3478 - protein, 9 aa, Severe acute respiratory syndrome-related coronavirus
  REGION 1..9: note = Table A: HLA-B*58:01H HLA-B*57:01H HLA-A*25:01H HLA-A*26:01H HLA-A*26:03H HLA-B*53:01M HLA-A*34:01H HLA-B*57:03H HLA-A*66:01H
  source 1..9: note = Severe acute respiratory syndrome coronavirus 2
EAIRHVRAW

SEQ ID NO: 3479 - protein, 9 aa, Severe acute respiratory syndrome-related coronavirus
  REGION 1..9: note = Table A: HLA-C*06:02H
  source 1..9: note = Severe acute respiratory syndrome coronavirus 2
VRAWIGFDV

SEQ ID NO: 3480 - protein, 9 aa, Severe acute respiratory syndrome-related coronavirus
  REGION 1..9: note = Table A: HLA-A*33:01M HLA-A*33:03H HLA-A*26:03M HLA-A*68:01M HLA-A*34:01M HLA-A*66:01H
  source 1..9: note = Severe acute respiratory syndrome coronavirus 2
DVEGCHATR

SEQ ID NO: 3481 - protein, 9 aa, Severe acute respiratory syndrome-related coronavirus
  REGION 1..9: note = Table A: HLA-B*38:01H HLA-B*38:02H HLA-B*39:01M
  source 1..9: note = Severe acute respiratory syndrome coronavirus 2
TREAVGTNL

SEQ ID NO: 3482 - protein, 9 aa, Severe acute respiratory syndrome-related coronavirus
  REGION 1..9: note = Table A: HLA-B*45:01M HLA-B*40:06H HLA-B*50:01M
  source 1..9: note = Severe acute respiratory syndrome coronavirus 2
REAVGTNLP

SEQ ID NO: 3483 - protein, 9 aa, Severe acute respiratory syndrome-related coronavirus
  REGION 1..9: note = Table A: HLA-A*26:03H HLA-A*68:02H HLA-B*35:03M HLA-A*34:01M HLA-A*34:02H HLA-B*35:01H HLA-B*35:02H HLA-C*08:01H HLA-C*08:03H HLA-B*38:02H HLA-B*39:01H HLA-A*66:01H
  source 1..9: note = Severe acute respiratory syndrome coronavirus 2
EAVGTNLPL

SEQ ID NO: 3484 - protein, 9 aa, Severe acute respiratory syndrome-related coronavirus
  REGION 1..9: note = Table A: HLA-C*12:05M HLA-C*15:05M HLA-C*15:02M HLA-B*13:02H HLA-C*07:04H
  source 1..9: note = Severe acute respiratory syndrome coronavirus 2
VGTNLPLQL

SEQ ID NO: 3485 - protein, 9 aa, Severe acute respiratory syndrome-related coronavirus
  REGION 1..9: note = Table A: HLA-B*58:01H HLA-A*29:02H HLA-C*15:05H HLA-B*57:03H
  source 1..9: note = Severe acute respiratory syndrome coronavirus 2
TNLPLQLGF

SEQ ID NO: 3486 - protein, 9 aa, Severe acute respiratory syndrome-related coronavirus
  REGION 1..9: note = Table A: HLA-B*55:02H HLA-B*54:01H
  source 1..9: note = Severe acute respiratory syndrome coronavirus 2
LPLQLGFST

SEQ ID NO: 3487 - protein, 9 aa, Severe acute respiratory syndrome-related coronavirus
  REGION 1..9: note = Table A: HLA-A*02:11H HLA-A*02:06H HLA-B*52:01H HLA-B*38:02H HLA-B*13:02M
  source 1..9: note = Severe acute respiratory syndrome coronavirus 2
LQLGFSTGV

SEQ ID NO: 3488 - protein, 9 aa, Severe acute respiratory syndrome-related coronavirus
  REGION 1..9: note = Table A: HLA-B*54:01H
  source 1..9: note = Severe acute respiratory syndrome coronavirus 2
FSTGVNLVA

SEQ ID NO: 3489 - protein, 9 aa, Severe acute respiratory syndrome-related coronavirus
  REGION 1..9: note = Table A: HLA-A*68:02H HLA-C*15:05H
  source 1..9: note = Severe acute respiratory syndrome coronavirus 2
STGVNLVAV

SEQ ID NO: 3490 - protein, 9 aa, Severe acute respiratory syndrome-related coronavirus
  REGION 1..9: note = Table A: HLA-A*29:01H HLA-A*29:02H HLA-B*27:02H HLA-B*35:01M HLA-B*38:02M HLA-B*15:01H HLA-B*15:02M HLA-B*07:05H
  source 1..9: note = Severe acute respiratory syndrome coronavirus 2
NLVAVPTGY

SEQ ID NO: 3491 - protein, 9 aa, Severe acute respiratory syndrome-related coronavirus
  REGION 1..9: note = Table A: HLA-A*68:02H HLA-A*34:01H HLA-A*66:01H
  source 1..9: note = Severe acute respiratory syndrome coronavirus 2
LVAVPTGYV

SEQ ID NO: 3492 - protein, 9 aa, Severe acute respiratory syndrome-related coronavirus
  REGION 1..9: note = Table A: HLA-B*37:01H
  source 1..9: note = Severe acute respiratory syndrome coronavirus 2
VDTPNNTDF

SEQ ID NO: 3493 - protein, 9 aa, Severe acute respiratory syndrome-related coronavirus
  REGION 1..9: note = Table A: HLA-A*68:01H HLA-A*34:01H HLA-A*66:01H
  source 1..9: note = Severe acute respiratory syndrome coronavirus 2
TPNNTDFSR

SEQ ID NO: 3494 - protein, 9 aa, Severe acute respiratory syndrome-related coronavirus
  REGION 1..9: note = Table A: HLA-B*37:01H
  source 1..9: note = Severe acute respiratory syndrome coronavirus 2
TDFSRVSAK

SEQ ID NO: 3495 - protein, 9 aa, Severe acute respiratory syndrome-related coronavirus
  REGION 1..9: note = Table A: HLA-B*37:01H HLA-B*38:02H HLA-B*15:03H
  source 1..9: note = Severe acute respiratory syndrome coronavirus 2
AKPPPGDQF

SEQ ID NO: 3496 - protein, 9 aa, Severe acute respiratory syndrome-related coronavirus
  REGION 1..9: note = Table A: HLA-B*14:02H HLA-B*15:02H
  source 1..9: note = Severe acute respiratory syndrome coronavirus 2
DQFKHLIPL

SEQ ID NO: 3497 - protein, 9 aa, Severe acute respiratory syndrome-related coronavirus
  REGION 1..9: note = Table A: HLA-A*30:01H
  source 1..9: note = Severe acute respiratory syndrome coronavirus 2
QFKHLIPLM

SEQ ID NO: 3498 - protein, 9 aa, Severe acute respiratory syndrome-related coronavirus
  REGION 1..9: note = Table A: HLA-C*06:02H HLA-B*38:02H HLA-B*15:03M
  source 1..9: note = Severe acute respiratory syndrome coronavirus 2
FKHLIPLMY

SEQ ID NO: 3499 - protein, 9 aa, Severe acute respiratory syndrome-related coronavirus
  REGION 1..9: note = Table A: HLA-A*74:01H HLA-A*31:01H
  source 1..9: note = Severe acute respiratory syndrome coronavirus 2
KGLPWNVVR

SEQ ID NO: 3500 - protein, 9 aa, Severe acute respiratory syndrome-related coronavirus
  REGION 1..9: note = Table A: HLA-A*02:11H HLA-A*02:04H HLA-A*02:06H HLA-A*02:07M HLA-A*02:02H HLA-A*02:03H HLA-B*38:02H HLA-B*40:06H HLA-B*13:01H HLA-B*13:02H
  source 1..9: note = Severe acute respiratory syndrome coronavirus 2
GLPWNVVRI

SEQ ID NO: 3501 - protein, 9 aa, Severe acute respiratory syndrome-related coronavirus
  REGION 1..9: note = Table A: HLA-A*24:07H
  source 1..9: note = Severe acute respiratory syndrome coronavirus 2
PWNVVRIKI

SEQ ID NO: 3502 - protein, 9 aa, Severe acute respiratory syndrome-related coronavirus
  REGION 1..9: note = Table A: HLA-B*08:01M HLA-B*07:04H
  source 1..9: note = Severe acute respiratory syndrome coronavirus 2
VVRIKIVQM

SEQ ID NO: 3503 - protein, 9 aa, Severe acute respiratory syndrome-related coronavirus
  REGION 1..9: note = Table A: HLA-C*06:02H HLA-B*27:05M HLA-C*07:01H HLA-B*14:02H HLA-B*14:01H HLA-B*38:02M
  source 1..9: note = Severe acute respiratory syndrome coronavirus 2
VRIKIVQML

SEQ ID NO: 3504 - protein, 9 aa, Severe acute respiratory syndrome-related coronavirus
  REGION 1..9: note = Table A: HLA-C*08:01H HLA-B*39:01H
  source 1..9: note = Severe acute respiratory syndrome coronavirus 2
IVQMLSDTL

SEQ ID NO: 3505 - protein, 9 aa, Severe acute respiratory syndrome-related coronavirus
  REGION 1..9: note = Table A: HLA-A*11:303H HLA-A*02:11M HLA-A*68:02H HLA-A*02:04H HLA-A*02:05H HLA-A*02:07H HLA-A*02:01H HLA-A*02:02H HLA-A*02:03M HLA-B*38:02M
  source 1..9: note = Severe acute respiratory syndrome coronavirus 2
MLSDTLKNL

SEQ ID NO: 3506 - protein, 9 aa, Severe acute respiratory syndrome-related coronavirus
  REGION 1..9: note = Table A: HLA-A*33:01H HLA-A*33:03M HLA-A*26:03M HLA-A*68:01H HLA-A*34:01M HLA-A*34:02M HLA-A*66:01M
  source 1..9: note = Severe acute respiratory syndrome coronavirus 2
DTLKNLSDR

SEQ ID NO: 3507 - protein, 9 aa, Severe acute respiratory syndrome-related coronavirus
  REGION 1..9: note = Table A: HLA-A*02:05H HLA-A*02:02M HLA-A*02:03H HLA-B*38:02H HLA-B*13:02H
  source 1..9: note = Severe acute respiratory syndrome coronavirus 2
TLKNLSDRV

SEQ ID NO: 3508 - protein, 9 aa, Severe acute respiratory syndrome-related coronavirus
  REGION 1..9: note = Table A: HLA-B*57:03M
  source 1..9: note = Severe acute respiratory syndrome coronavirus 2
KNLSDRVVF

SEQ ID NO: 3509 - protein, 9 aa, Severe acute respiratory syndrome-related coronavirus
  REGION 1..9: note = Table A: HLA-C*04:03H HLA-A*02:11M HLA-A*68:02M HLA-C*15:02H HLA-A*02:04H HLA-A*02:05H HLA-A*02:06H HLA-A*02:07H HLA-B*14:01H HLA-A*02:01M HLA-A*02:02H HLA-A*02:03H HLA-B*38:02M
  source 1..9: note = Severe acute respiratory syndrome coronavirus 2
NLSDRVVFV

SEQ ID NO: 3510 - protein, 9 aa, Severe acute respiratory syndrome-related coronavirus
  REGION 1..9: note = Table A: HLA-B*58:01H HLA-C*04:03M HLA-C*08:01H HLA-C*08:02H HLA-B*57:03H
  source 1..9: note = Severe acute respiratory syndrome coronavirus 2
LSDRVVFVL

SEQ ID NO: 3511 - protein, 9 aa, Severe acute respiratory syndrome-related coronavirus
  REGION 1..9: note = Table A: HLA-B*57:01H HLA-B*44:03H
  source 1..9: note = Severe acute respiratory syndrome coronavirus 2
SDRVVFVLW

SEQ ID NO: 3512 - protein, 9 aa, Severe acute respiratory syndrome-related coronavirus
  REGION 1..9: note = Table A: HLA-C*14:03H HLA-A*24:02H HLA-A*24:07H HLA-A*23:01M
  source 1..9: note = Severe acute respiratory syndrome coronavirus 2
VFVLWAHGF

SEQ ID NO: 3513 - protein, 9 aa, Severe acute respiratory syndrome-related coronavirus
  REGION 1..9: note = Table A: HLA-A*74:01H HLA-A*02:11H HLA-A*02:04H HLA-A*02:06H HLA-A*02:07M HLA-A*02:01M HLA-A*02:02M HLA-C*08:01H HLA-B*38:02H HLA-A*32:01H HLA-B*40:06H HLA-B*13:02H
  source 1..9: note = Severe acute respiratory syndrome coronavirus 2
VLWAHGFEL

SEQ ID NO: 3514 - protein, 9 aa, Severe acute respiratory syndrome-related coronavirus
  REGION 1..9: note = Table A: HLA-B*38:01H HLA-B*38:02M HLA-B*39:01M HLA-B*15:10H
  source 1..9: note = Severe acute respiratory syndrome coronavirus 2
AHGFELTSM

SEQ ID NO: 3515 - protein, 9 aa, Severe acute respiratory syndrome-related coronavirus
  REGION 1..9: note = Table A: HLA-A*34:02H
  source 1..9: note = Severe acute respiratory syndrome coronavirus 2
HGFELTSMK

SEQ ID NO: 3516 - protein, 9 aa, Severe acute respiratory syndrome-related coronavirus
  REGION 1..9: note = Table A: HLA-A*36:01M HLA-A*29:02M HLA-A*30:02H
  source 1..9: note = Severe acute respiratory syndrome coronavirus 2
GFELTSMKY

SEQ ID NO: 3517 - protein, 9 aa, Severe acute respiratory syndrome-related coronavirus
  REGION 1..9: note = Table A: HLA-A*68:02M
  source 1..9: note = Severe acute respiratory syndrome coronavirus 2
ELTSMKYFV

SEQ ID NO: 3518 - protein, 9 aa, Severe acute respiratory syndrome-related coronavirus
  REGION 1..9: note = Table A: HLA-B*58:01M HLA-B*58:02M HLA-A*02:11H HLA-A*68:02H HLA-C*15:05H HLA-C*15:02M HLA-A*02:06H HLA-B*52:01H HLA-C*08:01H HLA-B*57:03H HLA-B*13:02H
  source 1..9: note = Severe acute respiratory syndrome coronavirus 2
TSMKYFVKI

SEQ ID NO: 3519 - protein, 9 aa, Severe acute respiratory syndrome-related coronavirus
  REGION 1..9: note = Table A: HLA-A*33:01H HLA-A*33:03H HLA-A*34:01H HLA-A*66:01H
  source 1..9: note = Severe acute respiratory syndrome coronavirus 2
YFVKIGPER

SEQ ID NO: 3520 - protein, 9 aa, Severe acute respiratory syndrome-related coronavirus
  REGION 1..9: note = Table A: HLA-C*14:03H
  source 1..9: note = Severe acute respiratory syndrome coronavirus 2
CFSTASDTY

SEQ ID NO: 3521 - protein, 9 aa, Severe acute respiratory syndrome-related coronavirus
  REGION 1..9: note = Table A: HLA-A*68:02H
  source 1..9: note = Severe acute respiratory syndrome coronavirus 2
STASDTYAC

SEQ ID NO: 3522 - protein, 9 aa, Severe acute respiratory syndrome-related coronavirus
  REGION 1..9: note = Table A: HLA-B*58:01M HLA-B*57:01H HLA-A*25:01M HLA-B*53:01H HLA-B*35:03H HLA-B*35:01M HLA-B*35:02H HLA-B*35:08H HLA-B*35:07H HLA-B*15:13H HLA-B*38:02M HLA-B*57:03H
  source 1..9: note = Severe acute respiratory syndrome coronavirus 2
TASDTYACW

SEQ ID NO: 3523 - protein, 9 aa, Severe acute respiratory syndrome-related coronavirus
  REGION 1..9: note = Table A: HLA-A*24:02H HLA-A*24:07H
  source 1..9: note = Severe acute respiratory syndrome coronavirus 2
TYACWHHSI

SEQ ID NO: 3524 - protein, 9 aa, Severe acute respiratory syndrome-related coronavirus
  REGION 1..9: note = Table A: HLA-B*38:02M
  source 1..9: note = Severe acute respiratory syndrome coronavirus 2
WHHSIGFDY

SEQ ID NO: 3525 - protein, 9 aa, Severe acute respiratory syndrome-related coronavirus
  REGION 1..9: note = Table A: HLA-B*38:01M HLA-B*38:02H HLA-B*15:10H
  source 1..9: note = Severe acute respiratory syndrome coronavirus 2
HHSIGFDYV

SEQ ID NO: 3526 - protein, 9 aa, Severe acute respiratory syndrome-related coronavirus
  REGION 1..9: note = Table A: HLA-B*58:01H HLA-C*16:01H HLA-C*16:04H HLA-A*36:01H HLA-A*29:02H HLA-C*07:01H HLA-C*03:02H HLA-A*30:02H HLA-C*12:03H HLA-B*35:01M HLA-B*35:08H HLA-B*35:07H HLA-B*38:02M HLA-B*15:02H HLA-B*57:03H
  source 1..9: note = Severe acute respiratory syndrome coronavirus 2
HSIGFDYVY

SEQ ID NO: 3527 - protein, 9 aa, Severe acute respiratory syndrome-related coronavirus
  REGION 1..9: note = Table A: HLA-C*04:01H HLA-C*04:03M
  source 1..9: note = Severe acute respiratory syndrome coronavirus 2
GFDYVYNPF

SEQ ID NO: 3528 - protein, 9 aa, Severe acute respiratory syndrome-related coronavirus
  REGION 1..9: note = Table A: HLA-C*14:02H HLA-C*14:03M HLA-C*06:02M HLA-C*07:02H HLA-C*08:01H
  source 1..9: note = Severe acute respiratory syndrome coronavirus 2
VYNPFMIDV

SEQ ID NO: 3529 - protein, 9 aa, Severe acute respiratory syndrome-related coronavirus
  REGION 1..9: note = Table A: HLA-A*24:02H HLA-A*24:07M HLA-A*23:01H
  source 1..9: note = Severe acute respiratory syndrome coronavirus 2
PFMIDVQQW

SEQ ID NO: 3530 - protein, 9 aa, Severe acute respiratory syndrome-related coronavirus
  REGION 1..9: note = Table A: HLA-C*04:03H HLA-A*02:07H HLA-C*08:02H HLA-B*38:02H
  source 1..9: note = Severe acute respiratory syndrome coronavirus 2
MIDVQQWGF

SEQ ID NO: 3531 - protein, 9 aa, Severe acute respiratory syndrome-related coronavirus
  REGION 1..9: note = Table A: HLA-B*48:01H HLA-A*02:11H HLA-A*02:05H HLA-B*52:01H HLA-B*38:02H HLA-B*15:03H HLA-B*39:01H HLA-B*13:02H
  source 1..9: note = Severe acute respiratory syndrome coronavirus 2
QQWGFTGNL

SEQ ID NO: 3532 - protein, 9 aa, Severe acute respiratory syndrome-related coronavirus
  REGION 1..9: note = Table A: HLA-A*34:02H
  source 1..9: note = Severe acute respiratory syndrome coronavirus 2
FTGNLQSNH

SEQ ID NO: 3533 - protein, 9 aa, Severe acute respiratory syndrome-related coronavirus
  REGION 1..9: note = Table A: HLA-A*30:02H HLA-B*38:02H HLA-B*15:02H
  source 1..9: note = Severe acute respiratory syndrome coronavirus 2
NLQSNHDLY

SEQ ID NO: 3534 - protein, 9 aa, Severe acute respiratory syndrome-related coronavirus
  REGION 1..9: note = Table A: HLA-A*02:05H HLA-B*38:02H HLA-B*13:02H
  source 1..9: note = Severe acute respiratory syndrome coronavirus 2
LQSNHDLYC

SEQ ID NO: 3535 - protein, 9 aa, Severe acute respiratory syndrome-related coronavirus
  REGION 1..9: note = Table A: HLA-A*68:02H
  source 1..9: note = Severe acute respiratory syndrome coronavirus 2
SNHDLYCQV

SEQ ID NO: 3536 - protein, 9 aa, Severe acute respiratory syndrome-related coronavirus
  REGION 1..9: note = Table A: HLA-B*46:01H HLA-C*07:27H
  source 1..9: note = Severe acute respiratory syndrome coronavirus 2
YCQVHGNAH

SEQ ID NO: 3537 - protein, 9 aa, Severe acute respiratory syndrome-related coronavirus
  REGION 1..9: note = Table A: HLA-A*02:05H HLA-A*02:06H HLA-B*52:01H HLA-B*38:02H HLA-B*13:02H
  source 1..9: note = Severe acute respiratory syndrome coronavirus 2
CQVHGNAHV

SEQ ID NO: 3538 - protein, 9 aa, Severe acute respiratory syndrome-related coronavirus
  REGION 1..9: note = Table A: HLA-B*56:01H HLA-B*55:02H HLA-B*55:01H HLA-A*02:05H HLA-A*02:08H HLA-B*38:02H HLA-B*54:01H
  source 1..9: note = Severe acute respiratory syndrome coronavirus 2
QVHGNAHVA

SEQ ID NO: 3539 - protein, 9 aa, Severe acute respiratory syndrome-related coronavirus
  REGION 1..9: note = Table A: HLA-C*15:05H
  source 1..9: note = Severe acute respiratory syndrome coronavirus 2
HGNAHVASC

SEQ ID NO: 3540 - protein, 9 aa, Severe acute respiratory syndrome-related coronavirus
  REGION 1..9: note = Table A: HLA-B*38:01H HLA-B*38:02H HLA-B*39:01M HLA-B*15:10H
  source 1..9: note = Severe acute respiratory syndrome coronavirus 2
AHVASCDAI

SEQ ID NO: 3541 - protein, 9 aa, Severe acute respiratory syndrome-related coronavirus
  REGION 1..9: note = Table A: HLA-B*35:03M HLA-B*35:01H HLA-B*35:02H HLA-B*35:08H HLA-B*35:12M HLA-B*38:02H HLA-B*15:02M
  source 1..9: note = Severe acute respiratory syndrome coronavirus 2
HVASCDAIM

SEQ ID NO: 3542 - protein, 9 aa, Severe acute respiratory syndrome-related coronavirus
  REGION 1..9: note = Table A: HLA-A*11:303H HLA-A*74:01H HLA-A*11:01M HLA-A*11:02H HLA-A*33:03H HLA-A*68:01H HLA-A*34:01H HLA-A*34:02H HLA-C*07:27H HLA-A*31:01M HLA-A*66:01M
  source 1..9: note = Severe acute respiratory syndrome coronavirus 2
ASCDAIMTR

SEQ ID NO: 3543 - protein, 9 aa, Severe acute respiratory syndrome-related coronavirus
  REGION 1..9: note = Table A: HLA-B*08:01M HLA-C*15:05H HLA-C*15:02H HLA-B*13:02H
  source 1..9: note = Severe acute respiratory syndrome coronavirus 2
AIMTRCLAV

SEQ ID NO: 3544 - protein, 9 aa, Severe acute respiratory syndrome-related coronavirus
  REGION 1..9: note = Table A: HLA-A*02:02M HLA-B*38:02H
  source 1..9: note = Severe acute respiratory syndrome coronavirus 2
CLAVHECFV

SEQ ID NO: 3545 - protein, 9 aa, Severe acute respiratory syndrome-related coronavirus
  REGION 1..9: note = Table A: HLA-A*74:01M HLA-A*11:01H HLA-A*11:02M HLA-A*33:01H HLA-A*33:03M HLA-A*26:03H HLA-A*68:01H HLA-A*34:01M HLA-A*34:02H HLA-A*31:01M HLA-A*66:01M
  source 1..9: note = Severe acute respiratory syndrome coronavirus 2
AVHECFVKR

SEQ ID NO: 3546 - protein, 9 aa, Severe acute respiratory syndrome-related coronavirus
  REGION 1..9: note = Table A: HLA-B*58:02H HLA-A*02:11H HLA-B*57:03H HLA-B*13:02H
  source 1..9: note = Severe acute respiratory syndrome coronavirus 2
FVKRVDWTI

SEQ ID NO: 3547 - protein, 9 aa, Severe acute respiratory syndrome-related coronavirus
  REGION 1..9: note = Table A: HLA-C*06:02M HLA-B*27:05M HLA-C*07:01M HLA-C*07:02M HLA-B*27:02M HLA-B*15:03H HLA-C*07:04H
  source 1..9: note = Severe acute respiratory syndrome coronavirus 2
KRVDWTIEY

SEQ ID NO: 3548 - protein, 9 aa, Severe acute respiratory syndrome-related coronavirus
  REGION 1..9: note = Table A: HLA-A*24:02M HLA-A*24:07H HLA-A*23:01H HLA-B*39:01H
  source 1..9: note = Severe acute respiratory syndrome coronavirus 2
EYPIIGDEL

SEQ ID NO: 3549 - protein, 9 aa, Severe acute respiratory syndrome-related coronavirus
  REGION 1..9: note = Table A: HLA-B*13:02H
  source 1..9: note = Severe acute respiratory syndrome coronavirus 2
PIIGDELKI

SEQ ID NO: 3550 - protein, 9 aa, Severe acute respiratory syndrome-related coronavirus
  REGION 1..9: note = Table A: HLA-B*45:01H HLA-B*50:01H
  source 1..9: note = Severe acute respiratory syndrome coronavirus 2
GDELKINAA

SEQ ID NO: 3551 - protein, 9 aa, Severe acute respiratory syndrome-related coronavirus
  REGION 1..9: note = Table A: HLA-B*18:01M HLA-B*07:05M
  source 1..9: note = Severe acute respiratory syndrome coronavirus 2
DELKINAAC

SEQ ID NO: 3552 - protein, 9 aa, Severe acute respiratory syndrome-related coronavirus
  REGION 1..9: note = Table A: HLA-A*33:01H HLA-A*33:03H HLA-A*26:03M HLA-A*34:01H
  source 1..9: note = Severe acute respiratory syndrome coronavirus 2
ELKINAACR

SEQ ID NO: 3553 - protein, 9 aa, Severe acute respiratory syndrome-related coronavirus
  REGION 1..9: note = Table A: HLA-B*15:03H
  source 1..9: note = Severe acute respiratory syndrome coronavirus 2
RKVQHMVVK

SEQ ID NO: 3554 - protein, 9 aa, Severe acute respiratory syndrome-related coronavirus
  REGION 1..9: note = Table A: HLA-B*56:01H HLA-A*02:11M HLA-B*55:02H HLA-B*55:01H HLA-A*02:05M HLA-A*02:06H HLA-A*02:08H HLA-A*02:02H HLA-B*40:06H
  source 1..9: note = Severe acute respiratory syndrome coronavirus 2
KVQHMVVKA

SEQ ID NO: 3555 - protein, 9 aa, Severe acute respiratory syndrome-related coronavirus
  REGION 1..9: note = Table A: HLA-A*02:08H HLA-A*02:03H HLA-B*52:01H HLA-B*38:02H HLA-B*39:06H HLA-B*40:06H HLA-B*15:01H HLA-B*50:01H
  source 1..9: note = Severe acute respiratory syndrome coronavirus 2
VQHMVVKAA

SEQ ID NO: 3556 - protein, 9 aa, Severe acute respiratory syndrome-related coronavirus
  REGION 1..9: note = Table A: HLA-B*38:01M HLA-B*38:02H HLA-B*39:06H HLA-B*39:01M HLA-B*15:10H
  source 1..9: note = Severe acute respiratory syndrome coronavirus 2
QHMVVKAAL

SEQ ID NO: 3557 - protein, 9 aa, Severe acute respiratory syndrome-related coronavirus
  REGION 1..9: note = Table A: HLA-B*08:01H HLA-A*02:11H HLA-A*02:02H HLA-B*38:02H
  source 1..9: note = Severe acute respiratory syndrome coronavirus 2
HMVVKAALL

SEQ ID NO: 3558 - protein, 9 aa, Severe acute respiratory syndrome-related coronavirus
  REGION 1..9: note = Table A: HLA-B*58:01M HLA-B*57:03M
  source 1..9: note = Severe acute respiratory syndrome coronavirus 2
KAALLADKF

SEQ ID NO: 3559 - protein, 9 aa, Severe acute respiratory syndrome-related coronavirus
  REGION 1..9: note = Table A: HLA-A*02:04H
  source 1..9: note = Severe acute respiratory syndrome coronavirus 2
ALLADKFPV

SEQ ID NO: 3560 - protein, 9 aa, Severe acute respiratory syndrome-related coronavirus
  REGION 1..9: note = Table A: HLA-A*11:303H HLA-B*08:01H HLA-C*03:03H HLA-A*02:11H HLA-C*03:02H HLA-C*03:04H HLA-A*68:02H HLA-A*02:04H HLA-A*02:05H HLA-A*02:06M HLA-A*02:07M HLA-B*14:01H HLA-A*02:01M HLA-A*02:02H HLA-A*02:03M
  REGION 1..9: note = CONT. FROM ABOVE: HLA-C*17:01H HLA-C*08:01M HLA-B*38:02M HLA- B*40:06M HLA-B*15:10H
  source 1..9: note = Severe acute respiratory syndrome coronavirus 2
LLADKFPVL

SEQ ID NO: 3561 - protein, 9 aa, Severe acute respiratory syndrome-related coronavirus
  REGION 1..9: note = Table A: HLA-A*36:01H HLA-C*04:03H HLA-C*05:01H
  source 1..9: note = Severe acute respiratory syndrome coronavirus 2
LADKFPVLH

SEQ ID NO: 3562 - protein, 9 aa, Severe acute respiratory syndrome-related coronavirus
  REGION 1..9: note = Table A: HLA-A*68:02H HLA-B*38:02H
  source 1..9: note = Severe acute respiratory syndrome coronavirus 2
DKFPVLHDI

SEQ ID NO: 3563 - protein, 9 aa, Severe acute respiratory syndrome-related coronavirus
  REGION 1..9: note = Table A: HLA-A*11:303H HLA-A*74:01H HLA-A*03:01M HLA-A*03:02M HLA-A*11:01H HLA-A*11:02H HLA-A*36:01H HLA-A*30:02H HLA-A*34:01H HLA-A*34:02H HLA-A*66:01H
  source 1..9: note = Severe acute respiratory syndrome coronavirus 2
VLHDIGNPK

SEQ ID NO: 3564 - protein, 9 aa, Severe acute respiratory syndrome-related coronavirus
  REGION 1..9: note = Table A: HLA-B*38:02H
  source 1..9: note = Severe acute respiratory syndrome coronavirus 2
LHDIGNPKA

SEQ ID NO: 3565 - protein, 9 aa, Severe acute respiratory syndrome-related coronavirus
  REGION 1..9: note = Table A: HLA-B*44:05M HLA-B*44:03H HLA-B*18:01H HLA-A*68:02H HLA-B*35:03H HLA-C*15:05H HLA-C*08:03H HLA-B*37:01H HLA-B*38:01H HLA-B*38:02M HLA-B*40:02M HLA-B*39:01H HLA-B*07:05H HLA-B*41:02M HLA-B*49:01M
  source 1..9: note = Severe acute respiratory syndrome coronavirus 2
HDIGNPKAI

SEQ ID NO: 3566 - protein, 9 aa, Severe acute respiratory syndrome-related coronavirus
  REGION 1..9: note = Table A: HLA-A*33:01H HLA-A*68:01H HLA-A*34:01H HLA-A*34:02M HLA-A*66:01H
  source 1..9: note = Severe acute respiratory syndrome coronavirus 2
DIGNPKAIK

SEQ ID NO: 3567 - protein, 9 aa, Severe acute respiratory syndrome-related coronavirus
  REGION 1..9: note = Table A: HLA-B*57:03H
  source 1..9: note = Severe acute respiratory syndrome coronavirus 2
CVPQADVEW

SEQ ID NO: 3568 - protein, 9 aa, Severe acute respiratory syndrome-related coronavirus
  REGION 1..9: note = Table A: HLA-A*24:07H HLA-B*38:02H HLA-B*13:01M
  source 1..9: note = Severe acute respiratory syndrome coronavirus 2
PQADVEWKF

SEQ ID NO: 3569 - protein, 9 aa, Severe acute respiratory syndrome-related coronavirus
  REGION 1..9: note = Table A: HLA-B*15:01H
  source 1..9: note = Severe acute respiratory syndrome coronavirus 2
AQPCSDKAY

SEQ ID NO: 3570 - protein, 9 aa, Severe acute respiratory syndrome-related coronavirus
  REGION 1..9: note = Table A: HLA-B*58:01M HLA-B*58:02M HLA-B*57:01H HLA-A*02:11H HLA-B*57:03H HLA-B*13:01H
  source 1..9: note = Severe acute respiratory syndrome coronavirus 2
KAYKIEELF

SEQ ID NO: 3571 - protein, 9 aa, Severe acute respiratory syndrome-related coronavirus
  REGION 1..9: note = Table A: HLA-C*14:03H HLA-A*29:02H HLA-A*30:02H
  source 1..9: note = Severe acute respiratory syndrome coronavirus 2
AYKIEELFY

SEQ ID NO: 3572 - protein, 9 aa, Severe acute respiratory syndrome-related coronavirus
  REGION 1..9: note = Table A: HLA-B*58:01H HLA-A*36:01H HLA-A*29:01H HLA-A*29:02M HLA-A*01:01H HLA-C*07:01H HLA-A*30:02M HLA-B*07:05H HLA-B*57:03H
  source 1..9: note = Severe acute respiratory syndrome coronavirus 2
KIEELFYSY

SEQ ID NO: 3573 - protein, 9 aa, Severe acute respiratory syndrome-related coronavirus
  REGION 1..9: note = Table A: HLA-A*26:03H HLA-A*34:01M HLA-A*34:02H
  source 1..9: note = Severe acute respiratory syndrome coronavirus 2
ELFYSYATH

SEQ ID NO: 3574 - protein, 9 aa, Severe acute respiratory syndrome-related coronavirus
  REGION 1..9: note = Table A: HLA-A*34:02M
  source 1..9: note = Severe acute respiratory syndrome coronavirus 2
YSYATHSDK

SEQ ID NO: 3575 - protein, 9 aa, Severe acute respiratory syndrome-related coronavirus
  REGION 1..9: note = Table A: HLA-C*14:02H HLA-C*14:03H HLA-B*44:05H HLA-C*07:02H HLA-A*24:02H HLA-A*24:07H HLA-C*08:01H HLA-A*23:01M HLA-B*38:02H HLA-B*39:01H
  source 1..9: note = Severe acute respiratory syndrome coronavirus 2
SYATHSDKF

SEQ ID NO: 3576 - protein, 9 aa, Severe acute respiratory syndrome-related coronavirus
  REGION 1..9: note = Table A: HLA-C*14:03H HLA-A*24:02H HLA-A*24:07H HLA-A*23:01H
  source 1..9: note = Severe acute respiratory syndrome coronavirus 2
KFTDGVCLF

SEQ ID NO: 3577 - protein, 9 aa, Severe acute respiratory syndrome-related coronavirus
  REGION 1..9: note = Table A: HLA-B*58:01M HLA-C*04:03H HLA-B*53:01H HLA-B*57:03H
  source 1..9: note = Severe acute respiratory syndrome coronavirus 2
FTDGVCLFW

SEQ ID NO: 3578 - protein, 9 aa, Severe acute respiratory syndrome-related coronavirus
  REGION 1..9: note = Table A: HLA-B*41:02H
  source 1..9: note = Severe acute respiratory syndrome coronavirus 2
VDRYPANSI

SEQ ID NO: 3579 - protein, 9 aa, Severe acute respiratory syndrome-related coronavirus
  REGION 1..9: note = Table A: HLA-B*14:02M HLA-B*14:01M HLA-B*38:02H HLA-B*39:06H HLA-B*39:01H
  source 1..9: note = Severe acute respiratory syndrome coronavirus 2
DRYPANSIV

SEQ ID NO: 3580 - protein, 9 aa, Severe acute respiratory syndrome-related coronavirus
  REGION 1..9: note = Table A: HLA-A*33:01H HLA-A*33:03M HLA-B*56:01H HLA-A*26:03H HLA-B*55:02H HLA-A*68:01M HLA-A*68:02H HLA-A*34:01H HLA-A*34:02M HLA-B*35:07H HLA-B*54:01H HLA-A*66:01M
  source 1..9: note = Severe acute respiratory syndrome coronavirus 2
YPANSIVCR

SEQ ID NO: 3581 - protein, 9 aa, Severe acute respiratory syndrome-related coronavirus
  REGION 1..9: note = Table A: HLA-A*02:11H HLA-A*68:02H HLA-A*02:02H HLA-B*40:02H
  source 1..9: note = Severe acute respiratory syndrome coronavirus 2
FDTRVLSNL

SEQ ID NO: 3582 - protein, 9 aa, Severe acute respiratory syndrome-related coronavirus
  REGION 1..9: note = Table A: HLA-B*14:02H HLA-B*14:01H HLA-B*38:02H
  source 1..9: note = Severe acute respiratory syndrome coronavirus 2
TRVLSNLNL

SEQ ID NO: 3583 - protein, 9 aa, Severe acute respiratory syndrome-related coronavirus
  REGION 1..9: note = Table A: HLA-C*15:05M HLA-B*07:05H
  source 1..9: note = Severe acute respiratory syndrome coronavirus 2
LPGCDGGSL

SEQ ID NO: 3584 - protein, 9 aa, Severe acute respiratory syndrome-related coronavirus
  REGION 1..9: note = Table A: HLA-A*33:01H HLA-A*33:03H HLA-A*68:01H HLA-A*34:02H
  source 1..9: note = Severe acute respiratory syndrome coronavirus 2
DGGSLYVNK

SEQ ID NO: 3585 - protein, 9 aa, Severe acute respiratory syndrome-related coronavirus
  REGION 1..9: note = Table A: HLA-A*11:303H HLA-B*46:01H HLA-B*08:01H HLA-A*02:11H HLA-A*30:02H HLA-B*38:02M HLA-A*32:01H HLA-B*15:01H HLA-B*15:02H HLA-B*15:03H
  source 1..9: note = Severe acute respiratory syndrome coronavirus 2
SLYVNKHAF

SEQ ID NO: 3586 - protein, 9 aa, Severe acute respiratory syndrome-related coronavirus
  REGION 1..9: note = Table A: HLA-A*02:11H
  source 1..9: note = Severe acute respiratory syndrome coronavirus 2
YVNKHAFHT

SEQ ID NO: 3587 - protein, 9 aa, Severe acute respiratory syndrome-related coronavirus
  REGION 1..9: note = Table A: HLA-B*38:01H HLA-B*38:02M HLA-B*15:03M HLA-B*15:10M
  source 1..9: note = Severe acute respiratory syndrome coronavirus 2
KHAFHTPAF

SEQ ID NO: 3588 - protein, 9 aa, Severe acute respiratory syndrome-related coronavirus
  REGION 1..9: note = Table A: HLA-A*11:01H HLA-A*34:02H
  source 1..9: note = Severe acute respiratory syndrome coronavirus 2
AFHTPAFDK

SEQ ID NO: 3589 - protein, 9 aa, Severe acute respiratory syndrome-related coronavirus
  REGION 1..9: note = Table A: HLA-B*38:02H
  source 1..9: note = Severe acute respiratory syndrome coronavirus 2
FHTPAFDKS

SEQ ID NO: 3590 - protein, 9 aa, Severe acute respiratory syndrome-related coronavirus
  REGION 1..9: note = Table A: HLA-B*53:01M HLA-B*35:03H HLA-C*15:05M HLA-B*35:01H HLA-B*35:02H HLA-B*35:08H HLA-B*35:07H HLA-B*35:12M HLA-B*38:02H HLA-B*07:02M HLA-B*07:04H HLA-B*15:02H HLA-B*07:05M HLA-B*15:11H
  source 1..9: note = Severe acute respiratory syndrome coronavirus 2
TPAFDKSAF

SEQ ID NO: 3591 - protein, 9 aa, Severe acute respiratory syndrome-related coronavirus
  REGION 1..9: note = Table A: HLA-A*68:02H HLA-B*51:01H
  source 1..9: note = Severe acute respiratory syndrome coronavirus 2
PAFDKSAFV

SEQ ID NO: 3592 - protein, 9 aa, Severe acute respiratory syndrome-related coronavirus
  REGION 1..9: note = Table A: HLA-A*11:303H HLA-C*12:05H HLA-C*03:02H HLA-C*12:03H HLA-B*07:04H
  source 1..9: note = Severe acute respiratory syndrome coronavirus 2
SAFVNLKQL

SEQ ID NO: 3593 - protein, 9 aa, Severe acute respiratory syndrome-related coronavirus
  REGION 1..9: note = Table A: HLA-B*08:01H HLA-C*03:02H HLA-B*35:07H HLA-B*15:02H
  source 1..9: note = Severe acute respiratory syndrome coronavirus 2
FVNLKQLPF

SEQ ID NO: 3594 - protein, 9 aa, Severe acute respiratory syndrome-related coronavirus
  REGION 1..9: note = Table A: HLA-B*57:03H
  source 1..9: note = Severe acute respiratory syndrome coronavirus 2
VNLKQLPFF

SEQ ID NO: 3595 - protein, 9 aa, Severe acute respiratory syndrome-related coronavirus
  REGION 1..9: note = Table A: HLA-A*29:02H HLA-A*30:02H
  source 1..9: note = Severe acute respiratory syndrome coronavirus 2
NLKQLPFFY

SEQ ID NO: 3596 - protein, 9 aa, Severe acute respiratory syndrome-related coronavirus
  REGION 1..9: note = Table A: HLA-B*39:01H
  source 1..9: note = Severe acute respiratory syndrome coronavirus 2
YYSDSPCES

SEQ ID NO: 3597 - protein, 9 aa, Severe acute respiratory syndrome-related coronavirus
  REGION 1..9: note = Table A: HLA-B*49:01M
  source 1..9: note = Severe acute respiratory syndrome coronavirus 2
CESHGKQVV

SEQ ID NO: 3598 - protein, 9 aa, Severe acute respiratory syndrome-related coronavirus
  REGION 1..9: note = Table A: HLA-B*15:01M HLA-B*15:03H
  source 1..9: note = Severe acute respiratory syndrome coronavirus 2
KQVVSDIDY

SEQ ID NO: 3599 - protein, 9 aa, Severe acute respiratory syndrome-related coronavirus
  REGION 1..9: note = Table A: HLA-A*02:11H HLA-A*68:02M HLA-A*02:05M HLA-A*02:06H HLA-A*02:08M HLA-A*02:01H HLA-B*38:02H
  source 1..9: note = Severe acute respiratory syndrome coronavirus 2
QVVSDIDYV

SEQ ID NO: 3600 - protein, 9 aa, Severe acute respiratory syndrome-related coronavirus
  REGION 1..9: note = Table A: HLA-C*04:03M HLA-C*08:01H HLA-C*08:02M
  source 1..9: note = Severe acute respiratory syndrome coronavirus 2
VSDIDYVPL

SEQ ID NO: 3601 - protein, 9 aa, Severe acute respiratory syndrome-related coronavirus
  REGION 1..9: note = Table A: HLA-A*11:01H HLA-A*11:02H HLA-A*34:02H
  source 1..9: note = Severe acute respiratory syndrome coronavirus 2
SDIDYVPLK

SEQ ID NO: 3602 - protein, 9 aa, Severe acute respiratory syndrome-related coronavirus
  REGION 1..9: note = Table A: HLA-B*56:01H HLA-B*55:02H HLA-B*40:06H HLA-B*54:01H HLA-B*50:01M
  source 1..9: note = Severe acute respiratory syndrome coronavirus 2
IDYVPLKSA

SEQ ID NO: 3603 - protein, 9 aa, Severe acute respiratory syndrome-related coronavirus
  REGION 1..9: note = Table A: HLA-C*15:05H HLA-B*51:01H HLA-B*07:05M
  source 1..9: note = Severe acute respiratory syndrome coronavirus 2
VPLKSATCI

SEQ ID NO: 3604 - protein, 9 aa, Severe acute respiratory syndrome-related coronavirus
  REGION 1..9: note = Table A: HLA-A*33:03H
  source 1..9: note = Severe acute respiratory syndrome coronavirus 2
CNLGGAVCR

SEQ ID NO: 3605 - protein, 9 aa, Severe acute respiratory syndrome-related coronavirus
  REGION 1..9: note = Table A: HLA-B*46:01H
  source 1..9: note = Severe acute respiratory syndrome coronavirus 2
VCRHHANEY

SEQ ID NO: 3606 - protein, 9 aa, Severe acute respiratory syndrome-related coronavirus
  REGION 1..9: note = Table A: HLA-B*38:01M HLA-B*38:02H HLA-B*13:01H HLA-B*15:10H
  source 1..9: note = Severe acute respiratory syndrome coronavirus 2
RHHANEYRL

SEQ ID NO: 3607 - protein, 9 aa, Severe acute respiratory syndrome-related coronavirus
  REGION 1..9: note = Table A: HLA-B*38:02M
  source 1..9: note = Severe acute respiratory syndrome coronavirus 2
HHANEYRLY

SEQ ID NO: 3608 - protein, 9 aa, Severe acute respiratory syndrome-related coronavirus
  REGION 1..9: note = Table A: HLA-B*42:01H HLA-B*58:01M HLA-B*58:02M HLA-C*14:03H HLA-A*11:303H HLA-C*16:01H HLA-A*36:01H HLA-B*57:01H HLA-C*06:02H HLA-B*08:01H HLA-C*04:03H HLA-C*03:03M HLA-C*07:01H HLA-C*12:05H HLA-A*02:11M HLA-B*53:01H
  REGION 1..9: note = CONT. FROM ABOVE: HLA-C*03:02M HLA-C*03:04M HLA-A*68:02H HLA- B*35:03H HLA-C*15:05M HLA-C*12:02H HLA-C*12:03M HLA-C*15:02H HLA-A*02:04M HLA-A*02:06H HLA-A*02:07H HLA-A*02:02M HLA-A*34 :01H HLA-A*34:02M HLA-B*35:01H HLA-B*35:02H HLA-B*51:01H
  REGION 1..9: note = CONT. FROM ABOVE: HLA-C*17:01M HLA-A*24:07H HLA-B*35:07H HLA- C*08:01M HLA-B*35:12H HLA-B*38:01H HLA-B*38:02M HLA-A*32:01H HLA-B*07:02H HLA-B*07:04M HLA-B*07:05H HLA-B*57:03M HLA-C*02 :02H HLA-B*13:01H HLA-B*13:02H HLA-B*15:10H HLA-C*07:04H
  REGION 1..9: note = CONT. FROM ABOVE: HLA-A*66:01H
  source 1..9: note = Severe acute respiratory syndrome coronavirus 2
HANEYRLYL

SEQ ID NO: 3609 - protein, 9 aa, Severe acute respiratory syndrome-related coronavirus
  REGION 1..9: note = Table A: HLA-B*45:01H HLA-B*40:06H HLA-B*50:01H
  source 1..9: note = Severe acute respiratory syndrome coronavirus 2
NEYRLYLDA

SEQ ID NO: 3610 - protein, 9 aa, Severe acute respiratory syndrome-related coronavirus
  REGION 1..9: note = Table A: HLA-A*02:11H HLA-B*13:01H
  source 1..9: note = Severe acute respiratory syndrome coronavirus 2
RLYLDAYNM

SEQ ID NO: 3611 - protein, 9 aa, Severe acute respiratory syndrome-related coronavirus
  REGION 1..9: note = Table A: HLA-C*14:02H HLA-C*14:03H HLA-A*24:02H
  source 1..9: note = Severe acute respiratory syndrome coronavirus 2
LYLDAYNMM

SEQ ID NO: 3612 - protein, 9 aa, Severe acute respiratory syndrome-related coronavirus
  REGION 1..9: note = Table A: HLA-A*02:11H HLA-A*02:06H HLA-A*02:07M HLA-A*02:01M HLA-C*08:01H HLA-C*08:02H HLA-B*38:02M HLA-B*13:01H HLA-B*13:02H
  source 1..9: note = Severe acute respiratory syndrome coronavirus 2
YLDAYNMMI

SEQ ID NO: 3613 - protein, 9 aa, Severe acute respiratory syndrome-related coronavirus
  REGION 1..9: note = Table A: HLA-B*56:01H HLA-B*55:02H HLA-A*68:02H HLA-C*15:05H HLA-B*51:01M HLA-B*38:02H HLA-B*39:06M HLA-B*54:01H HLA-B*07:05H
  source 1..9: note = Severe acute respiratory syndrome coronavirus 2
DAYNMMISA

SEQ ID NO: 3614 - protein, 9 aa, Severe acute respiratory syndrome-related coronavirus
  REGION 1..9: note = Table A: HLA-B*38:02H
  source 1..9: note = Severe acute respiratory syndrome coronavirus 2
YNMMISAGF

SEQ ID NO: 3615 - protein, 9 aa, Severe acute respiratory syndrome-related coronavirus
  REGION 1..9: note = Table A: HLA-C*08:01H HLA-B*38:02M HLA-B*15:02H
  source 1..9: note = Severe acute respiratory syndrome coronavirus 2
MMISAGFSL

SEQ ID NO: 3616 - protein, 9 aa, Severe acute respiratory syndrome-related coronavirus
  REGION 1..9: note = Table A: HLA-B*53:01H HLA-B*38:02H
  source 1..9: note = Severe acute respiratory syndrome coronavirus 2
MISAGFSLW

SEQ ID NO: 3617 - protein, 9 aa, Severe acute respiratory syndrome-related coronavirus
  REGION 1..9: note = Table A: HLA-C*15:02M
  source 1..9: note = Severe acute respiratory syndrome coronavirus 2
ISAGFSLWV

SEQ ID NO: 3618 - protein, 9 aa, Severe acute respiratory syndrome-related coronavirus
  REGION 1..9: note = Table A: HLA-B*35:07H
  source 1..9: note = Severe acute respiratory syndrome coronavirus 2
SAGFSLWVY

SEQ ID NO: 3619 - protein, 9 aa, Severe acute respiratory syndrome-related coronavirus
  REGION 1..9: note = Table A: HLA-A*11:02H
  source 1..9: note = Severe acute respiratory syndrome coronavirus 2
AGFSLWVYK

SEQ ID NO: 3620 - protein, 9 aa, Severe acute respiratory syndrome-related coronavirus
  REGION 1..9: note = Table A: HLA-B*58:02H HLA-B*57:03H
  source 1..9: note = Severe acute respiratory syndrome coronavirus 2
FSLWVYKQF

SEQ ID NO: 3621 - protein, 9 aa, Severe acute respiratory syndrome-related coronavirus
  REGION 1..9: note = Table A: HLA-A*36:01H HLA-A*25:01H HLA-A*26:01H HLA-A*29:01H HLA-A*29:02M HLA-A*30:02H HLA-A*34:02H HLA-B*35:01H HLA-B*35:07M HLA-B*38:02M HLA-B*15:01H HLA-B*15:02M HLA-B*15:03H HLA-B*07:05H
  source 1..9: note = Severe acute respiratory syndrome coronavirus 2
WVYKQFDTY

SEQ ID NO: 3622 - protein, 9 aa, Severe acute respiratory syndrome-related coronavirus
  REGION 1..9: note = Table A: HLA-B*58:01H HLA-B*58:02M HLA-B*57:01M HLA-B*44:03H HLA-B*53:01H HLA-A*24:02H HLA-A*24:07M HLA-A*23:01H HLA-B*38:02H HLA-A*32:01H HLA-B*15:03M HLA-B*57:03H HLA-B*13:01H HLA-B*13:02H
  source 1..9: note = Severe acute respiratory syndrome coronavirus 2
KQFDTYNLW

SEQ ID NO: 3623 - protein, 9 aa, Severe acute respiratory syndrome-related coronavirus
  REGION 1..9: note = Table A: HLA-A*25:01H HLA-A*26:01H HLA-A*26:02H HLA-A*68:02H HLA-C*15:05H HLA-A*34:02H HLA-A*66:01H
  source 1..9: note = Severe acute respiratory syndrome coronavirus 2
DTYNLWNTF

SEQ ID NO: 3624 - protein, 9 aa, Severe acute respiratory syndrome-related coronavirus
  REGION 1..9: note = Table A: HLA-A*02:11H HLA-A*02:04H HLA-A*02:06H HLA-A*02:07H HLA-A*02:01H HLA-A*02:02M HLA-C*08:01H HLA-B*38:02H HLA-B*40:06H
  source 1..9: note = Severe acute respiratory syndrome coronavirus 2
NLWNTFTRL

SEQ ID NO: 3625 - protein, 9 aa, Severe acute respiratory syndrome-related coronavirus
  REGION 1..9: note = Table A: HLA-C*16:01H HLA-B*08:01M HLA-A*68:02H HLA-C*15:05H HLA-B*14:02M HLA-A*02:04H HLA-A*02:05H HLA-B*14:01H
  source 1..9: note = Severe acute respiratory syndrome coronavirus 2
NTFTRLQSL

SEQ ID NO: 3626 - protein, 9 aa, Severe acute respiratory syndrome-related coronavirus
  REGION 1..9: note = Table A: HLA-B*14:01H HLA-B*38:02H HLA-B*39:01H
  source 1..9: note = Severe acute respiratory syndrome coronavirus 2
TRLQSLENV

SEQ ID NO: 3627 - protein, 9 aa, Severe acute respiratory syndrome-related coronavirus
  REGION 1..9: note = Table A: HLA-B*38:02H HLA-B*15:01M HLA-B*15:02H HLA-B*39:01H HLA-B*13:01H
  source 1..9: note = Severe acute respiratory syndrome coronavirus 2
LQSLENVAF

SEQ ID NO: 3628 - protein, 9 aa, Severe acute respiratory syndrome-related coronavirus
  REGION 1..9: note = Table A: HLA-A*02:11H HLA-A*68:02H HLA-A*02:04H HLA-A*02:07H HLA-A*02:01H HLA-B*13:02H
  source 1..9: note = Severe acute respiratory syndrome coronavirus 2
SLENVAFNV

SEQ ID NO: 3629 - protein, 9 aa, Severe acute respiratory syndrome-related coronavirus
  REGION 1..9: note = Table A: HLA-B*45:01H HLA-B*18:01H HLA-B*40:02M HLA-B*40:06H HLA-B*41:02H HLA-B*49:01H HLA-B*50:01M
  source 1..9: note = Severe acute respiratory syndrome coronavirus 2
LENVAFNVV

SEQ ID NO: 3630 - protein, 9 aa, Severe acute respiratory syndrome-related coronavirus
  REGION 1..9: note = Table A: HLA-A*11:303H HLA-A*03:01H HLA-A*03:02M HLA-A*11:01M HLA-A*11:02M HLA-A*33:01H HLA-A*33:03H HLA-A*26:03H HLA-A*68:01H HLA-A*68:02H HLA-A*34:01M HLA-A*34:02H HLA-C*07:27H HLA-A*66:01M
  source 1..9: note = Severe acute respiratory syndrome coronavirus 2
NVAFNVVNK

SEQ ID NO: 3631 - protein, 9 aa, Severe acute respiratory syndrome-related coronavirus
  REGION 1..9: note = Table A: HLA-B*39:01H
  source 1..9: note = Severe acute respiratory syndrome coronavirus 2
GHFDGQQGE

SEQ ID NO: 3632 - protein, 9 aa, Severe acute respiratory syndrome-related coronavirus
  REGION 1..9: note = Table A: HLA-C*04:01H
  source 1..9: note = Severe acute respiratory syndrome coronavirus 2
HFDGQQGEV

SEQ ID NO: 3633 - protein, 9 aa, Severe acute respiratory syndrome-related coronavirus
  REGION 1..9: note = Table A: HLA-B*35:02H
  source 1..9: note = Severe acute respiratory syndrome coronavirus 2
DGQQGEVPV

SEQ ID NO: 3634 - protein, 9 aa, Severe acute respiratory syndrome-related coronavirus
  REGION 1..9: note = Table A: HLA-A*02:11H HLA-A*02:05H HLA-B*52:01H HLA-B*38:01H HLA-B*38:02M HLA-B*39:01H HLA-B*13:01H HLA-B*13:02H
  source 1..9: note = Severe acute respiratory syndrome coronavirus 2
QQGEVPVSI

SEQ ID NO: 3635 - protein, 9 aa, Severe acute respiratory syndrome-related coronavirus
  REGION 1..9: note = Table A: HLA-B*56:01H HLA-B*55:02H HLA-B*54:01H
  source 1..9: note = Severe acute respiratory syndrome coronavirus 2
VPVSIINNT

SEQ ID NO: 3636 - protein, 9 aa, Severe acute respiratory syndrome-related coronavirus
  REGION 1..9: note = Table A: HLA-B*58:01H HLA-B*46:01M HLA-B*15:01M HLA-B*15:03H
  source 1..9: note = Severe acute respiratory syndrome coronavirus 2
VSIINNTVY

SEQ ID NO: 3637 - protein, 9 aa, Severe acute respiratory syndrome-related coronavirus
  REGION 1..9: note = Table A: HLA-A*11:303H HLA-A*74:01H HLA-A*03:01M HLA-A*03:02H HLA-A*11:01M HLA-A*11:02M HLA-A*36:01H HLA-A*30:02H HLA-A*68:01H HLA-A*34:02H HLA-C*07:27H
  source 1..9: note = Severe acute respiratory syndrome coronavirus 2
IINNTVYTK

SEQ ID NO: 3638 - protein, 9 aa, Severe acute respiratory syndrome-related coronavirus
  REGION 1..9: note = Table A: HLA-C*15:02H
  source 1..9: note = Severe acute respiratory syndrome coronavirus 2
INNTVYTKV

SEQ ID NO: 3639 - protein, 9 aa, Severe acute respiratory syndrome-related coronavirus
  REGION 1..9: note = Table A: HLA-A*02:11H HLA-A*68:02M HLA-A*02:05H HLA-A*02:06M HLA-A*02:07H HLA-A*02:08H HLA-B*14:01H HLA-A*02:01M HLA-A*02:02M HLA-A*02:03M HLA-B*38:02H HLA-B*13:02H
  source 1..9: note = Severe acute respiratory syndrome coronavirus 2
TVYTKVDGV

SEQ ID NO: 3640 - protein, 9 aa, Severe acute respiratory syndrome-related coronavirus
  REGION 1..9: note = Table A: HLA-A*68:02H HLA-C*12:03H HLA-B*38:02H
  source 1..9: note = Severe acute respiratory syndrome coronavirus 2
YTKVDGVDV

SEQ ID NO: 3641 - protein, 9 aa, Severe acute respiratory syndrome-related coronavirus
  REGION 1..9: note = Table A: HLA-A*11:303H HLA-C*04:01H HLA-C*04:03H HLA-A*02:11M HLA-C*15:05H HLA-A*02:05M HLA-A*02:06M HLA-A*02:07H HLA-A*02:08M HLA-A*02:01H HLA-A*02:02H HLA-B*35:02M HLA-C*08:01M HLA-C*08:02M HLA-B*35:12M
  REGION 1..9: note = CONT. FROM ABOVE: HLA-B*38:01H HLA-B*38:02H HLA-B*40:01H HLA- B*57:03H HLA-C*05:01M HLA-B*13:01M
  source 1..9: note = Severe acute respiratory syndrome coronavirus 2
KVDGVDVEL

SEQ ID NO: 3642 - protein, 9 aa, Severe acute respiratory syndrome-related coronavirus
  REGION 1..9: note = Table A: HLA-B*27:02H
  source 1..9: note = Severe acute respiratory syndrome coronavirus 2
VDVELFENK

SEQ ID NO: 3643 - protein, 9 aa, Severe acute respiratory syndrome-related coronavirus
  REGION 1..9: note = Table A: HLA-A*25:01H HLA-A*26:03H HLA-B*08:01M HLA-A*02:11H HLA-A*68:02M HLA-B*14:02H HLA-A*02:04H HLA-B*14:01M HLA-A*02:02M HLA-A*02:03H HLA-A*34:01H HLA-B*38:02M HLA-B*15:02M HLA-B*39:01H
  source 1..9: note = Severe acute respiratory syndrome coronavirus 2
ELFENKTTL

SEQ ID NO: 3644 - protein, 9 aa, Severe acute respiratory syndrome-related coronavirus
  REGION 1..9: note = Table A: HLA-B*49:01H
  source 1..9: note = Severe acute respiratory syndrome coronavirus 2
FENKTTLPV

SEQ ID NO: 3645 - protein, 9 aa, Severe acute respiratory syndrome-related coronavirus
  REGION 1..9: note = Table A: HLA-B*58:01H HLA-B*58:02H HLA-A*11:303H HLA-B*44:05H HLA-B*57:01H HLA-B*46:01H HLA-A*29:01H HLA-A*29:02H HLA-B*53:01H HLA-C*03:02H HLA-A*30:02H HLA-C*15:05M HLA-A*24:02H HLA-B*35:01M HLA-B*35:07H
  REGION 1..9: note = CONT. FROM ABOVE: HLA-C*08:01H HLA-A*23:01H HLA-B*15:13H HLA- B*38:02M HLA-A*32:01H HLA-B*15:01M HLA-B*15:02M HLA-B*07:05M HLA-B*57:03H
  source 1..9: note = Severe acute respiratory syndrome coronavirus 2
TTLPVNVAF

SEQ ID NO: 3646 - protein, 9 aa, Severe acute respiratory syndrome-related coronavirus
  REGION 1..9: note = Table A: HLA-B*53:01M HLA-B*35:03H HLA-C*15:05H HLA-B*35:01M HLA-B*35:02M HLA-B*35:07M HLA-B*35:12M HLA-B*54:01H HLA-B*07:05H
  source 1..9: note = Severe acute respiratory syndrome coronavirus 2
LPVNVAFEL

SEQ ID NO: 3647 - protein, 9 aa, Severe acute respiratory syndrome-related coronavirus
  REGION 1..9: note = Table A: HLA-A*24:07H
  source 1..9: note = Severe acute respiratory syndrome coronavirus 2
PVNVAFELW

SEQ ID NO: 3648 - protein, 9 aa, Severe acute respiratory syndrome-related coronavirus
  REGION 1..9: note = Table A: HLA-A*34:02H
  source 1..9: note = Severe acute respiratory syndrome coronavirus 2
NVAFELWAK

SEQ ID NO: 3649 - protein, 9 aa, Severe acute respiratory syndrome-related coronavirus
  REGION 1..9: note = Table A: HLA-A*74:01H HLA-A*33:01H HLA-A*33:03H HLA-A*34:01H HLA-A*66:01H
  source 1..9: note = Severe acute respiratory syndrome coronavirus 2
VAFELWAKR

SEQ ID NO: 3650 - protein, 9 aa, Severe acute respiratory syndrome-related coronavirus
  REGION 1..9: note = Table A: HLA-B*49:01H
  source 1..9: note = Severe acute respiratory syndrome coronavirus 2
FELWAKRNI

SEQ ID NO: 3651 - protein, 9 aa, Severe acute respiratory syndrome-related coronavirus
  REGION 1..9: note = Table A: HLA-A*34:02H
  source 1..9: note = Severe acute respiratory syndrome coronavirus 2
ELWAKRNIK

SEQ ID NO: 3652 - protein, 9 aa, Severe acute respiratory syndrome-related coronavirus
  REGION 1..9: note = Table A: HLA-A*02:11H HLA-C*15:05H HLA-C*15:02M HLA-A*02:06H HLA-A*02:01H HLA-B*40:02H HLA-B*40:06H HLA-B*13:02H
  source 1..9: note = Severe acute respiratory syndrome coronavirus 2
RNIKPVPEV

SEQ ID NO: 3653 - protein, 9 aa, Severe acute respiratory syndrome-related coronavirus
  REGION 1..9: note = Table A: HLA-A*34:02H
  source 1..9: note = Severe acute respiratory syndrome coronavirus 2
NIKPVPEVK

SEQ ID NO: 3654 - protein, 9 aa, Severe acute respiratory syndrome-related coronavirus
  REGION 1..9: note = Table A: HLA-B*42:01H HLA-B*53:01H HLA-B*35:03M HLA-C*15:05M HLA-B*35:02H HLA-B*35:07H HLA-B*35:12H HLA-B*07:02M HLA-B*07:04H HLA-B*07:05H
  source 1..9: note = Severe acute respiratory syndrome coronavirus 2
KPVPEVKIL

SEQ ID NO: 3655 - protein, 9 aa, Severe acute respiratory syndrome-related coronavirus
  REGION 1..9: note = Table A: HLA-B*38:02H HLA-B*13:02H
  source 1..9: note = Severe acute respiratory syndrome coronavirus 2
ILNNLGVDI

SEQ ID NO: 3656 - protein, 9 aa, Severe acute respiratory syndrome-related coronavirus
  REGION 1..9: note = Table A: HLA-B*39:06H
  source 1..9: note = Severe acute respiratory syndrome coronavirus 2
NNLGVDIAA

SEQ ID NO: 3657 - protein, 9 aa, Severe acute respiratory syndrome-related coronavirus
  REGION 1..9: note = Table A: HLA-A*02:06H HLA-A*02:07H HLA-B*14:01H HLA-C*08:02H
  source 1..9: note = Severe acute respiratory syndrome coronavirus 2
GVDIAANTV

SEQ ID NO: 3658 - protein, 9 aa, Severe acute respiratory syndrome-related coronavirus
  REGION 1..9: note = Table A: HLA-B*58:01H HLA-C*16:01H HLA-C*16:04H HLA-A*29:01H HLA-A*29:02H HLA-A*30:02M HLA-C*12:02H HLA-B*35:01M HLA-C*02:02H
  source 1..9: note = Severe acute respiratory syndrome coronavirus 2
AANTVIWDY

SEQ ID NO: 3659 - protein, 9 aa, Severe acute respiratory syndrome-related coronavirus
  REGION 1..9: note = Table A: HLA-A*66:01H
  source 1..9: note = Severe acute respiratory syndrome coronavirus 2
NTVIWDYKR

SEQ ID NO: 3660 - protein, 9 aa, Severe acute respiratory syndrome-related coronavirus
  REGION 1..9: note = Table A: HLA-A*25:01M HLA-A*33:01H HLA-A*33:03H HLA-A*26:01H HLA-A*26:02H HLA-A*26:03H HLA-B*53:01M HLA-A*68:01H HLA-A*68:02M HLA-C*15:05M HLA-A*34:01H HLA-A*34:02H HLA-B*51:01H HLA-B*52:01H HLA-B*38:02H HLA-B*07:05H
  source 1..9: note = Severe acute respiratory syndrome coronavirus 2
DAPAHISTI

SEQ ID NO: 3661 - protein, 9 aa, Severe acute respiratory syndrome-related coronavirus
  REGION 1..9: note = Table A: HLA-B*56:01H HLA-C*15:05H
  source 1..9: note = Severe acute respiratory syndrome coronavirus 2
APAHISTIG

SEQ ID NO: 3662 - protein, 9 aa, Severe acute respiratory syndrome-related coronavirus
  REGION 1..9: note = Table A: HLA-C*15:05H
  source 1..9: note = Severe acute respiratory syndrome coronavirus 2
PAHISTIGV

SEQ ID NO: 3663 - protein, 9 aa, Severe acute respiratory syndrome-related coronavirus
  REGION 1..9: note = Table A: HLA-B*38:02H HLA-B*39:06H HLA-B*39:01H HLA-B*15:10H
  source 1..9: note = Severe acute respiratory syndrome coronavirus 2
AHISTIGVC

SEQ ID NO: 3664 - protein, 9 aa, Severe acute respiratory syndrome-related coronavirus
  REGION 1..9: note = Table A: HLA-A*11:01H HLA-A*11:02H HLA-A*34:02H
  source 1..9: note = Severe acute respiratory syndrome coronavirus 2
CSMTDIAKK

SEQ ID NO: 3665 - protein, 9 aa, Severe acute respiratory syndrome-related coronavirus
  REGION 1..9: note = Table A: HLA-A*02:02H
  source 1..9: note = Severe acute respiratory syndrome coronavirus 2
SMTDIAKKP

SEQ ID NO: 3666 - protein, 9 aa, Severe acute respiratory syndrome-related coronavirus
  REGION 1..9: note = Table A: HLA-B*42:01H HLA-B*58:01H HLA-B*58:02H HLA-B*57:01M HLA-B*08:01H HLA-A*02:11H HLA-B*53:01H HLA-C*15:05M HLA-B*55:01H HLA-C*12:02H HLA-B*51:01H HLA-B*52:01M HLA-C*08:01H HLA-B*38:02M HLA-B*07:02H HLA-B*07:04M
  REGION 1..9: note = CONT. FROM ABOVE: HLA-B*15:01H HLA-B*57:03H HLA-C*02:02H HLA- B*13:02H
  source 1..9: note = Severe acute respiratory syndrome coronavirus 2
IAKKPTETI

SEQ ID NO: 3667 - protein, 9 aa, Severe acute respiratory syndrome-related coronavirus
  REGION 1..9: note = Table A: HLA-B*15:03H
  source 1..9: note = Severe acute respiratory syndrome coronavirus 2
AKKPTETIC

SEQ ID NO: 3668 - protein, 9 aa, Severe acute respiratory syndrome-related coronavirus
  REGION 1..9: note = Table A: HLA-B*56:01H HLA-B*55:02H HLA-C*15:05H HLA-B*55:01H
  source 1..9: note = Severe acute respiratory syndrome coronavirus 2
KPTETICAP

SEQ ID NO: 3669 - protein, 9 aa, Severe acute respiratory syndrome-related coronavirus
  REGION 1..9: note = Table A: HLA-A*68:02M
  source 1..9: note = Severe acute respiratory syndrome coronavirus 2
ETICAPLTV

SEQ ID NO: 3670 - protein, 9 aa, Severe acute respiratory syndrome-related coronavirus
  REGION 1..9: note = Table A: HLA-B*15:02H
  source 1..9: note = Severe acute respiratory syndrome coronavirus 2
TICAPLTVF

SEQ ID NO: 3671 - protein, 9 aa, Severe acute respiratory syndrome-related coronavirus
  REGION 1..9: note = Table A: HLA-B*27:05H HLA-B*27:02H HLA-B*14:01H HLA-B*39:01M
  source 1..9: note = Severe acute respiratory syndrome coronavirus 2
GRVDGQVDL

SEQ ID NO: 3672 - protein, 9 aa, Severe acute respiratory syndrome-related coronavirus
  REGION 1..9: note = Table A: HLA-B*58:01H HLA-A*36:01M HLA-C*04:03M HLA-C*15:05H HLA-A*02:07M HLA-C*08:02H HLA-B*38:02H HLA-B*57:03H HLA-C*05:01H HLA-B*13:01H
  source 1..9: note = Severe acute respiratory syndrome coronavirus 2
RVDGQVDLF

SEQ ID NO: 3673 - protein, 9 aa, Severe acute respiratory syndrome-related coronavirus
  REGION 1..9: note = Table A: HLA-A*02:11H HLA-A*02:05M HLA-A*02:06H HLA-A*02:08H HLA-A*02:01H HLA-A*02:03H HLA-C*08:01H HLA-B*38:02H HLA-B*39:06H HLA-B*40:06M HLA-B*13:02H HLA-B*50:01M
  source 1..9: note = Severe acute respiratory syndrome coronavirus 2
GQVDLFRNA

SEQ ID NO: 3674 - protein, 9 aa, Severe acute respiratory syndrome-related coronavirus
  REGION 1..9: note = Table A: HLA-A*74:01H HLA-A*33:03H
  source 1..9: note = Severe acute respiratory syndrome coronavirus 2
QVDLFRNAR

SEQ ID NO: 3675 - protein, 9 aa, Severe acute respiratory syndrome-related coronavirus
  REGION 1..9: note = Table A: HLA-B*14:02H
  source 1..9: note = Severe acute respiratory syndrome coronavirus 2
FRNARNGVL

SEQ ID NO: 3676 - protein, 9 aa, Severe acute respiratory syndrome-related coronavirus
  REGION 1..9: note = Table A: HLA-B*27:05H
  source 1..9: note = Severe acute respiratory syndrome coronavirus 2
ARNGVLITE

SEQ ID NO: 3677 - protein, 9 aa, Severe acute respiratory syndrome-related coronavirus
  REGION 1..9: note = Table A: HLA-B*13:02H
  source 1..9: note = Severe acute respiratory syndrome coronavirus 2
GVLITEGSV

SEQ ID NO: 3678 - protein, 9 aa, Severe acute respiratory syndrome-related coronavirus
  REGION 1..9: note = Table A: HLA-A*11:303H HLA-A*03:01H HLA-A*03:02H HLA-A*11:01H HLA-A*36:01H HLA-B*27:02H HLA-A*30:02H HLA-A*34:02H
  source 1..9: note = Severe acute respiratory syndrome coronavirus 2
VLITEGSVK

SEQ ID NO: 3679 - protein, 9 aa, Severe acute respiratory syndrome-related coronavirus
  REGION 1..9: note = Table A: HLA-A*02:05H HLA-A*02:08H
  source 1..9: note = Severe acute respiratory syndrome coronavirus 2
ITEGSVKGL

SEQ ID NO: 3680 - protein, 9 aa, Severe acute respiratory syndrome-related coronavirus
  REGION 1..9: note = Table A: HLA-B*42:01H HLA-B*08:01H HLA-A*02:11H HLA-B*55:02H HLA-A*30:01M HLA-A*30:02H HLA-A*68:02H HLA-C*15:05H HLA-B*55:01M HLA-A*02:05H HLA-A*02:06H HLA-A*02:08M HLA-A*02:01H HLA-A*02:02M HLA-A*02:03M HLA-B*38:02M
  REGION 1..9: note = CONT. FROM ABOVE: HLA-B*07:02H HLA-B*07:04M HLA-B*07:05H HLA- B*13:02M
  source 1..9: note = Severe acute respiratory syndrome coronavirus 2
SVKGLQPSV

SEQ ID NO: 3681 - protein, 9 aa, Severe acute respiratory syndrome-related coronavirus
  REGION 1..9: note = Table A: HLA-A*11:303H HLA-A*03:01M HLA-A*03:02M HLA-A*11:01H HLA-A*11:02H HLA-A*34:02H
  source 1..9: note = Severe acute respiratory syndrome coronavirus 2
GLQPSVGPK

SEQ ID NO: 3682 - protein, 9 aa, Severe acute respiratory syndrome-related coronavirus
  REGION 1..9: note = Table A: HLA-B*56:01M HLA-B*55:02M HLA-B*55:01M HLA-B*07:04H
  source 1..9: note = Severe acute respiratory syndrome coronavirus 2
QPSVGPKQA

SEQ ID NO: 3683 - protein, 9 aa, Severe acute respiratory syndrome-related coronavirus
  REGION 1..9: note = Table A: HLA-A*26:03H HLA-B*08:01H HLA-C*15:05M HLA-C*01:02H HLA-A*02:05M HLA-A*02:08M HLA-A*02:02H HLA-A*02:03H HLA-A*34:01H HLA-B*38:02H HLA-B*07:02M HLA-B*07:04M HLA-B*07:05H
  source 1..9: note = Severe acute respiratory syndrome coronavirus 2
SVGPKQASL

SEQ ID NO: 3684 - protein, 9 aa, Severe acute respiratory syndrome-related coronavirus
  REGION 1..9: note = Table A: HLA-B*35:03H HLA-C*15:05H HLA-B*38:02H
  source 1..9: note = Severe acute respiratory syndrome coronavirus 2
QASLNGVTL

SEQ ID NO: 3685 - protein, 9 aa, Severe acute respiratory syndrome-related coronavirus
  REGION 1..9: note = Table A: HLA-C*15:02H HLA-B*57:03H HLA-B*13:02H
  source 1..9: note = Severe acute respiratory syndrome coronavirus 2
ASLNGVTLI

SEQ ID NO: 3686 - protein, 9 aa, Severe acute respiratory syndrome-related coronavirus
  REGION 1..9: note = Table A: HLA-B*39:06H HLA-B*39:01H
  source 1..9: note = Severe acute respiratory syndrome coronavirus 2
NGVTLIGEA

SEQ ID NO: 3687 - protein, 9 aa, Severe acute respiratory syndrome-related coronavirus
  REGION 1..9: note = Table A: HLA-A*68:02H HLA-C*15:05H HLA-A*02:05H HLA-A*02:06H HLA-A*02:08H HLA-C*08:03H HLA-B*38:02H HLA-B*07:05H HLA-B*13:02M
  source 1..9: note = Severe acute respiratory syndrome coronavirus 2
GVTLIGEAV

SEQ ID NO: 3688 - protein, 9 aa, Severe acute respiratory syndrome-related coronavirus
  REGION 1..9: note = Table A: HLA-A*11:01H HLA-A*34:02H
  source 1..9: note = Severe acute respiratory syndrome coronavirus 2
VTLIGEAVK

SEQ ID NO: 3689 - protein, 9 aa, Severe acute respiratory syndrome-related coronavirus
  REGION 1..9: note = Table A: HLA-C*15:05H
  source 1..9: note = Severe acute respiratory syndrome coronavirus 2
IGEAVKTQF

SEQ ID NO: 3690 - protein, 9 aa, Severe acute respiratory syndrome-related coronavirus
  REGION 1..9: note = Table A: HLA-B*58:01M HLA-B*57:01H HLA-A*26:01H HLA-A*26:02H HLA-B*53:01M HLA-A*68:01H HLA-A*34:01H HLA-A*34:02M HLA-B*35:01H HLA-B*35:07M HLA-B*38:02H HLA-B*15:02H HLA-B*57:03H
  source 1..9: note = Severe acute respiratory syndrome coronavirus 2
EAVKTQFNY

SEQ ID NO: 3691 - protein, 9 aa, Severe acute respiratory syndrome-related coronavirus
  REGION 1..9: note = Table A: HLA-A*03:01H HLA-B*46:01M HLA-A*26:01H HLA-A*29:02H HLA-A*30:01M HLA-A*30:02H HLA-C*12:02M HLA-B*38:02M HLA-B*15:01M HLA-B*15:02H HLA-A*31:01H HLA-C*02:02H
  source 1..9: note = Severe acute respiratory syndrome coronavirus 2
AVKTQFNYY

SEQ ID NO: 3692 - protein, 9 aa, Severe acute respiratory syndrome-related coronavirus
  REGION 1..9: note = Table A: HLA-A*11:303H HLA-A*74:01H HLA-A*03:02H HLA-A*11:01M HLA-A*11:02M HLA-A*36:01H HLA-A*30:02H HLA-C*07:27H
  source 1..9: note = Severe acute respiratory syndrome coronavirus 2
KTQFNYYKK

SEQ ID NO: 3693 - protein, 9 aa, Severe acute respiratory syndrome-related coronavirus
  REGION 1..9: note = Table A: HLA-C*06:02H HLA-A*02:11H HLA-A*68:02H HLA-A*02:05M HLA-A*02:06H HLA-A*02:02H HLA-A*02:03H HLA-B*52:01M HLA-B*38:02H HLA-B*13:02M
  source 1..9: note = Severe acute respiratory syndrome coronavirus 2
TQFNYYKKV

SEQ ID NO: 3694 - protein, 9 aa, Severe acute respiratory syndrome-related coronavirus
  REGION 1..9: note = Table A: HLA-A*02:11H
  source 1..9: note = Severe acute respiratory syndrome coronavirus 2
NYYKKVDGV

SEQ ID NO: 3695 - protein, 9 aa, Severe acute respiratory syndrome-related coronavirus
  REGION 1..9: note = Table A: HLA-B*58:01M HLA-A*11:303H HLA-A*36:01H HLA-C*04:03H HLA-A*02:11M HLA-A*68:02H HLA-C*15:05M HLA-C*15:02H HLA-A*02:04H HLA-A*02:05M HLA-A*02:06M HLA-A*02:07H HLA-A*02:08M HLA-B*14:01H HLA-A*02:01H
  REGION 1..9: note = CONT. FROM ABOVE: HLA-A*02:02M HLA-C*08:01M HLA-C*08:02M HLA- B*38:01H HLA-B*38:02M HLA-B*40:01H HLA-B*07:05H HLA-B*57:03M HLA-C*05:01M HLA-B*13:01M HLA-B*13:02H
  source 1..9: note = Severe acute respiratory syndrome coronavirus 2
KVDGVVQQL

SEQ ID NO: 3696 - protein, 9 aa, Severe acute respiratory syndrome-related coronavirus
  REGION 1..9: note = Table A: HLA-A*02:06H
  source 1..9: note = Severe acute respiratory syndrome coronavirus 2
GVVQQLPET

SEQ ID NO: 3697 - protein, 9 aa, Severe acute respiratory syndrome-related coronavirus
  REGION 1..9: note = Table A: HLA-B*58:01H HLA-A*03:02H HLA-A*29:01M HLA-A*29:02H HLA-A*30:02H HLA-B*35:01M HLA-B*38:02H HLA-B*15:01H HLA-B*15:02H HLA-B*39:01H HLA-B*07:05M
  source 1..9: note = Severe acute respiratory syndrome coronavirus 2
VVQQLPETY

SEQ ID NO: 3698 - protein, 9 aa, Severe acute respiratory syndrome-related coronavirus
  REGION 1..9: note = Table A: HLA-B*38:02H HLA-B*15:01M
  source 1..9: note = Severe acute respiratory syndrome coronavirus 2
VQQLPETYF

SEQ ID NO: 3699 - protein, 9 aa, Severe acute respiratory syndrome-related coronavirus
  REGION 1..9: note = Table A: HLA-C*14:02M HLA-C*14:03M HLA-C*06:02H HLA-A*24:02M HLA-A*24:07M HLA-A*23:01H
  source 1..9: note = Severe acute respiratory syndrome coronavirus 2
TYFTQSRNL

SEQ ID NO: 3700 - protein, 9 aa, Severe acute respiratory syndrome-related coronavirus
  REGION 1..9: note = Table A: HLA-B*44:05H HLA-A*24:02H HLA-B*38:01H HLA-B*38:02M HLA-B*15:01H HLA-B*15:02M HLA-B*15:03M HLA-B*39:01H HLA-B*57:03H HLA-B*13:01M
  source 1..9: note = Severe acute respiratory syndrome coronavirus 2
TQSRNLQEF

SEQ ID NO: 3701 - protein, 9 aa, Severe acute respiratory syndrome-related coronavirus
  REGION 1..9: note = Table A: HLA-A*74:01H HLA-A*31:01H
  source 1..9: note = Severe acute respiratory syndrome coronavirus 2
RNLQEFKPR

SEQ ID NO: 3702 - protein, 9 aa, Severe acute respiratory syndrome-related coronavirus
  REGION 1..9: note = Table A: HLA-B*44:05H HLA-B*40:02H HLA-B*41:02H HLA-B*49:01H
  source 1..9: note = Severe acute respiratory syndrome coronavirus 2
QEFKPRSQM

SEQ ID NO: 3703 - protein, 9 aa, Severe acute respiratory syndrome-related coronavirus
  REGION 1..9: note = Table A: HLA-B*45:01M HLA-A*68:02H HLA-B*40:06M HLA-B*49:01H HLA-B*50:01H
  source 1..9: note = Severe acute respiratory syndrome coronavirus 2
MEIDFLELA

SEQ ID NO: 3704 - protein, 9 aa, Severe acute respiratory syndrome-related coronavirus
  REGION 1..9: note = Table A: HLA-B*49:01H
  source 1..9: note = Severe acute respiratory syndrome coronavirus 2
LELAMDEFI

SEQ ID NO: 3705 - protein, 9 aa, Severe acute respiratory syndrome-related coronavirus
  REGION 1..9: note = Table A: HLA-A*33:01H HLA-A*33:03H HLA-A*68:01H HLA-A*34:01H HLA-A*34:02M HLA-A*66:01M
  source 1..9: note = Severe acute respiratory syndrome coronavirus 2
LAMDEFIER

SEQ ID NO: 3706 - protein, 9 aa, Severe acute respiratory syndrome-related coronavirus
  REGION 1..9: note = Table A: HLA-B*58:01H HLA-A*11:303H HLA-A*36:01H HLA-A*29:01H HLA-A*29:02H HLA-A*01:01H HLA-B*44:03H HLA-C*04:01H HLA-C*04:03M HLA-A*02:11H HLA-A*30:02M HLA-C*15:05H HLA-A*02:07H HLA-A*02:01H HLA-A*02:02H
  REGION 1..9: note = CONT. FROM ABOVE: HLA-B*35:01H HLA-B*35:08H HLA-B*38:02M HLA- B*15:01M HLA-B*15:02H HLA-B*15:03M HLA-B*39:01H HLA-B*07:05M HLA-B*13:01H
  source 1..9: note = Severe acute respiratory syndrome coronavirus 2
AMDEFIERY

SEQ ID NO: 3707 - protein, 9 aa, Severe acute respiratory syndrome-related coronavirus
  REGION 1..9: note = Table A: HLA-B*18:01H HLA-B*14:02H HLA-B*07:05H
  source 1..9: note = Severe acute respiratory syndrome coronavirus 2
DEFIERYKL

SEQ ID NO: 3708 - protein, 9 aa, Severe acute respiratory syndrome-related coronavirus
  REGION 1..9: note = Table A: HLA-B*18:01H
  source 1..9: note = Severe acute respiratory syndrome coronavirus 2
IERYKLEGY

SEQ ID NO: 3709 - protein, 9 aa, Severe acute respiratory syndrome-related coronavirus
  REGION 1..9: note = Table A: HLA-A*24:02H HLA-A*24:07M HLA-A*23:01H
  source 1..9: note = Severe acute respiratory syndrome coronavirus 2
RYKLEGYAF

SEQ ID NO: 3710 - protein, 9 aa, Severe acute respiratory syndrome-related coronavirus
  REGION 1..9: note = Table A: HLA-B*49:01M
  source 1..9: note = Severe acute respiratory syndrome coronavirus 2
LEGYAFEHI

SEQ ID NO: 3711 - protein, 9 aa, Severe acute respiratory syndrome-related coronavirus
  REGION 1..9: note = Table A: HLA-A*68:02M HLA-B*51:01H HLA-B*52:01H
  source 1..9: note = Severe acute respiratory syndrome coronavirus 2
EGYAFEHIV

SEQ ID NO: 3712 - protein, 9 aa, Severe acute respiratory syndrome-related coronavirus
  REGION 1..9: note = Table A: HLA-C*14:02H HLA-C*14:03H HLA-A*29:02H HLA-B*15:03H
  source 1..9: note = Severe acute respiratory syndrome coronavirus 2
GYAFEHIVY

SEQ ID NO: 3713 - protein, 9 aa, Severe acute respiratory syndrome-related coronavirus
  REGION 1..9: note = Table A: HLA-A*68:02H HLA-C*12:03H
  source 1..9: note = Severe acute respiratory syndrome coronavirus 2
YAFEHIVYG

SEQ ID NO: 3714 - protein, 9 aa, Severe acute respiratory syndrome-related coronavirus
  REGION 1..9: note = Table A: HLA-B*38:02H HLA-B*39:01H
  source 1..9: note = Severe acute respiratory syndrome coronavirus 2
EHIVYGDFS

SEQ ID NO: 3715 - protein, 9 aa, Severe acute respiratory syndrome-related coronavirus
  REGION 1..9: note = Table A: HLA-A*11:303H HLA-C*04:03H HLA-C*03:03H HLA-C*03:04M HLA-C*15:05H HLA-A*02:07H HLA-C*17:01H HLA-C*08:01M HLA-C*08:02H HLA-B*38:02M HLA-B*39:01H HLA-C*05:01M
  source 1..9: note = Severe acute respiratory syndrome coronavirus 2
YGDFSHSQL

SEQ ID NO: 3716 - protein, 9 aa, Severe acute respiratory syndrome-related coronavirus
  REGION 1..9: note = Table A: HLA-C*15:05H HLA-C*15:02H
  source 1..9: note = Severe acute respiratory syndrome coronavirus 2
HSQLGGLHL

SEQ ID NO: 3717 - protein, 9 aa, Severe acute respiratory syndrome-related coronavirus
  REGION 1..9: note = Table A: HLA-A*02:04M HLA-A*02:05H HLA-A*02:06H HLA-A*02:02H HLA-C*08:01H HLA-B*38:02H HLA-B*13:01H HLA-B*13:02H
  source 1..9: note = Severe acute respiratory syndrome coronavirus 2
SQLGGLHLL

SEQ ID NO: 3718 - protein, 9 aa, Severe acute respiratory syndrome-related coronavirus
  REGION 1..9: note = Table A: HLA-B*38:02H HLA-B*13:02H
  source 1..9: note = Severe acute respiratory syndrome coronavirus 2
QLGGLHLLI

SEQ ID NO: 3719 - protein, 9 aa, Severe acute respiratory syndrome-related coronavirus
  REGION 1..9: note = Table A: HLA-A*02:04H
  source 1..9: note = Severe acute respiratory syndrome coronavirus 2
GGLHLLIGL

SEQ ID NO: 3720 - protein, 9 aa, Severe acute respiratory syndrome-related coronavirus
  REGION 1..9: note = Table A: HLA-A*74:01M HLA-A*34:01H
  source 1..9: note = Severe acute respiratory syndrome coronavirus 2
HLLIGLAKR

SEQ ID NO: 3721 - protein, 9 aa, Severe acute respiratory syndrome-related coronavirus
  REGION 1..9: note = Table A: HLA-B*15:03M
  source 1..9: note = Severe acute respiratory syndrome coronavirus 2
AKRFKESPF

SEQ ID NO: 3722 - protein, 9 aa, Severe acute respiratory syndrome-related coronavirus
  REGION 1..9: note = Table A: HLA-C*14:02H HLA-C*14:03H HLA-C*07:01H HLA-A*30:01H HLA-A*24:02H HLA-A*24:07M HLA-A*23:01H HLA-B*07:04H
  source 1..9: note = Severe acute respiratory syndrome coronavirus 2
RFKESPFEL

SEQ ID NO: 3723 - protein, 9 aa, Severe acute respiratory syndrome-related coronavirus
  REGION 1..9: note = Table A: HLA-B*37:01M
  source 1..9: note = Severe acute respiratory syndrome coronavirus 2
MDSTVKNYF

SEQ ID NO: 3724 - protein, 9 aa, Severe acute respiratory syndrome-related coronavirus
  REGION 1..9: note = Table A: HLA-C*14:03H
  source 1..9: note = Severe acute respiratory syndrome coronavirus 2
YFITDAQTG

SEQ ID NO: 3725 - protein, 9 aa, Severe acute respiratory syndrome-related coronavirus
  REGION 1..9: note = Table A: HLA-B*13:02M
  source 1..9: note = Severe acute respiratory syndrome coronavirus 2
AQTGSSKCV

SEQ ID NO: 3726 - protein, 9 aa, Severe acute respiratory syndrome-related coronavirus
  REGION 1..9: note = Table A: HLA-C*04:03M HLA-A*02:07H
  source 1..9: note = Severe acute respiratory syndrome coronavirus 2
VIDLLLDDF

SEQ ID NO: 3727 - protein, 9 aa, Severe acute respiratory syndrome-related coronavirus
  REGION 1..9: note = Table A: HLA-A*11:303H HLA-A*02:11H HLA-A*02:04M HLA-A*02:06H HLA-A*02:07H HLA-A*02:01M HLA-C*08:01H HLA-B*38:02H HLA-B*13:01H
  source 1..9: note = Severe acute respiratory syndrome coronavirus 2
LLLDDFVEI

SEQ ID NO: 3728 - protein, 9 aa, Severe acute respiratory syndrome-related coronavirus
  REGION 1..9: note = Table A: HLA-A*02:11H HLA-A*02:04H HLA-A*02:07M HLA-B*38:02H
  source 1..9: note = Severe acute respiratory syndrome coronavirus 2
LLDDFVEII

SEQ ID NO: 3729 - protein, 9 aa, Severe acute respiratory syndrome-related coronavirus
  REGION 1..9: note = Table A: HLA-B*44:02H HLA-B*44:05M HLA-B*44:03H HLA-B*40:01M HLA-B*40:02M HLA-B*41:02H HLA-B*49:01M
  source 1..9: note = Severe acute respiratory syndrome coronavirus 2
VEIIKSQDL

SEQ ID NO: 3730 - protein, 9 aa, Severe acute respiratory syndrome-related coronavirus
  REGION 1..9: note = Table A: HLA-C*15:05H HLA-A*02:03H HLA-B*38:02H HLA-B*13:02M
  source 1..9: note = Severe acute respiratory syndrome coronavirus 2
IIKSQDLSV

SEQ ID NO: 3731 - protein, 9 aa, Severe acute respiratory syndrome-related coronavirus
  REGION 1..9: note = Table A: HLA-A*11:303H HLA-A*03:02M HLA-A*11:01M HLA-A*11:02M HLA-B*27:02H HLA-A*34:02H HLA-C*07:27H HLA-B*38:02H HLA-B*39:01H HLA-B*13:02H
  source 1..9: note = Severe acute respiratory syndrome coronavirus 2
SQDLSVVSK

SEQ ID NO: 3732 - protein, 9 aa, Severe acute respiratory syndrome-related coronavirus
  REGION 1..9: note = Table A: HLA-B*37:01H HLA-B*40:02H HLA-B*49:01H
  source 1..9: note = Severe acute respiratory syndrome coronavirus 2
QDLSVVSKV

SEQ ID NO: 3733 - protein, 9 aa, Severe acute respiratory syndrome-related coronavirus
  REGION 1..9: note = Table A: HLA-A*68:02H HLA-B*38:02H
  source 1..9: note = Severe acute respiratory syndrome coronavirus 2
DLSVVSKVV

SEQ ID NO: 3734 - protein, 9 aa, Severe acute respiratory syndrome-related coronavirus
  REGION 1..9: note = Table A: HLA-A*11:303H HLA-A*03:01H HLA-A*11:01H HLA-A*11:02H HLA-A*26:01H HLA-A*26:02H HLA-A*02:11M HLA-A*68:01H HLA-A*68:02H HLA-C*15:05H HLA-C*12:03H HLA-C*15:02M HLA-A*02:04M HLA-A*02:05H HLA-A*02:06H
  REGION 1..9: note = CONT. FROM ABOVE: HLA-A*02:07M HLA-A*02:08H HLA-A*02:01M HLA- A*02:02M HLA-A*02:03H HLA-C*17:01H HLA-C*08:01H HLA-B*38:02M HLA-B*40:06M HLA-B*13:02M HLA-C*07:04H
  source 1..9: note = Severe acute respiratory syndrome coronavirus 2
SVVSKVVKV

SEQ ID NO: 3735 - protein, 9 aa, Severe acute respiratory syndrome-related coronavirus
  REGION 1..9: note = Table A: HLA-A*02:08M HLA-B*07:04H
  source 1..9: note = Severe acute respiratory syndrome coronavirus 2
VVSKVVKVT

SEQ ID NO: 3736 - protein, 9 aa, Severe acute respiratory syndrome-related coronavirus
  REGION 1..9: note = Table A: HLA-B*58:02H HLA-B*57:01M HLA-B*52:01M HLA-B*57:03M
  source 1..9: note = Severe acute respiratory syndrome coronavirus 2
VSKVVKVTI

SEQ ID NO: 3737 - protein, 9 aa, Severe acute respiratory syndrome-related coronavirus
  REGION 1..9: note = Table A: HLA-B*58:01M HLA-A*36:01H HLA-A*29:02H HLA-A*30:02H HLA-B*38:02H HLA-B*15:01M HLA-B*15:03H HLA-B*57:03H
  source 1..9: note = Severe acute respiratory syndrome coronavirus 2
KVVKVTIDY

SEQ ID NO: 3738 - protein, 9 aa, Severe acute respiratory syndrome-related coronavirus
  REGION 1..9: note = Table A: HLA-A*02:05H
  source 1..9: note = Severe acute respiratory syndrome coronavirus 2
VVKVTIDYT

SEQ ID NO: 3739 - protein, 9 aa, Severe acute respiratory syndrome-related coronavirus
  REGION 1..9: note = Table A: HLA-A*02:08H HLA-B*57:03H
  source 1..9: note = Severe acute respiratory syndrome coronavirus 2
KVTIDYTEI

SEQ ID NO: 3740 - protein, 9 aa, Severe acute respiratory syndrome-related coronavirus
  REGION 1..9: note = Table A: HLA-C*04:01H HLA-C*04:03M HLA-A*02:07M HLA-B*35:02H HLA-B*35:08M HLA-C*08:01H HLA-C*08:02M HLA-B*35:12H HLA-B*38:01H HLA-B*38:02M HLA-B*15:02H HLA-B*39:01H HLA-C*05:01M HLA-B*13:01H
  source 1..9: note = Severe acute respiratory syndrome coronavirus 2
TIDYTEISF

SEQ ID NO: 3741 - protein, 9 aa, Severe acute respiratory syndrome-related coronavirus
  REGION 1..9: note = Table A: HLA-B*58:01M HLA-A*36:01H HLA-B*57:03H
  source 1..9: note = Severe acute respiratory syndrome coronavirus 2
YTEISFMLW

SEQ ID NO: 3742 - protein, 9 aa, Severe acute respiratory syndrome-related coronavirus
  REGION 1..9: note = Table A: HLA-B*50:01H
  source 1..9: note = Severe acute respiratory syndrome coronavirus 2
TEISFMLWC

SEQ ID NO: 3743 - protein, 9 aa, Severe acute respiratory syndrome-related coronavirus
  REGION 1..9: note = Table A: HLA-A*34:02H
  source 1..9: note = Severe acute respiratory syndrome coronavirus 2
EISFMLWCK

SEQ ID NO: 3744 - protein, 9 aa, Severe acute respiratory syndrome-related coronavirus
  REGION 1..9: note = Table A: HLA-B*38:02H HLA-B*15:03M
  source 1..9: note = Severe acute respiratory syndrome coronavirus 2
CKDGHVETF

SEQ ID NO: 3745 - protein, 9 aa, Severe acute respiratory syndrome-related coronavirus
  REGION 1..9: note = Table A: HLA-A*36:01H
  source 1..9: note = Severe acute respiratory syndrome coronavirus 2
KDGHVETFY

SEQ ID NO: 3746 - protein, 9 aa, Severe acute respiratory syndrome-related coronavirus
  REGION 1..9: note = Table A: HLA-A*11:01H HLA-A*11:02H
  source 1..9: note = Severe acute respiratory syndrome coronavirus 2
GHVETFYPK

SEQ ID NO: 3747 - protein, 9 aa, Severe acute respiratory syndrome-related coronavirus
  REGION 1..9: note = Table A: HLA-C*04:03H HLA-A*02:11H HLA-B*53:01H HLA-A*68:02H HLA-B*35:03H HLA-A*02:04H HLA-A*02:05H HLA-A*02:06H HLA-A*02:07M HLA-A*02:02H HLA-B*35:02H HLA-C*08:01H HLA-B*35:12H HLA-B*38:02H HLA-B*40:06H HLA-B*13:01H
  source 1..9: note = Severe acute respiratory syndrome coronavirus 2
HVETFYPKL

SEQ ID NO: 3748 - protein, 9 aa, Severe acute respiratory syndrome-related coronavirus
  REGION 1..9: note = Table A: HLA-A*34:02H
  source 1..9: note = Severe acute respiratory syndrome coronavirus 2
ETFYPKLQS

SEQ ID NO: 3749 - protein, 9 aa, Severe acute respiratory syndrome-related coronavirus
  REGION 1..9: note = Table A: HLA-B*56:01M HLA-B*55:02M HLA-B*55:01H HLA-B*54:01H
  source 1..9: note = Severe acute respiratory syndrome coronavirus 2
YPKLQSSQA

SEQ ID NO: 3750 - protein, 9 aa, Severe acute respiratory syndrome-related coronavirus
  REGION 1..9: note = Table A: HLA-A*02:04H
  source 1..9: note = Severe acute respiratory syndrome coronavirus 2
SSQAWQPGV

SEQ ID NO: 3751 - protein, 9 aa, Severe acute respiratory syndrome-related coronavirus
  REGION 1..9: note = Table A: HLA-B*39:06H HLA-B*39:01H
  source 1..9: note = Severe acute respiratory syndrome coronavirus 2
SQAWQPGVA

SEQ ID NO: 3752 - protein, 9 aa, Severe acute respiratory syndrome-related coronavirus
  REGION 1..9: note = Table A: HLA-A*11:303M HLA-B*46:01H HLA-C*03:03H HLA-C*03:02M HLA-C*03:04M HLA-B*35:03M HLA-C*15:05M HLA-C*12:02H HLA-A*34:01H HLA-C*07:27H HLA-B*35:01H HLA-B*35:02M HLA-B*35:08M HLA-B*51:01H HLA-B*35:07H
  REGION 1..9: note = CONT. FROM ABOVE: HLA-C*08:01M HLA-B*35:12H HLA-B*38:02M HLA- B*54:01H HLA-B*07:02H HLA-B*07:04H HLA-B*15:01H HLA-B*15:02H HLA-B*15:03H HLA-B*07:05M HLA-B*15:11H
  source 1..9: note = Severe acute respiratory syndrome coronavirus 2
QAWQPGVAM

SEQ ID NO: 3753 - protein, 9 aa, Severe acute respiratory syndrome-related coronavirus
  REGION 1..9: note = Table A: HLA-C*15:05H
  source 1..9: note = Severe acute respiratory syndrome coronavirus 2
QPGVAMPNL

SEQ ID NO: 3754 - protein, 9 aa, Severe acute respiratory syndrome-related coronavirus
  REGION 1..9: note = Table A: HLA-A*03:01M HLA-A*03:02H HLA-A*11:01M HLA-A*11:02M HLA-A*36:01H HLA-A*34:02M HLA-C*07:27H
  source 1..9: note = Severe acute respiratory syndrome coronavirus 2
GVAMPNLYK

SEQ ID NO: 3755 - protein, 9 aa, Severe acute respiratory syndrome-related coronavirus
  REGION 1..9: note = Table A: HLA-B*58:01H HLA-B*58:02H HLA-A*11:303M HLA-C*16:01H HLA-B*46:01H HLA-C*03:03H HLA-C*12:05H HLA-A*02:11H HLA-C*03:02M HLA-C*03:04M HLA-B*35:03H HLA-C*15:05H HLA-C*12:02H HLA-C*12:03H HLA-A*02:04H
  REGION 1..9: note = CONT. FROM ABOVE: HLA-A*02:02H HLA-B*35:01H HLA-C*17:01H HLA- B*35:07H HLA-C*08:01H HLA-B*38:02H HLA-B*07:05H HLA-B*57:03M HLA-C*02:02M HLA-C*07:04H
  source 1..9: note = Severe acute respiratory syndrome coronavirus 2
VAMPNLYKM

SEQ ID NO: 3756 - protein, 9 aa, Severe acute respiratory syndrome-related coronavirus
  REGION 1..9: note = Table A: HLA-A*33:03H HLA-A*34:01H HLA-A*66:01H
  source 1..9: note = Severe acute respiratory syndrome coronavirus 2
MPNLYKMQR

SEQ ID NO: 3757 - protein, 9 aa, Severe acute respiratory syndrome-related coronavirus
  REGION 1..9: note = Table A: HLA-A*24:07H
  source 1..9: note = Severe acute respiratory syndrome coronavirus 2
LYKMQRMLL

SEQ ID NO: 3758 - protein, 9 aa, Severe acute respiratory syndrome-related coronavirus
  REGION 1..9: note = Table A: HLA-B*38:02H
  source 1..9: note = Severe acute respiratory syndrome coronavirus 2
MQRMLLEKC

SEQ ID NO: 3759 - protein, 9 aa, Severe acute respiratory syndrome-related coronavirus
  REGION 1..9: note = Table A: HLA-B*18:01H
  source 1..9: note = Severe acute respiratory syndrome coronavirus 2
LEKCDLQNY

SEQ ID NO: 3760 - protein, 9 aa, Severe acute respiratory syndrome-related coronavirus
  REGION 1..9: note = Table A: HLA-B*39:01H
  source 1..9: note = Severe acute respiratory syndrome coronavirus 2
DLQNYGDSA

SEQ ID NO: 3761 - protein, 9 aa, Severe acute respiratory syndrome-related coronavirus
  REGION 1..9: note = Table A: HLA-B*35:03H HLA-C*15:05H HLA-B*38:02H HLA-B*39:01H
  source 1..9: note = Severe acute respiratory syndrome coronavirus 2
QNYGDSATL

SEQ ID NO: 3762 - protein, 9 aa, Severe acute respiratory syndrome-related coronavirus
  REGION 1..9: note = Table A: HLA-A*03:02H HLA-A*11:01H HLA-A*11:02H HLA-A*36:01H HLA-A*34:02M
  source 1..9: note = Severe acute respiratory syndrome coronavirus 2
YGDSATLPK

SEQ ID NO: 3763 - protein, 9 aa, Severe acute respiratory syndrome-related coronavirus
  REGION 1..9: note = Table A: HLA-A*68:02H
  source 1..9: note = Severe acute respiratory syndrome coronavirus 2
DSATLPKGI

SEQ ID NO: 3764 - protein, 9 aa, Severe acute respiratory syndrome-related coronavirus
  REGION 1..9: note = Table A: HLA-B*35:02H HLA-B*35:12H
  source 1..9: note = Severe acute respiratory syndrome coronavirus 2
SATLPKGIM

SEQ ID NO: 3765 - protein, 9 aa, Severe acute respiratory syndrome-related coronavirus
  REGION 1..9: note = Table A: HLA-A*11:303H HLA-C*15:05H HLA-C*15:02H HLA-B*57:03M HLA-C*07:04H
  source 1..9: note = Severe acute respiratory syndrome coronavirus 2
ATLPKGIMM

SEQ ID NO: 3766 - protein, 9 aa, Severe acute respiratory syndrome-related coronavirus
  REGION 1..9: note = Table A: HLA-B*42:01H HLA-B*56:01M HLA-B*08:01H HLA-B*55:02M HLA-A*68:02H HLA-C*15:05H HLA-B*55:01M HLA-B*51:01M HLA-B*38:02H HLA-B*54:01M HLA-B*07:02H HLA-B*07:04M
  source 1..9: note = Severe acute respiratory syndrome coronavirus 2
LPKGIMMNV

SEQ ID NO: 3767 - protein, 9 aa, Severe acute respiratory syndrome-related coronavirus
  REGION 1..9: note = Table A: HLA-A*29:02H HLA-A*30:02H HLA-B*38:02H HLA-B*15:01M HLA-B*15:02H HLA-B*07:05H
  source 1..9: note = Severe acute respiratory syndrome coronavirus 2
GIMMNVAKY

SEQ ID NO: 3768 - protein, 9 aa, Severe acute respiratory syndrome-related coronavirus
  REGION 1..9: note = Table A: HLA-A*02:11H
  source 1..9: note = Severe acute respiratory syndrome coronavirus 2
IMMNVAKYT

SEQ ID NO: 3769 - protein, 9 aa, Severe acute respiratory syndrome-related coronavirus
  REGION 1..9: note = Table A: HLA-B*15:03H
  source 1..9: note = Severe acute respiratory syndrome coronavirus 2
AKYTQLCQY

SEQ ID NO: 3770 - protein, 9 aa, Severe acute respiratory syndrome-related coronavirus
  REGION 1..9: note = Table A: HLA-A*24:02H HLA-A*24:07H HLA-A*23:01H
  source 1..9: note = Severe acute respiratory syndrome coronavirus 2
KYTQLCQYL

SEQ ID NO: 3771 - protein, 9 aa, Severe acute respiratory syndrome-related coronavirus
  REGION 1..9: note = Table A: HLA-A*02:04H HLA-A*02:02H HLA-B*38:02H
  source 1..9: note = Severe acute respiratory syndrome coronavirus 2
QLCQYLNTL

SEQ ID NO: 3772 - protein, 9 aa, Severe acute respiratory syndrome-related coronavirus
  REGION 1..9: note = Table A: HLA-B*48:01H HLA-C*15:05H HLA-B*52:01M HLA-B*38:02H HLA-B*15:01H HLA-B*15:03H HLA-B*13:02M HLA-B*15:10H
  source 1..9: note = Severe acute respiratory syndrome coronavirus 2
CQYLNTLTL

SEQ ID NO: 3773 - protein, 9 aa, Severe acute respiratory syndrome-related coronavirus
  REGION 1..9: note = Table A: HLA-A*02:11H HLA-A*02:04H HLA-A*02:03H HLA-B*38:02H HLA-B*13:02H
  source 1..9: note = Severe acute respiratory syndrome coronavirus 2
YLNTLTLAV

SEQ ID NO: 3774 - protein, 9 aa, Severe acute respiratory syndrome-related coronavirus
  REGION 1..9: note = Table A: HLA-A*29:01H HLA-A*29:02H HLA-B*35:01H HLA-B*07:05H
  source 1..9: note = Severe acute respiratory syndrome coronavirus 2
NTLTLAVPY

SEQ ID NO: 3775 - protein, 9 aa, Severe acute respiratory syndrome-related coronavirus
  REGION 1..9: note = Table A: HLA-A*02:11H HLA-B*57:03H
  source 1..9: note = Severe acute respiratory syndrome coronavirus 2
LTLAVPYNM

SEQ ID NO: 3776 - protein, 9 aa, Severe acute respiratory syndrome-related coronavirus
  REGION 1..9: note = Table A: HLA-A*74:01H HLA-A*33:03H HLA-A*68:01H HLA-A*34:01M HLA-A*66:01H
  source 1..9: note = Severe acute respiratory syndrome coronavirus 2
TLAVPYNMR

SEQ ID NO: 3777 - protein, 9 aa, Severe acute respiratory syndrome-related coronavirus
  REGION 1..9: note = Table A: HLA-C*14:03H HLA-A*24:02M HLA-A*24:07H HLA-A*23:01M
  source 1..9: note = Severe acute respiratory syndrome coronavirus 2
PYNMRVIHF

SEQ ID NO: 3778 - protein, 9 aa, Severe acute respiratory syndrome-related coronavirus
  REGION 1..9: note = Table A: HLA-B*41:02H
  source 1..9: note = Severe acute respiratory syndrome coronavirus 2
SDKGVAPGT

SEQ ID NO: 3779 - protein, 9 aa, Severe acute respiratory syndrome-related coronavirus
  REGION 1..9: note = Table A: HLA-A*11:303H HLA-C*15:05H HLA-B*49:01H
  source 1..9: note = Severe acute respiratory syndrome coronavirus 2
KGVAPGTAV

SEQ ID NO: 3780 - protein, 9 aa, Severe acute respiratory syndrome-related coronavirus
  REGION 1..9: note = Table A: HLA-B*48:01M HLA-A*11:303H HLA-A*26:03H HLA-C*03:04H HLA-A*68:02H HLA-B*35:03H HLA-C*15:05M HLA-C*01:02H HLA-A*02:05H HLA-A*02:06H HLA-A*02:08H HLA-B*14:01H HLA-A*02:02M HLA-A*02:03M HLA-A*34:01H
  REGION 1..9: note = CONT. FROM ABOVE: HLA-B*35:02H HLA-C*17:01H HLA-C*08:03H HLA- B*35:12H HLA-B*38:02M HLA-B*40:01H HLA-B*40:02H HLA-B*07:02M HLA-B*15:01M HLA-B*15:02M HLA-B*39:01M HLA-B*07:05M HLA-B*15 :10H HLA-C*07:04H
  source 1..9: note = Severe acute respiratory syndrome coronavirus 2
GVAPGTAVL

SEQ ID NO: 3781 - protein, 9 aa, Severe acute respiratory syndrome-related coronavirus
  REGION 1..9: note = Table A: HLA-A*74:01H HLA-A*68:01M HLA-A*34:01H
  source 1..9: note = Severe acute respiratory syndrome coronavirus 2
VAPGTAVLR

SEQ ID NO: 3782 - protein, 9 aa, Severe acute respiratory syndrome-related coronavirus
  REGION 1..9: note = Table A: HLA-B*48:01M HLA-B*52:01H HLA-B*15:01H HLA-B*15:03M HLA-B*13:01M HLA-B*13:02H
  source 1..9: note = Severe acute respiratory syndrome coronavirus 2
RQWLPTGTL

SEQ ID NO: 3783 - protein, 9 aa, Severe acute respiratory syndrome-related coronavirus
  REGION 1..9: note = Table A: HLA-A*24:02H HLA-A*24:07H HLA-A*23:01H
  source 1..9: note = Severe acute respiratory syndrome coronavirus 2
QWLPTGTLL

SEQ ID NO: 3784 - protein, 9 aa, Severe acute respiratory syndrome-related coronavirus
  REGION 1..9: note = Table A: HLA-B*13:02H
  source 1..9: note = Severe acute respiratory syndrome coronavirus 2
WLPTGTLLV

SEQ ID NO: 3785 - protein, 9 aa, Severe acute respiratory syndrome-related coronavirus
  REGION 1..9: note = Table A: HLA-C*04:03H
  source 1..9: note = Severe acute respiratory syndrome coronavirus 2
LVDSDLNDF

SEQ ID NO: 3786 - protein, 9 aa, Severe acute respiratory syndrome-related coronavirus
  REGION 1..9: note = Table A: HLA-B*38:02H
  source 1..9: note = Severe acute respiratory syndrome coronavirus 2
DLNDFVSDA

SEQ ID NO: 3787 - protein, 9 aa, Severe acute respiratory syndrome-related coronavirus
  REGION 1..9: note = Table A: HLA-A*11:303H HLA-A*26:03H HLA-C*03:03H HLA-C*03:04M HLA-A*68:02H HLA-B*35:03H HLA-C*15:05H HLA-C*01:02H HLA-A*02:05H HLA-A*02:06H HLA-A*02:08H HLA-A*02:02M HLA-A*02:03H HLA-A*34:01H HLA-B*35:01H
  REGION 1..9: note = CONT. FROM ABOVE: HLA-B*35:02H HLA-B*35:08H HLA-C*08:01M HLA- C*08:02H HLA-B*35:12H HLA-B*38:01H HLA-B*38:02H HLA-B*15:02H HLA-B*39:01H HLA-C*07:04H
  source 1..9: note = Severe acute respiratory syndrome coronavirus 2
FVSDADSTL

SEQ ID NO: 3788 - protein, 9 aa, Severe acute respiratory syndrome-related coronavirus
  REGION 1..9: note = Table A: HLA-C*05:01H
  source 1..9: note = Severe acute respiratory syndrome coronavirus 2
VSDADSTLI

SEQ ID NO: 3789 - protein, 9 aa, Severe acute respiratory syndrome-related coronavirus
  REGION 1..9: note = Table A: HLA-A*02:11H HLA-A*02:05H HLA-A*02:06H HLA-A*02:01M HLA-A*02:02H HLA-A*02:03M HLA-B*38:02M HLA-B*13:02H
  source 1..9: note = Severe acute respiratory syndrome coronavirus 2
TLIGDCATV

SEQ ID NO: 3790 - protein, 9 aa, Severe acute respiratory syndrome-related coronavirus
  REGION 1..9: note = Table A: HLA-B*58:01H HLA-B*58:02H HLA-B*57:01M HLA-A*25:01H HLA-B*53:01H HLA-B*15:13H HLA-B*57:03H
  source 1..9: note = Severe acute respiratory syndrome coronavirus 2
ATVHTANKW

SEQ ID NO: 3791 - protein, 9 aa, Severe acute respiratory syndrome-related coronavirus
  REGION 1..9: note = Table A: HLA-B*38:02H
  source 1..9: note = Severe acute respiratory syndrome coronavirus 2
VHTANKWDL

SEQ ID NO: 3792 - protein, 9 aa, Severe acute respiratory syndrome-related coronavirus
  REGION 1..9: note = Table A: HLA-A*68:02H
  source 1..9: note = Severe acute respiratory syndrome coronavirus 2
HTANKWDLI

SEQ ID NO: 3793 - protein, 9 aa, Severe acute respiratory syndrome-related coronavirus
  REGION 1..9: note = Table A: HLA-B*53:01H HLA-B*35:03H HLA-C*15:05H HLA-C*15:02M
  source 1..9: note = Severe acute respiratory syndrome coronavirus 2
TANKWDLII

SEQ ID NO: 3794 - protein, 9 aa, Severe acute respiratory syndrome-related coronavirus
  REGION 1..9: note = Table A: HLA-C*04:01M HLA-C*04:03H
  source 1..9: note = Severe acute respiratory syndrome coronavirus 2
KWDLIISDM

SEQ ID NO: 3795 - protein, 9 aa, Severe acute respiratory syndrome-related coronavirus
  REGION 1..9: note = Table A: HLA-A*03:02H HLA-A*11:01H HLA-A*11:02H HLA-A*36:01H HLA-A*34:02H
  source 1..9: note = Severe acute respiratory syndrome coronavirus 2
IISDMYDPK

SEQ ID NO: 3796 - protein, 9 aa, Severe acute respiratory syndrome-related coronavirus
  REGION 1..9: note = Table A: HLA-A*33:03H HLA-C*06:02H HLA-C*04:01M HLA-C*04:03M HLA-A*02:11M HLA-A*02:07H HLA-A*02:02H HLA-A*24:02H HLA-B*51:01H HLA-B*52:01H HLA-C*08:01H HLA-A*23:01H HLA-B*38:02H HLA-B*49:01H
  source 1..9: note = Severe acute respiratory syndrome coronavirus 2
MYDPKTKNV

SEQ ID NO: 3797 - protein, 9 aa, Severe acute respiratory syndrome-related coronavirus
  REGION 1..9: note = Table A: HLA-A*33:03H HLA-B*08:01H HLA-A*34:02H
  source 1..9: note = Severe acute respiratory syndrome coronavirus 2
DPKTKNVTK

SEQ ID NO: 3798 - protein, 9 aa, Severe acute respiratory syndrome-related coronavirus
  REGION 1..9: note = Table A: HLA-B*44:02H HLA-B*44:05M HLA-B*44:03M HLA-B*37:01M
  source 1..9: note = Severe acute respiratory syndrome coronavirus 2
KENDSKEGF

SEQ ID NO: 3799 - protein, 9 aa, Severe acute respiratory syndrome-related coronavirus
  REGION 1..9: note = Table A: HLA-A*25:01H HLA-A*33:01H HLA-A*26:01M HLA-B*38:02H HLA-B*15:02H
  source 1..9: note = Severe acute respiratory syndrome coronavirus 2
DSKEGFFTY

SEQ ID NO: 3800 - protein, 9 aa, Severe acute respiratory syndrome-related coronavirus
  REGION 1..9: note = Table A: HLA-B*38:02H
  source 1..9: note = Severe acute respiratory syndrome coronavirus 2
SKEGFFTYI

SEQ ID NO: 3801 - protein, 9 aa, Severe acute respiratory syndrome-related coronavirus
  REGION 1..9: note = Table A: HLA-A*34:02H
  source 1..9: note = Severe acute respiratory syndrome coronavirus 2
YICGFIQQK

SEQ ID NO: 3802 - protein, 9 aa, Severe acute respiratory syndrome-related coronavirus
  REGION 1..9: note = Table A: HLA-C*14:02H HLA-C*14:03M HLA-C*15:05H
  source 1..9: note = Severe acute respiratory syndrome coronavirus 2
GFIQQKLAL

SEQ ID NO: 3803 - protein, 9 aa, Severe acute respiratory syndrome-related coronavirus
  REGION 1..9: note = Table A: HLA-A*11:303H HLA-C*03:03H HLA-C*12:05H HLA-C*03:02H HLA-C*03:04H HLA-B*35:03H HLA-C*15:05M HLA-B*35:01H HLA-B*51:01H HLA-C*08:01H HLA-B*38:02M HLA-B*54:01H HLA-B*39:01H HLA-B*57:03H
  source 1..9: note = Severe acute respiratory syndrome coronavirus 2
LALGGSVAI

SEQ ID NO: 3804 - protein, 9 aa, Severe acute respiratory syndrome-related coronavirus
  REGION 1..9: note = Table A: HLA-A*03:01H HLA-A*03:02M HLA-A*11:01H HLA-A*11:02H
  source 1..9: note = Severe acute respiratory syndrome coronavirus 2
ALGGSVAIK

SEQ ID NO: 3805 - protein, 9 aa, Severe acute respiratory syndrome-related coronavirus
  REGION 1..9: note = Table A: HLA-A*11:303H HLA-A*03:01M HLA-A*03:02H HLA-A*11:01M HLA-A*11:02H HLA-B*46:01H HLA-A*68:01H HLA-C*12:02H HLA-A*02:05H HLA-A*34:02M HLA-B*38:02H HLA-B*15:01H
  source 1..9: note = Severe acute respiratory syndrome coronavirus 2
SVAIKITEH

SEQ ID NO: 3806 - protein, 9 aa, Severe acute respiratory syndrome-related coronavirus
  REGION 1..9: note = Table A: HLA-B*58:01H HLA-B*58:02H HLA-B*57:01H HLA-A*30:02H HLA-B*15:13H HLA-A*32:01H HLA-B*57:03M HLA-B*13:01H
  source 1..9: note = Severe acute respiratory syndrome coronavirus 2
AIKITEHSW

SEQ ID NO: 3807 - protein, 9 aa, Severe acute respiratory syndrome-related coronavirus
  REGION 1..9: note = Table A: HLA-A*02:11H HLA-A*02:08H HLA-A*02:02H
  source 1..9: note = Severe acute respiratory syndrome coronavirus 2
KITEHSWNA

SEQ ID NO: 3808 - protein, 9 aa, Severe acute respiratory syndrome-related coronavirus
  REGION 1..9: note = Table A: HLA-B*44:05H HLA-B*40:01H HLA-B*40:02H HLA-B*41:02H HLA-B*49:01H
  source 1..9: note = Severe acute respiratory syndrome coronavirus 2
TEHSWNADL

SEQ ID NO: 3809 - protein, 9 aa, Severe acute respiratory syndrome-related coronavirus
  REGION 1..9: note = Table A: HLA-B*38:01H HLA-B*38:02M HLA-B*39:01M
  source 1..9: note = Severe acute respiratory syndrome coronavirus 2
EHSWNADLY

SEQ ID NO: 3810 - protein, 9 aa, Severe acute respiratory syndrome-related coronavirus
  REGION 1..9: note = Table A: HLA-A*34:02M
  source 1..9: note = Severe acute respiratory syndrome coronavirus 2
HSWNADLYK

SEQ ID NO: 3811 - protein, 9 aa, Severe acute respiratory syndrome-related coronavirus
  REGION 1..9: note = Table A: HLA-A*24:02H HLA-A*24:07H
  source 1..9: note = Severe acute respiratory syndrome coronavirus 2
SWNADLYKL

SEQ ID NO: 3812 - protein, 9 aa, Severe acute respiratory syndrome-related coronavirus
  REGION 1..9: note = Table A: HLA-A*26:01H
  source 1..9: note = Severe acute respiratory syndrome coronavirus 2
DLYKLMGHF

SEQ ID NO: 3813 - protein, 9 aa, Severe acute respiratory syndrome-related coronavirus
  REGION 1..9: note = Table A: HLA-B*58:01H HLA-A*32:01M HLA-B*57:03M HLA-B*13:01H
  source 1..9: note = Severe acute respiratory syndrome coronavirus 2
KLMGHFAWW

SEQ ID NO: 3814 - protein, 9 aa, Severe acute respiratory syndrome-related coronavirus
  REGION 1..9: note = Table A: HLA-B*38:02H HLA-B*15:03H
  source 1..9: note = Severe acute respiratory syndrome coronavirus 2
GHFAWWTAF

SEQ ID NO: 3815 - protein, 9 aa, Severe acute respiratory syndrome-related coronavirus
  REGION 1..9: note = Table A: HLA-B*56:01H HLA-B*55:02M HLA-C*15:05H HLA-B*55:01H HLA-A*02:05H HLA-B*35:01H HLA-C*08:01H HLA-B*38:02H HLA-B*39:06H HLA-B*54:01M
  source 1..9: note = Severe acute respiratory syndrome coronavirus 2
TAFVTNVNA

SEQ ID NO: 3816 - protein, 9 aa, Severe acute respiratory syndrome-related coronavirus
  REGION 1..9: note = Table A: HLA-A*26:03H HLA-A*68:02H HLA-B*38:02H
  source 1..9: note = Severe acute respiratory syndrome coronavirus 2
FVTNVNASS

SEQ ID NO: 3817 - protein, 9 aa, Severe acute respiratory syndrome-related coronavirus
  REGION 1..9: note = Table A: HLA-B*15:01H HLA-B*07:05H
  source 1..9: note = Severe acute respiratory syndrome coronavirus 2
VNASSSEAF

SEQ ID NO: 3818 - protein, 9 aa, Severe acute respiratory syndrome-related coronavirus
  REGION 1..9: note = Table A: HLA-B*35:03H HLA-B*35:02M HLA-B*35:12H HLA-B*38:02H
  source 1..9: note = Severe acute respiratory syndrome coronavirus 2
NASSSEAFL

SEQ ID NO: 3819 - protein, 9 aa, Severe acute respiratory syndrome-related coronavirus
  REGION 1..9: note = Table A: HLA-A*33:03H HLA-A*26:01H HLA-B*18:01H HLA-A*68:02H HLA-A*34:01H HLA-A*34:02H HLA-B*35:01M HLA-B*35:07M HLA-B*38:02M HLA-B*15:02M HLA-B*07:05H HLA-A*66:01H
  source 1..9: note = Severe acute respiratory syndrome coronavirus 2
EAFLIGCNY

SEQ ID NO: 3820 - protein, 9 aa, Severe acute respiratory syndrome-related coronavirus
  REGION 1..9: note = Table A: HLA-C*14:03H
  source 1..9: note = Severe acute respiratory syndrome coronavirus 2
AFLIGCNYL

SEQ ID NO: 3821 - protein, 9 aa, Severe acute respiratory syndrome-related coronavirus
  REGION 1..9: note = Table A: HLA-A*02:11H HLA-A*02:02H HLA-B*38:02H HLA-B*13:01H HLA-B*13:02H
  source 1..9: note = Severe acute respiratory syndrome coronavirus 2
YLGKPREQI

SEQ ID NO: 3822 - protein, 9 aa, Severe acute respiratory syndrome-related coronavirus
  REGION 1..9: note = Table A: HLA-A*30:02H HLA-C*15:05H HLA-B*35:01H HLA-B*35:07M HLA-B*38:02H HLA-B*07:02H HLA-B*07:04H HLA-B*15:02H HLA-B*15:03H HLA-B*07:05H
  source 1..9: note = Severe acute respiratory syndrome coronavirus 2
KPREQIDGY

SEQ ID NO: 3823 - protein, 9 aa, Severe acute respiratory syndrome-related coronavirus
  REGION 1..9: note = Table A: HLA-B*44:05H HLA-B*37:01H HLA-B*40:01M HLA-B*40:02H HLA-B*41:02H
  source 1..9: note = Severe acute respiratory syndrome coronavirus 2
REQIDGYVM

SEQ ID NO: 3824 - protein, 9 aa, Severe acute respiratory syndrome-related coronavirus
  REGION 1..9: note = Table A: HLA-A*26:03H HLA-A*34:01H HLA-B*38:02H
  source 1..9: note = Severe acute respiratory syndrome coronavirus 2
EQIDGYVMH

SEQ ID NO: 3825 - protein, 9 aa, Severe acute respiratory syndrome-related coronavirus
  REGION 1..9: note = Table A: HLA-A*02:07H
  source 1..9: note = Severe acute respiratory syndrome coronavirus 2
QIDGYVMHA

SEQ ID NO: 3826 - protein, 9 aa, Severe acute respiratory syndrome-related coronavirus
  REGION 1..9: note = Table A: HLA-B*18:01H HLA-B*35:01H HLA-B*51:01H HLA-B*38:02H HLA-B*15:02H HLA-B*07:05H
  source 1..9: note = Severe acute respiratory syndrome coronavirus 2
DGYVMHANY

SEQ ID NO: 3827 - protein, 9 aa, Severe acute respiratory syndrome-related coronavirus
  REGION 1..9: note = Table A: HLA-A*24:02H HLA-A*24:07H HLA-A*23:01H
  source 1..9: note = Severe acute respiratory syndrome coronavirus 2
GYVMHANYI

SEQ ID NO: 3828 - protein, 9 aa, Severe acute respiratory syndrome-related coronavirus
  REGION 1..9: note = Table A: HLA-B*58:01H HLA-A*24:02H HLA-A*24:07M HLA-A*23:01H HLA-B*38:02H HLA-A*32:01H HLA-B*57:03H HLA-B*13:01H
  source 1..9: note = Severe acute respiratory syndrome coronavirus 2
VMHANYIFW

SEQ ID NO: 3829 - protein, 9 aa, Severe acute respiratory syndrome-related coronavirus
  REGION 1..9: note = Table A: HLA-C*14:03H HLA-A*24:07H
  source 1..9: note = Severe acute respiratory syndrome coronavirus 2
IFWRNTNPI

SEQ ID NO: 3830 - protein, 9 aa, Severe acute respiratory syndrome-related coronavirus
  REGION 1..9: note = Table A: HLA-C*06:02M HLA-B*27:05H HLA-C*07:02H HLA-B*38:02H HLA-B*39:01H HLA-C*07:04H
  source 1..9: note = Severe acute respiratory syndrome coronavirus 2
WRNTNPIQL

SEQ ID NO: 3831 - protein, 9 aa, Severe acute respiratory syndrome-related coronavirus
  REGION 1..9: note = Table A: HLA-B*07:05H
  source 1..9: note = Severe acute respiratory syndrome coronavirus 2
TNPIQLSSY

SEQ ID NO: 3832 - protein, 9 aa, Severe acute respiratory syndrome-related coronavirus
  REGION 1..9: note = Table A: HLA-B*58:01H HLA-B*57:03M
  source 1..9: note = Severe acute respiratory syndrome coronavirus 2
YSLFDMSKF

SEQ ID NO: 3833 - protein, 9 aa, Severe acute respiratory syndrome-related coronavirus
  REGION 1..9: note = Table A: HLA-C*04:03H
  source 1..9: note = Severe acute respiratory syndrome coronavirus 2
LFDMSKFPL

SEQ ID NO: 3834 - protein, 9 aa, Severe acute respiratory syndrome-related coronavirus
  REGION 1..9: note = Table A: HLA-A*11:02H HLA-A*34:02M
  source 1..9: note = Severe acute respiratory syndrome coronavirus 2
FDMSKFPLK

SEQ ID NO: 3835 - protein, 9 aa, Severe acute respiratory syndrome-related coronavirus
  REGION 1..9: note = Table A: HLA-C*07:01H HLA-A*68:02H HLA-C*15:05M HLA-A*02:02H HLA-A*34:02H HLA-B*51:01H HLA-B*38:02M HLA-B*07:05M HLA-B*13:02H
  source 1..9: note = Severe acute respiratory syndrome coronavirus 2
DMSKFPLKL

SEQ ID NO: 3836 - protein, 9 aa, Severe acute respiratory syndrome-related coronavirus
  REGION 1..9: note = Table A: HLA-A*74:01M HLA-A*33:01M HLA-A*33:03H HLA-A*34:01M HLA-A*34:02M HLA-A*31:01H HLA-A*66:01H
  source 1..9: note = Severe acute respiratory syndrome coronavirus 2
MSKFPLKLR

SEQ ID NO: 3837 - protein, 9 aa, Severe acute respiratory syndrome-related coronavirus
  REGION 1..9: note = Table A: HLA-B*56:01H HLA-B*55:02H HLA-B*55:01H HLA-B*54:01M
  source 1..9: note = Severe acute respiratory syndrome coronavirus 2
FPLKLRGTA

SEQ ID NO: 3838 - protein, 9 aa, Severe acute respiratory syndrome-related coronavirus
  REGION 1..9: note = Table A: HLA-B*08:01H HLA-B*07:04H
  source 1..9: note = Severe acute respiratory syndrome coronavirus 2
PLKLRGTAV

SEQ ID NO: 3839 - protein, 9 aa, Severe acute respiratory syndrome-related coronavirus
  REGION 1..9: note = Table A: HLA-B*14:01H
  source 1..9: note = Severe acute respiratory syndrome coronavirus 2
LRGTAVMSL

SEQ ID NO: 3840 - protein, 9 aa, Severe acute respiratory syndrome-related coronavirus
  REGION 1..9: note = Table A: HLA-A*03:01H
  source 1..9: note = Severe acute respiratory syndrome coronavirus 2
RGTAVMSLK

SEQ ID NO: 3841 - protein, 9 aa, Severe acute respiratory syndrome-related coronavirus
  REGION 1..9: note = Table A: HLA-B*44:05H HLA-B*40:01H HLA-B*40:02H HLA-B*13:01H HLA-B*49:01M
  source 1..9: note = Severe acute respiratory syndrome coronavirus 2
KEGQINDMI

SEQ ID NO: 3842 - protein, 9 aa, Severe acute respiratory syndrome-related coronavirus
  REGION 1..9: note = Table A: HLA-A*11:303H HLA-A*68:02H HLA-B*35:03H HLA-C*15:05M HLA-C*15:02M HLA-A*02:04M HLA-A*02:05H HLA-A*02:07H HLA-A*02:02H HLA-A*02:03H HLA-C*08:01H HLA-B*38:02M HLA-B*07:05H HLA-B*13:02H HLA-C*07:04H
  source 1..9: note = Severe acute respiratory syndrome coronavirus 2
QINDMILSL

SEQ ID NO: 3843 - protein, 9 aa, Severe acute respiratory syndrome-related coronavirus
  REGION 1..9: note = Table A: HLA-C*04:03M
  source 1..9: note = Severe acute respiratory syndrome coronavirus 2
INDMILSLL

SEQ ID NO: 3844 - protein, 9 aa, Severe acute respiratory syndrome-related coronavirus
  REGION 1..9: note = Table A: HLA-A*34:02H
  source 1..9: note = Severe acute respiratory syndrome coronavirus 2
DMILSLLSK

SEQ ID NO: 3845 - protein, 9 aa, Severe acute respiratory syndrome-related coronavirus
  REGION 1..9: note = Table A: HLA-A*74:01H
  source 1..9: note = Severe acute respiratory syndrome coronavirus 2
ILSLLSKGR

SEQ ID NO: 3846 - protein, 9 aa, Severe acute respiratory syndrome-related coronavirus
  REGION 1..9: note = Table A: HLA-A*74:01M
  source 1..9: note = Severe acute respiratory syndrome coronavirus 2
RLIIRENNR

SEQ ID NO: 3847 - protein, 9 aa, Severe acute respiratory syndrome-related coronavirus
  REGION 1..9: note = Table A: HLA-B*07:04H
  source 1..9: note = Severe acute respiratory syndrome coronavirus 2
IIRENNRVV

SEQ ID NO: 3848 - protein, 9 aa, Severe acute respiratory syndrome-related coronavirus
  REGION 1..9: note = Table A: HLA-B*38:02H
  source 1..9: note = Severe acute respiratory syndrome coronavirus 2
IRENNRVVI

SEQ ID NO: 3849 - protein, 9 aa, Severe acute respiratory syndrome-related coronavirus
  REGION 1..9: note = Table A: HLA-B*14:01H HLA-B*39:01H
  source 1..9: note = Severe acute respiratory syndrome coronavirus 2
NRVVISSDV

SEQ ID NO: 3850 - protein, 9 aa, Severe acute respiratory syndrome-related coronavirus
  REGION 1..9: note = Table A: HLA-A*02:05H HLA-A*02:08H HLA-C*08:01H HLA-B*38:02H HLA-B*13:01M
  source 1..9: note = Severe acute respiratory syndrome coronavirus 2
RVVISSDVL

SEQ ID NO: 3851 - protein, 9 aa, Severe acute respiratory syndrome-related coronavirus
  REGION 1..9: note = Table A: HLA-A*68:02H HLA-C*15:05H HLA-A*02:05H HLA-A*02:06M HLA-A*02:08H HLA-A*02:01H HLA-C*08:01H HLA-B*38:02H HLA-B*13:02H
  source 1..9: note = Severe acute respiratory syndrome coronavirus 2
VVISSDVLV

SEQ ID NO: 3852 - protein, 9 aa, Severe acute respiratory syndrome-related coronavirus
  REGION 1..9: note = Table A: HLA-A*68:02H
  source 1..9: note = Severe acute respiratory syndrome coronavirus 2
ISSDVLVNN

SEQ ID NO: 3853 - protein, 10 aa, Severe acute respiratory syndrome-related coronavirus
  REGION 1..10: note = Table A: HLA-A*68:01H HLA-A*34:02H
  source 1..10: note = Severe acute respiratory syndrome coronavirus 2
ESLVPGFNEK

SEQ ID NO: 3854 - protein, 10 aa, Severe acute respiratory syndrome-related coronavirus
  REGION 1..10: note = Table A: HLA-A*02:02H
  source 1..10: note = Severe acute respiratory syndrome coronavirus 2
SLVPGFNEKT

SEQ ID NO: 3855 - protein, 10 aa, Severe acute respiratory syndrome-related coronavirus
  REGION 1..10: note = Table A: HLA-B*38:01H HLA-B*38:02M HLA-B*39:01H HLA-B*15:10M
  source 1..10: note = Severe acute respiratory syndrome coronavirus 2
THVQLSLPVL

SEQ ID NO: 3856 - protein, 10 aa, Severe acute respiratory syndrome-related coronavirus
  REGION 1..10: note = Table A: HLA-B*13:02H
  source 1..10: note = Severe acute respiratory syndrome coronavirus 2
VQLSLPVLQV

SEQ ID NO: 3857 - protein, 10 aa, Severe acute respiratory syndrome-related coronavirus
  REGION 1..10: note = Table A: HLA-B*35:03H HLA-C*15:05H HLA-B*07:02H
  source 1..10: note = Severe acute respiratory syndrome coronavirus 2
LPVLQVRDVL

SEQ ID NO: 3858 - protein, 10 aa, Severe acute respiratory syndrome-related coronavirus
  REGION 1..10: note = Table A: HLA-B*07:04H
  source 1..10: note = Severe acute respiratory syndrome coronavirus 2
QVRDVLVRGF

SEQ ID NO: 3859 - protein, 10 aa, Severe acute respiratory syndrome-related coronavirus
  REGION 1..10: note = Table A: HLA-A*02:02H HLA-B*38:02H
  source 1..10: note = Severe acute respiratory syndrome coronavirus 2
VLVRGFGDSV

SEQ ID NO: 3860 - protein, 10 aa, Severe acute respiratory syndrome-related coronavirus
  REGION 1..10: note = Table A: HLA-A*68:01H
  source 1..10: note = Severe acute respiratory syndrome coronavirus 2
SVEEVLSEAR

SEQ ID NO: 3861 - protein, 10 aa, Severe acute respiratory syndrome-related coronavirus
  REGION 1..10: note = Table A: HLA-A*33:03H HLA-A*68:02H HLA-A*34:01H HLA-A*34:02H
  source 1..10: note = Severe acute respiratory syndrome coronavirus 2
EVLSEARQHL

SEQ ID NO: 3862 - protein, 10 aa, Severe acute respiratory syndrome-related coronavirus
  REGION 1..10: note = Table A: HLA-A*03:02H
  source 1..10: note = Severe acute respiratory syndrome coronavirus 2
VLSEARQHLK

SEQ ID NO: 3863 - protein, 10 aa, Severe acute respiratory syndrome-related coronavirus
  REGION 1..10: note = Table A: HLA-B*38:02M HLA-B*39:01H
  source 1..10: note = Severe acute respiratory syndrome coronavirus 2
QHLKDGTCGL

SEQ ID NO: 3864 - protein, 10 aa, Severe acute respiratory syndrome-related coronavirus
  REGION 1..10: note = Table A: HLA-A*03:02M HLA-A*11:01M HLA-A*11:02H HLA-B*27:02H HLA-C*07:27H
  source 1..10: note = Severe acute respiratory syndrome coronavirus 2
GTCGLVEVEK

SEQ ID NO: 3865 - protein, 10 aa, Severe acute respiratory syndrome-related coronavirus
  REGION 1..10: note = Table A: HLA-B*40:01H
  source 1..10: note = Severe acute respiratory syndrome coronavirus 2
GLVEVEKGVL

SEQ ID NO: 3866 - protein, 10 aa, Severe acute respiratory syndrome-related coronavirus
  REGION 1..10: note = Table A: HLA-A*68:02H
  source 1..10: note = Severe acute respiratory syndrome coronavirus 2
EVEKGVLPQL

SEQ ID NO: 3867 - protein, 10 aa, Severe acute respiratory syndrome-related coronavirus
  REGION 1..10: note = Table A: HLA-A*29:01H HLA-A*29:02H
  source 1..10: note = Severe acute respiratory syndrome coronavirus 2
GVLPQLEQPY

SEQ ID NO: 3868 - protein, 10 aa, Severe acute respiratory syndrome-related coronavirus
  REGION 1..10: note = Table A: HLA-A*02:11H HLA-A*02:04H HLA-A*02:07M HLA-A*02:01H HLA-A*02:02H
  source 1..10: note = Severe acute respiratory syndrome coronavirus 2
VLPQLEQPYV

SEQ ID NO: 3869 - protein, 10 aa, Severe acute respiratory syndrome-related coronavirus
  REGION 1..10: note = Table A: HLA-B*53:01H HLA-B*55:02H HLA-B*35:03H HLA-B*35:01H HLA-B*35:08H HLA-B*35:07H
  source 1..10: note = Severe acute respiratory syndrome coronavirus 2
LPQLEQPYVF

SEQ ID NO: 3870 - protein, 10 aa, Severe acute respiratory syndrome-related coronavirus
  REGION 1..10: note = Table A: HLA-B*27:05H
  source 1..10: note = Severe acute respiratory syndrome coronavirus 2
ARTAPHGHVM

SEQ ID NO: 3871 - protein, 10 aa, Severe acute respiratory syndrome-related coronavirus
  REGION 1..10: note = Table A: HLA-C*15:02H HLA-A*02:08H HLA-B*57:03H
  source 1..10: note = Severe acute respiratory syndrome coronavirus 2
RTAPHGHVMV

SEQ ID NO: 3872 - protein, 10 aa, Severe acute respiratory syndrome-related coronavirus
  REGION 1..10: note = Table A: HLA-B*42:01H HLA-B*56:01H HLA-B*55:02M HLA-C*15:05M HLA-B*55:01H HLA-B*07:02M HLA-B*07:04M HLA-B*07:05H
  source 1..10: note = Severe acute respiratory syndrome coronavirus 2
APHGHVMVEL

SEQ ID NO: 3873 - protein, 10 aa, Severe acute respiratory syndrome-related coronavirus
  REGION 1..10: note = Table A: HLA-A*36:01H HLA-A*26:01M HLA-A*26:02H HLA-A*29:01M HLA-A*29:02H HLA-A*30:02H HLA-A*68:01H HLA-A*34:02H HLA-B*35:01M HLA-B*35:08H HLA-B*35:07H HLA-B*38:02H HLA-B*15:01H HLA-B*15:02H HLA-B*07:05H
  source 1..10: note = Severe acute respiratory syndrome coronavirus 2
LVAELEGIQY

SEQ ID NO: 3874 - protein, 10 aa, Severe acute respiratory syndrome-related coronavirus
  REGION 1..10: note = Table A: HLA-B*27:02H
  source 1..10: note = Severe acute respiratory syndrome coronavirus 2
AELEGIQYGR

SEQ ID NO: 3875 - protein, 10 aa, Severe acute respiratory syndrome-related coronavirus
  REGION 1..10: note = Table A: HLA-B*48:01H HLA-A*02:11H HLA-B*14:02M HLA-A*02:05M HLA-A*02:06H HLA-A*02:08M HLA-B*14:01H HLA-A*02:02M HLA-A*02:03H HLA-B*52:01H HLA-C*08:01H HLA-C*08:03H HLA-B*38:01H HLA-B*38:02M HLA-B*40:02H HLA-B*15:01M
  REGION 1..10: note = CONT. FROM ABOVE: HLA-B*15:02H HLA-B*15:03H HLA-B*39:01H HLA- B*13:01M HLA-B*13:02H HLA-B*15:10H
  source 1..10: note = Severe acute respiratory syndrome coronavirus 2
IQYGRSGETL

SEQ ID NO: 3876 - protein, 10 aa, Severe acute respiratory syndrome-related coronavirus
  REGION 1..10: note = Table A: HLA-B*57:03H
  source 1..10: note = Severe acute respiratory syndrome coronavirus 2
RSGETLGVLV

SEQ ID NO: 3877 - protein, 10 aa, Severe acute respiratory syndrome-related coronavirus
  REGION 1..10: note = Table A: HLA-A*68:02M HLA-A*34:02H
  source 1..10: note = Severe acute respiratory syndrome coronavirus 2
ETLGVLVPHV

SEQ ID NO: 3878 - protein, 10 aa, Severe acute respiratory syndrome-related coronavirus
  REGION 1..10: note = Table A: HLA-A*68:02H
  source 1..10: note = Severe acute respiratory syndrome coronavirus 2
LVPHVGEIPV

SEQ ID NO: 3879 - protein, 10 aa, Severe acute respiratory syndrome-related coronavirus
  REGION 1..10: note = Table A: HLA-B*56:01M HLA-B*55:02M HLA-B*55:01M HLA-B*54:01H
  source 1..10: note = Severe acute respiratory syndrome coronavirus 2
VPHVGEIPVA

SEQ ID NO: 3880 - protein, 10 aa, Severe acute respiratory syndrome-related coronavirus
  REGION 1..10: note = Table A: HLA-B*27:02H HLA-B*35:01H HLA-B*38:02H HLA-B*39:01H
  source 1..10: note = Severe acute respiratory syndrome coronavirus 2
PHVGEIPVAY

SEQ ID NO: 3881 - protein, 10 aa, Severe acute respiratory syndrome-related coronavirus
  REGION 1..10: note = Table A: HLA-A*74:01M HLA-A*03:02H HLA-A*33:01M HLA-A*33:03M HLA-A*26:03M HLA-A*68:01M HLA-A*68:02H HLA-A*34:01H HLA-A*34:02M HLA-A*66:01M
  source 1..10: note = Severe acute respiratory syndrome coronavirus 2
HVGEIPVAYR

SEQ ID NO: 3882 - protein, 10 aa, Severe acute respiratory syndrome-related coronavirus
  REGION 1..10: note = Table A: HLA-B*40:02H HLA-B*40:06H HLA-B*49:01M
  source 1..10: note = Severe acute respiratory syndrome coronavirus 2
GEIPVAYRKV

SEQ ID NO: 3883 - protein, 10 aa, Severe acute respiratory syndrome-related coronavirus
  REGION 1..10: note = Table A: HLA-B*07:04H
  source 1..10: note = Severe acute respiratory syndrome coronavirus 2
IPVAYRKVLL

SEQ ID NO: 3884 - protein, 10 aa, Severe acute respiratory syndrome-related coronavirus
  REGION 1..10: note = Table A: HLA-B*46:01H HLA-A*26:03H HLA-A*29:02H HLA-A*30:02H HLA-C*07:27H HLA-B*38:02H HLA-B*15:01M HLA-B*15:02H HLA-B*15:03H
  source 1..10: note = Severe acute respiratory syndrome coronavirus 2
GNKGAGGHSY

SEQ ID NO: 3885 - protein, 10 aa, Severe acute respiratory syndrome-related coronavirus
  REGION 1..10: note = Table A: HLA-B*58:02H HLA-B*57:01H HLA-A*25:01M HLA-B*46:01H HLA-A*26:01H HLA-A*26:03H HLA-C*12:02H HLA-A*34:02H HLA-B*57:03H HLA-A*66:01H
  source 1..10: note = Severe acute respiratory syndrome coronavirus 2
HSYGADLKSF

SEQ ID NO: 3886 - protein, 10 aa, Severe acute respiratory syndrome-related coronavirus
  REGION 1..10: note = Table A: HLA-A*02:02H
  source 1..10: note = Severe acute respiratory syndrome coronavirus 2
YGADLKSFDL

SEQ ID NO: 3887 - protein, 10 aa, Severe acute respiratory syndrome-related coronavirus
  REGION 1..10: note = Table A: HLA-A*25:01H HLA-B*53:01H HLA-B*38:02H
  source 1..10: note = Severe acute respiratory syndrome coronavirus 2
DPYEDFQENW

SEQ ID NO: 3888 - protein, 10 aa, Severe acute respiratory syndrome-related coronavirus
  REGION 1..10: note = Table A: HLA-B*45:01H
  source 1..10: note = Severe acute respiratory syndrome coronavirus 2
QENWNTKHSS

SEQ ID NO: 3889 - protein, 10 aa, Severe acute respiratory syndrome-related coronavirus
  REGION 1..10: note = Table A: HLA-A*33:01H HLA-A*33:03H HLA-A*26:03M HLA-A*68:01M HLA-A*34:01M HLA-A*34:02H HLA-A*66:01M
  source 1..10: note = Severe acute respiratory syndrome coronavirus 2
NTKHSSGVTR

SEQ ID NO: 3890 - protein, 10 aa, Severe acute respiratory syndrome-related coronavirus
  REGION 1..10: note = Table A: HLA-B*38:02M HLA-B*07:04H HLA-B*15:10H
  source 1..10: note = Severe acute respiratory syndrome coronavirus 2
KHSSGVTREL

SEQ ID NO: 3891 - protein, 10 aa, Severe acute respiratory syndrome-related coronavirus
  REGION 1..10: note = Table A: HLA-A*68:01H HLA-A*68:02M HLA-A*34:02H HLA-C*08:03H HLA-B*57:03H
  source 1..10: note = Severe acute respiratory syndrome coronavirus 2
HSSGVTRELM

SEQ ID NO: 3892 - protein, 10 aa, Severe acute respiratory syndrome-related coronavirus
  REGION 1..10: note = Table A: HLA-A*02:08H
  source 1..10: note = Severe acute respiratory syndrome coronavirus 2
GVTRELMREL

SEQ ID NO: 3893 - protein, 10 aa, Severe acute respiratory syndrome-related coronavirus
  REGION 1..10: note = Table A: HLA-A*11:303H HLA-B*46:01M HLA-A*29:02H HLA-C*03:02H HLA-A*30:02M HLA-B*38:02M HLA-B*15:01M HLA-B*15:02M HLA-B*15:03H
  source 1..10: note = Severe acute respiratory syndrome coronavirus 2
LMRELNGGAY

SEQ ID NO: 3894 - protein, 10 aa, Severe acute respiratory syndrome-related coronavirus
  REGION 1..10: note = Table A: HLA-B*39:01H
  source 1..10: note = Severe acute respiratory syndrome coronavirus 2
MRELNGGAYT

SEQ ID NO: 3895 - protein, 10 aa, Severe acute respiratory syndrome-related coronavirus
  REGION 1..10: note = Table A: HLA-A*74:01H
  source 1..10: note = Severe acute respiratory syndrome coronavirus 2
RELNGGAYTR

SEQ ID NO: 3896 - protein, 10 aa, Severe acute respiratory syndrome-related coronavirus
  REGION 1..10: note = Table A: HLA-A*25:01M HLA-A*26:01M HLA-A*26:02M HLA-A*26:03H HLA-A*30:02H HLA-A*68:01H HLA-A*34:01M HLA-A*34:02H HLA-B*38:02M HLA-B*15:01H HLA-B*15:02M
  source 1..10: note = Severe acute respiratory syndrome coronavirus 2
ELNGGAYTRY

SEQ ID NO: 3897 - protein, 10 aa, Severe acute respiratory syndrome-related coronavirus
  REGION 1..10: note = Table A: HLA-A*24:02M HLA-A*24:07M HLA-A*23:01M
  source 1..10: note = Severe acute respiratory syndrome coronavirus 2
AYTRYVDNNF

SEQ ID NO: 3898 - protein, 10 aa, Severe acute respiratory syndrome-related coronavirus
  REGION 1..10: note = Table A: HLA-C*15:05H
  source 1..10: note = Severe acute respiratory syndrome coronavirus 2
GPDGYPLECI

SEQ ID NO: 3899 - protein, 10 aa, Severe acute respiratory syndrome-related coronavirus
  REGION 1..10: note = Table A: HLA-B*53:01H
  source 1..10: note = Severe acute respiratory syndrome coronavirus 2
YPLECIKDLL

SEQ ID NO: 3900 - protein, 10 aa, Severe acute respiratory syndrome-related coronavirus
  REGION 1..10: note = Table A: HLA-A*33:03H HLA-A*26:03H HLA-A*68:01H HLA-A*34:01M HLA-A*34:02H HLA-A*66:01H
  source 1..10: note = Severe acute respiratory syndrome coronavirus 2
EQLDFIDTKR

SEQ ID NO: 3901 - protein, 10 aa, Severe acute respiratory syndrome-related coronavirus
  REGION 1..10: note = Table A: HLA-C*14:03H HLA-A*25:01H HLA-A*26:01H HLA-A*29:02H HLA-A*30:02H HLA-B*15:02H
  source 1..10: note = Severe acute respiratory syndrome coronavirus 2
DFIDTKRGVY

SEQ ID NO: 3902 - protein, 10 aa, Severe acute respiratory syndrome-related coronavirus
  REGION 1..10: note = Table A: HLA-A*33:01H HLA-A*33:03H
  source 1..10: note = Severe acute respiratory syndrome coronavirus 2
DTKRGVYCCR

SEQ ID NO: 3903 - protein, 10 aa, Severe acute respiratory syndrome-related coronavirus
  REGION 1..10: note = Table A: HLA-B*44:03H
  source 1..10: note = Severe acute respiratory syndrome coronavirus 2
REHEHEIAWY

SEQ ID NO: 3904 - protein, 10 aa, Severe acute respiratory syndrome-related coronavirus
  REGION 1..10: note = Table A: HLA-B*40:01H HLA-B*40:02H HLA-B*41:02M
  source 1..10: note = Severe acute respiratory syndrome coronavirus 2
TERSEKSYEL

SEQ ID NO: 3905 - protein, 10 aa, Severe acute respiratory syndrome-related coronavirus
  REGION 1..10: note = Table A: HLA-B*45:01M HLA-B*50:01M
  source 1..10: note = Severe acute respiratory syndrome coronavirus 2
SEKSYELQTP

SEQ ID NO: 3906 - protein, 10 aa, Severe acute respiratory syndrome-related coronavirus
  REGION 1..10: note = Table A: HLA-A*68:02H HLA-A*02:04H
  source 1..10: note = Severe acute respiratory syndrome coronavirus 2
ELQTPFEIKL

SEQ ID NO: 3907 - protein, 10 aa, Severe acute respiratory syndrome-related coronavirus
  REGION 1..10: note = Table A: HLA-A*02:05H
  source 1..10: note = Severe acute respiratory syndrome coronavirus 2
LQTPFEIKLA

SEQ ID NO: 3908 - protein, 10 aa, Severe acute respiratory syndrome-related coronavirus
  REGION 1..10: note = Table A: HLA-A*11:01H HLA-A*11:02H HLA-A*36:01H HLA-A*34:02H
  source 1..10: note = Severe acute respiratory syndrome coronavirus 2
QTPFEIKLAK

SEQ ID NO: 3909 - protein, 10 aa, Severe acute respiratory syndrome-related coronavirus
  REGION 1..10: note = Table A: HLA-A*68:01H HLA-A*34:01H HLA-A*34:02H
  source 1..10: note = Severe acute respiratory syndrome coronavirus 2
TPFEIKLAKK

SEQ ID NO: 3910 - protein, 10 aa, Severe acute respiratory syndrome-related coronavirus
  REGION 1..10: note = Table A: HLA-A*25:01M HLA-A*26:01H HLA-A*26:02M HLA-A*26:03M HLA-A*68:01H HLA-A*68:02H HLA-A*34:02H HLA-A*66:01H
  source 1..10: note = Severe acute respiratory syndrome coronavirus 2
DTFNGECPNF

SEQ ID NO: 3911 - protein, 10 aa, Severe acute respiratory syndrome-related coronavirus
  REGION 1..10: note = Table A: HLA-A*34:02H
  source 1..10: note = Severe acute respiratory syndrome coronavirus 2
FVFPLNSIIK

SEQ ID NO: 3912 - protein, 10 aa, Severe acute respiratory syndrome-related coronavirus
  REGION 1..10: note = Table A: HLA-B*53:01H HLA-B*55:02H HLA-C*15:05H HLA-B*51:01M HLA-B*54:01H HLA-B*07:04H
  source 1..10: note = Severe acute respiratory syndrome coronavirus 2
FPLNSIIKTI

SEQ ID NO: 3913 - protein, 10 aa, Severe acute respiratory syndrome-related coronavirus
  REGION 1..10: note = Table A: HLA-A*68:01H HLA-A*66:01H
  source 1..10: note = Severe acute respiratory syndrome coronavirus 2
NSIIKTIQPR

SEQ ID NO: 3914 - protein, 10 aa, Severe acute respiratory syndrome-related coronavirus
  REGION 1..10: note = Table A: HLA-A*03:01H HLA-A*03:02H HLA-A*11:01H HLA-A*11:02H HLA-A*30:01H HLA-A*34:02H HLA-C*07:27H
  source 1..10: note = Severe acute respiratory syndrome coronavirus 2
KTIQPRVEKK

SEQ ID NO: 3915 - protein, 10 aa, Severe acute respiratory syndrome-related coronavirus
  REGION 1..10: note = Table A: HLA-A*74:01M
  source 1..10: note = Severe acute respiratory syndrome coronavirus 2
KLDGFMGRIR

SEQ ID NO: 3916 - protein, 10 aa, Severe acute respiratory syndrome-related coronavirus
  REGION 1..10: note = Table A: HLA-B*51:01H
  source 1..10: note = Severe acute respiratory syndrome coronavirus 2
DGFMGRIRSV

SEQ ID NO: 3917 - protein, 10 aa, Severe acute respiratory syndrome-related coronavirus
  REGION 1..10: note = Table A: HLA-A*30:02H
  source 1..10: note = Severe acute respiratory syndrome coronavirus 2
GFMGRIRSVY

SEQ ID NO: 3918 - protein, 10 aa, Severe acute respiratory syndrome-related coronavirus
  REGION 1..10: note = Table A: HLA-C*15:05M HLA-B*07:05H
  source 1..10: note = Severe acute respiratory syndrome coronavirus 2
SPNECNQMCL

SEQ ID NO: 3919 - protein, 10 aa, Severe acute respiratory syndrome-related coronavirus
  REGION 1..10: note = Table A: HLA-B*44:05H
  source 1..10: note = Severe acute respiratory syndrome coronavirus 2
GETSWQTGDF

SEQ ID NO: 3920 - protein, 10 aa, Severe acute respiratory syndrome-related coronavirus
  REGION 1..10: note = Table A: HLA-A*68:02M
  source 1..10: note = Severe acute respiratory syndrome coronavirus 2
ETSWQTGDFV

SEQ ID NO: 3921 - protein, 10 aa, Severe acute respiratory syndrome-related coronavirus
  REGION 1..10: note = Table A: HLA-A*11:01H HLA-A*36:01H HLA-A*34:02H
  source 1..10: note = Severe acute respiratory syndrome coronavirus 2
TSWQTGDFVK

SEQ ID NO: 3922 - protein, 10 aa, Severe acute respiratory syndrome-related coronavirus
  REGION 1..10: note = Table A: HLA-A*68:02H
  source 1..10: note = Severe acute respiratory syndrome coronavirus 2
QTGDFVKATC

SEQ ID NO: 3923 - protein, 10 aa, Severe acute respiratory syndrome-related coronavirus
  REGION 1..10: note = Table A: HLA-B*27:02H
  source 1..10: note = Severe acute respiratory syndrome coronavirus 2
GYLPQNAVVK

SEQ ID NO: 3924 - protein, 10 aa, Severe acute respiratory syndrome-related coronavirus
  REGION 1..10: note = Table A: HLA-A*02:11H HLA-A*02:05H HLA-A*02:07H HLA-A*02:02H HLA-A*02:03H HLA-A*24:07H HLA-B*38:02H HLA-B*13:02H
  source 1..10: note = Severe acute respiratory syndrome coronavirus 2
YLPQNAVVKI

SEQ ID NO: 3925 - protein, 10 aa, Severe acute respiratory syndrome-related coronavirus
  REGION 1..10: note = Table A: HLA-B*35:01M HLA-B*35:07M HLA-B*07:04H HLA-B*15:11H
  source 1..10: note = Severe acute respiratory syndrome coronavirus 2
LPQNAVVKIY

SEQ ID NO: 3926 - protein, 10 aa, Severe acute respiratory syndrome-related coronavirus
  REGION 1..10: note = Table A: HLA-B*35:02H HLA-C*08:01H HLA-C*08:02H HLA-B*35:12H HLA-B*39:01H
  source 1..10: note = Severe acute respiratory syndrome coronavirus 2
NSEVGPEHSL

SEQ ID NO: 3927 - protein, 10 aa, Severe acute respiratory syndrome-related coronavirus
  REGION 1..10: note = Table A: HLA-B*45:01H HLA-B*49:01H HLA-B*50:01M
  source 1..10: note = Severe acute respiratory syndrome coronavirus 2
SEVGPEHSLA

SEQ ID NO: 3928 - protein, 10 aa, Severe acute respiratory syndrome-related coronavirus
  REGION 1..10: note = Table A: HLA-C*14:03H HLA-B*46:01H HLA-C*03:02H HLA-A*30:02H HLA-C*12:02H HLA-B*15:01H
  source 1..10: note = Severe acute respiratory syndrome coronavirus 2
VGPEHSLAEY

SEQ ID NO: 3929 - protein, 10 aa, Severe acute respiratory syndrome-related coronavirus
  REGION 1..10: note = Table A: HLA-A*02:02H
  source 1..10: note = Severe acute respiratory syndrome coronavirus 2
SLAEYHNESG

SEQ ID NO: 3930 - protein, 10 aa, Severe acute respiratory syndrome-related coronavirus
  REGION 1..10: note = Table A: HLA-B*49:01H
  source 1..10: note = Severe acute respiratory syndrome coronavirus 2
AEYHNESGLK

SEQ ID NO: 3931 - protein, 10 aa, Severe acute respiratory syndrome-related coronavirus
  REGION 1..10: note = Table A: HLA-B*38:01H HLA-B*38:02H HLA-B*15:10H
  source 1..10: note = Severe acute respiratory syndrome coronavirus 2
YHNESGLKTI

SEQ ID NO: 3932 - protein, 10 aa, Severe acute respiratory syndrome-related coronavirus
  REGION 1..10: note = Table A: HLA-B*35:03H HLA-C*08:03H HLA-B*40:01H
  source 1..10: note = Severe acute respiratory syndrome coronavirus 2
HNESGLKTIL

SEQ ID NO: 3933 - protein, 10 aa, Severe acute respiratory syndrome-related coronavirus
  REGION 1..10: note = Table A: HLA-A*68:01H
  source 1..10: note = Severe acute respiratory syndrome coronavirus 2
NESGLKTILR

SEQ ID NO: 3934 - protein, 10 aa, Severe acute respiratory syndrome-related coronavirus
  REGION 1..10: note = Table A: HLA-A*34:02H
  source 1..10: note = Severe acute respiratory syndrome coronavirus 2
ESGLKTILRK

SEQ ID NO: 3935 - protein, 10 aa, Severe acute respiratory syndrome-related coronavirus
  REGION 1..10: note = Table A: HLA-B*58:01H HLA-B*58:02H HLA-B*57:01H HLA-C*15:05H HLA-C*15:02H HLA-B*15:01H HLA-B*57:03H
  source 1..10: note = Severe acute respiratory syndrome coronavirus 2
RTIAFGGCVF

SEQ ID NO: 3936 - protein, 10 aa, Severe acute respiratory syndrome-related coronavirus
  REGION 1..10: note = Table A: HLA-B*35:01H HLA-B*35:07H
  source 1..10: note = Severe acute respiratory syndrome coronavirus 2
IAFGGCVFSY

SEQ ID NO: 3937 - protein, 10 aa, Severe acute respiratory syndrome-related coronavirus
  REGION 1..10: note = Table A: HLA-A*33:03H
  source 1..10: note = Severe acute respiratory syndrome coronavirus 2
HNKCAYWVPR

SEQ ID NO: 3938 - protein, 10 aa, Severe acute respiratory syndrome-related coronavirus
  REGION 1..10: note = Table A: HLA-B*56:01H HLA-B*55:02H HLA-B*54:01M
  source 1..10: note = Severe acute respiratory syndrome coronavirus 2
CAYWVPRASA

SEQ ID NO: 3939 - protein, 10 aa, Severe acute respiratory syndrome-related coronavirus
  REGION 1..10: note = Table A: HLA-B*56:01H HLA-B*55:02H HLA-C*15:05H HLA-B*55:01H HLA-B*07:02H HLA-B*07:04H
  source 1..10: note = Severe acute respiratory syndrome coronavirus 2
VPRASANIGC

SEQ ID NO: 3940 - protein, 10 aa, Severe acute respiratory syndrome-related coronavirus
  REGION 1..10: note = Table A: HLA-B*39:01H
  source 1..10: note = Severe acute respiratory syndrome coronavirus 2
NHTGVVGEGS

SEQ ID NO: 3941 - protein, 10 aa, Severe acute respiratory syndrome-related coronavirus
  REGION 1..10: note = Table A: HLA-A*02:05H HLA-A*02:08M
  source 1..10: note = Severe acute respiratory syndrome coronavirus 2
GVVGEGSEGL

SEQ ID NO: 3942 - protein, 10 aa, Severe acute respiratory syndrome-related coronavirus
  REGION 1..10: note = Table A: HLA-A*02:04H HLA-A*02:02H
  source 1..10: note = Severe acute respiratory syndrome coronavirus 2
GLNDNLLEIL

SEQ ID NO: 3943 - protein, 10 aa, Severe acute respiratory syndrome-related coronavirus
  REGION 1..10: note = Table A: HLA-B*40:02H
  source 1..10: note = Severe acute respiratory syndrome coronavirus 2
KEKVNINIVG

SEQ ID NO: 3944 - protein, 10 aa, Severe acute respiratory syndrome-related coronavirus
  REGION 1..10: note = Table A: HLA-A*30:02H HLA-B*57:03H
  source 1..10: note = Severe acute respiratory syndrome coronavirus 2
KVNINIVGDF

SEQ ID NO: 3945 - protein, 10 aa, Severe acute respiratory syndrome-related coronavirus
  REGION 1..10: note = Table A: HLA-A*36:01H HLA-B*27:02H
  source 1..10: note = Severe acute respiratory syndrome coronavirus 2
VNINIVGDFK

SEQ ID NO: 3946 - protein, 10 aa, Severe acute respiratory syndrome-related coronavirus
  REGION 1..10: note = Table A: HLA-A*02:11H HLA-A*02:04H HLA-A*02:02M
  source 1..10: note = Severe acute respiratory syndrome coronavirus 2
KLNEEIAIIL

SEQ ID NO: 3947 - protein, 10 aa, Severe acute respiratory syndrome-related coronavirus
  REGION 1..10: note = Table A: HLA-B*44:02M HLA-B*44:05H HLA-A*25:01H HLA-A*26:03H HLA-B*44:03H HLA-B*18:01M HLA-A*68:02H HLA-B*40:02H HLA-B*07:05M
  source 1..10: note = Severe acute respiratory syndrome coronavirus 2
EEIAIILASF

SEQ ID NO: 3948 - protein, 10 aa, Severe acute respiratory syndrome-related coronavirus
  REGION 1..10: note = Table A: HLA-B*54:01H
  source 1..10: note = Severe acute respiratory syndrome coronavirus 2
IAIILASFSA

SEQ ID NO: 3949 - protein, 10 aa, Severe acute respiratory syndrome-related coronavirus
  REGION 1..10: note = Table A: HLA-B*46:01H HLA-C*15:05H HLA-B*38:02H HLA-B*15:01M HLA-B*15:03H HLA-B*07:05H HLA-B*57:03H
  source 1..10: note = Severe acute respiratory syndrome coronavirus 2
ASFSASTSAF

SEQ ID NO: 3950 - protein, 10 aa, Severe acute respiratory syndrome-related coronavirus
  REGION 1..10: note = Table A: HLA-A*11:303H HLA-A*03:01H HLA-A*03:02M HLA-A*11:01M HLA-A*11:02M HLA-A*36:01H HLA-B*27:02H HLA-A*30:02H HLA-A*68:01M HLA-A*68:02H HLA-A*34:02M HLA-C*07:27H
  source 1..10: note = Severe acute respiratory syndrome coronavirus 2
STSAFVETVK

SEQ ID NO: 3951 - protein, 10 aa, Severe acute respiratory syndrome-related coronavirus
  REGION 1..10: note = Table A: HLA-A*02:05H
  source 1..10: note = Severe acute respiratory syndrome coronavirus 2
SAFVETVKGL

SEQ ID NO: 3952 - protein, 10 aa, Severe acute respiratory syndrome-related coronavirus
  REGION 1..10: note = Table A: HLA-B*58:01H HLA-A*36:01H HLA-A*26:01H HLA-A*29:01M HLA-A*29:02M HLA-A*01:01H HLA-A*34:02H HLA-B*35:01M HLA-B*38:02H HLA-B*15:02H HLA-B*39:01H
  source 1..10: note = Severe acute respiratory syndrome coronavirus 2
FVETVKGLDY

SEQ ID NO: 3953 - protein, 10 aa, Severe acute respiratory syndrome-related coronavirus
  REGION 1..10: note = Table A: HLA-A*68:02H
  source 1..10: note = Severe acute respiratory syndrome coronavirus 2
ETVKGLDYKA

SEQ ID NO: 3954 - protein, 10 aa, Severe acute respiratory syndrome-related coronavirus
  REGION 1..10: note = Table A: HLA-A*25:01H HLA-A*26:03H HLA-B*07:04H
  source 1..10: note = Severe acute respiratory syndrome coronavirus 2
TVKGLDYKAF

SEQ ID NO: 3955 - protein, 10 aa, Severe acute respiratory syndrome-related coronavirus
  REGION 1..10: note = Table A: HLA-A*02:08H
  source 1..10: note = Severe acute respiratory syndrome coronavirus 2
KAFKQIVESC

SEQ ID NO: 3956 - protein, 10 aa, Severe acute respiratory syndrome-related coronavirus
  REGION 1..10: note = Table A: HLA-B*15:01H HLA-B*13:01H
  source 1..10: note = Severe acute respiratory syndrome coronavirus 2
KQIVESCGNF

SEQ ID NO: 3957 - protein, 10 aa, Severe acute respiratory syndrome-related coronavirus
  REGION 1..10: note = Table A: HLA-A*34:02H
  source 1..10: note = Severe acute respiratory syndrome coronavirus 2
QIVESCGNFK

SEQ ID NO: 3958 - protein, 10 aa, Severe acute respiratory syndrome-related coronavirus
  REGION 1..10: note = Table A: HLA-A*68:01H HLA-A*34:02H
  source 1..10: note = Severe acute respiratory syndrome coronavirus 2
ESCGNFKVTK

SEQ ID NO: 3959 - protein, 10 aa, Severe acute respiratory syndrome-related coronavirus
  REGION 1..10: note = Table A: HLA-A*03:01H HLA-A*03:02M HLA-A*11:01H HLA-A*36:01H HLA-C*06:02H HLA-A*30:02H
  source 1..10: note = Severe acute respiratory syndrome coronavirus 2
KGAWNIGEQK

SEQ ID NO: 3960 - protein, 10 aa, Severe acute respiratory syndrome-related coronavirus
  REGION 1..10: note = Table A: HLA-B*40:01H HLA-B*40:02H
  source 1..10: note = Severe acute respiratory syndrome coronavirus 2
GEQKSILSPL

SEQ ID NO: 3961 - protein, 10 aa, Severe acute respiratory syndrome-related coronavirus
  REGION 1..10: note = Table A: HLA-A*30:02H HLA-B*38:02H
  source 1..10: note = Severe acute respiratory syndrome coronavirus 2
EQKSILSPLY

SEQ ID NO: 3962 - protein, 10 aa, Severe acute respiratory syndrome-related coronavirus
  REGION 1..10: note = Table A: HLA-B*58:01H HLA-B*58:02H HLA-B*57:01H HLA-B*57:03H
  source 1..10: note = Severe acute respiratory syndrome coronavirus 2
KSILSPLYAF

SEQ ID NO: 3963 - protein, 10 aa, Severe acute respiratory syndrome-related coronavirus
  REGION 1..10: note = Table A: HLA-B*56:01H HLA-B*55:02H HLA-C*15:05H HLA-B*55:01H HLA-B*54:01H
  source 1..10: note = Severe acute respiratory syndrome coronavirus 2
SPLYAFASEA

SEQ ID NO: 3964 - protein, 10 aa, Severe acute respiratory syndrome-related coronavirus
  REGION 1..10: note = Table A: HLA-A*68:02H HLA-A*02:05H
  source 1..10: note = Severe acute respiratory syndrome coronavirus 2
YAFASEAARV

SEQ ID NO: 3965 - protein, 10 aa, Severe acute respiratory syndrome-related coronavirus
  REGION 1..10: note = Table A: HLA-A*33:03H HLA-A*68:01M HLA-A*34:01M HLA-A*34:02H HLA-A*66:01M
  source 1..10: note = Severe acute respiratory syndrome coronavirus 2
FASEAARVVR

SEQ ID NO: 3966 - protein, 10 aa, Severe acute respiratory syndrome-related coronavirus
  REGION 1..10: note = Table A: HLA-B*49:01H
  source 1..10: note = Severe acute respiratory syndrome coronavirus 2
SEAARVVRSI

SEQ ID NO: 3967 - protein, 10 aa, Severe acute respiratory syndrome-related coronavirus
  REGION 1..10: note = Table A: HLA-B*53:01H HLA-A*34:01M HLA-A*34:02H HLA-B*35:01H HLA-B*35:07M HLA-B*57:03H
  source 1..10: note = Severe acute respiratory syndrome coronavirus 2
EAARVVRSIF

SEQ ID NO: 3968 - protein, 10 aa, Severe acute respiratory syndrome-related coronavirus
  REGION 1..10: note = Table A: HLA-B*07:04H
  source 1..10: note = Severe acute respiratory syndrome coronavirus 2
VVRSIFSRTL

SEQ ID NO: 3969 - protein, 10 aa, Severe acute respiratory syndrome-related coronavirus
  REGION 1..10: note = Table A: HLA-B*56:01H HLA-A*02:11M HLA-B*55:02H HLA-A*68:02H HLA-B*55:01H HLA-A*02:04H HLA-A*02:05H HLA-A*02:06H HLA-A*02:08H HLA-A*02:01H HLA-A*02:02H HLA-A*02:03H HLA-B*38:02H HLA-B*40:06H HLA-B*54:01H
  source 1..10: note = Severe acute respiratory syndrome coronavirus 2
SIFSRTLETA

SEQ ID NO: 3970 - protein, 10 aa, Severe acute respiratory syndrome-related coronavirus
  REGION 1..10: note = Table A: HLA-A*02:11H HLA-C*15:05H HLA-A*02:06H HLA-A*02:08H HLA-B*57:03H HLA-B*13:02H
  source 1..10: note = Severe acute respiratory syndrome coronavirus 2
RTLETAQNSV

SEQ ID NO: 3971 - protein, 10 aa, Severe acute respiratory syndrome-related coronavirus
  REGION 1..10: note = Table A: HLA-B*49:01H
  source 1..10: note = Severe acute respiratory syndrome coronavirus 2
LETAQNSVRV

SEQ ID NO: 3972 - protein, 10 aa, Severe acute respiratory syndrome-related coronavirus
  REGION 1..10: note = Table A: HLA-A*25:01M HLA-A*26:01H HLA-A*26:02H HLA-A*26:03M HLA-A*68:01H HLA-A*68:02M HLA-A*34:01M HLA-A*34:02H HLA-A*66:01H
  source 1..10: note = Severe acute respiratory syndrome coronavirus 2
ETAQNSVRVL

SEQ ID NO: 3973 - protein, 10 aa, Severe acute respiratory syndrome-related coronavirus
  REGION 1..10: note = Table A: HLA-A*11:303H HLA-A*74:01H HLA-A*03:01M HLA-A*03:02M HLA-A*11:01M HLA-A*11:02M HLA-A*30:01M HLA-A*30:02H HLA-C*07:27H HLA-B*15:01H HLA-B*13:02H
  source 1..10: note = Severe acute respiratory syndrome coronavirus 2
AQNSVRVLQK

SEQ ID NO: 3974 - protein, 10 aa, Severe acute respiratory syndrome-related coronavirus
  REGION 1..10: note = Table A: HLA-B*07:04H
  source 1..10: note = Severe acute respiratory syndrome coronavirus 2
SVRVLQKAAI

SEQ ID NO: 3975 - protein, 10 aa, Severe acute respiratory syndrome-related coronavirus
  REGION 1..10: note = Table A: HLA-B*58:02H HLA-B*57:03H HLA-B*13:02H
  source 1..10: note = Severe acute respiratory syndrome coronavirus 2
RVLQKAAITI

SEQ ID NO: 3976 - protein, 10 aa, Severe acute respiratory syndrome-related coronavirus
  REGION 1..10: note = Table A: HLA-B*58:01H HLA-A*36:01M HLA-B*57:01H HLA-A*25:01H HLA-B*46:01H HLA-A*26:01M HLA-A*26:02H HLA-A*26:03H HLA-A*01:01H HLA-A*30:02M HLA-B*35:01H HLA-B*38:02H HLA-B*15:01M HLA-B*57:03H
  source 1..10: note = Severe acute respiratory syndrome coronavirus 2
ITILDGISQY

SEQ ID NO: 3977 - protein, 10 aa, Severe acute respiratory syndrome-related coronavirus
  REGION 1..10: note = Table A: HLA-A*02:11H HLA-A*02:04H HLA-A*02:07M HLA-A*02:01H HLA-A*02:02H HLA-C*08:02H HLA-B*38:02H
  source 1..10: note = Severe acute respiratory syndrome coronavirus 2
ILDGISQYSL

SEQ ID NO: 3978 - protein, 10 aa, Severe acute respiratory syndrome-related coronavirus
  REGION 1..10: note = Table A: HLA-A*02:05H HLA-A*02:08H HLA-A*02:03H HLA-B*39:06H
  source 1..10: note = Severe acute respiratory syndrome coronavirus 2
SQYSLRLIDA

SEQ ID NO: 3979 - protein, 10 aa, Severe acute respiratory syndrome-related coronavirus
  REGION 1..10: note = Table A: HLA-A*68:01H HLA-A*68:02M HLA-A*02:05H HLA-A*02:02M HLA-A*34:01H HLA-B*38:02H HLA-A*66:01H
  source 1..10: note = Severe acute respiratory syndrome coronavirus 2
FTSDLATNNL

SEQ ID NO: 3980 - protein, 10 aa, Severe acute respiratory syndrome-related coronavirus
  REGION 1..10: note = Table A: HLA-A*01:01H
  source 1..10: note = Severe acute respiratory syndrome coronavirus 2
TSDLATNNLV

SEQ ID NO: 3981 - protein, 10 aa, Severe acute respiratory syndrome-related coronavirus
  REGION 1..10: note = Table A: HLA-A*26:02H HLA-B*38:02H HLA-B*15:02H
  source 1..10: note = Severe acute respiratory syndrome coronavirus 2
DLATNNLVVM

SEQ ID NO: 3982 - protein, 10 aa, Severe acute respiratory syndrome-related coronavirus
  REGION 1..10: note = Table A: HLA-A*03:01H HLA-A*03:02H HLA-A*11:01M HLA-A*11:02H HLA-A*36:01H HLA-A*26:01H HLA-A*29:01H HLA-A*30:02M HLA-B*15:01H
  source 1..10: note = Severe acute respiratory syndrome coronavirus 2
ATNNLVVMAY

SEQ ID NO: 3983 - protein, 10 aa, Severe acute respiratory syndrome-related coronavirus
  REGION 1..10: note = Table A: HLA-C*14:02M HLA-C*14:03H HLA-A*02:08H HLA-A*24:02H HLA-A*24:07M HLA-C*08:01H HLA-A*23:01H HLA-B*39:01H
  source 1..10: note = Severe acute respiratory syndrome coronavirus 2
AYITGGVVQL

SEQ ID NO: 3984 - protein, 10 aa, Severe acute respiratory syndrome-related coronavirus
  REGION 1..10: note = Table A: HLA-A*68:02H HLA-C*08:03H
  source 1..10: note = Severe acute respiratory syndrome coronavirus 2
YITGGVVQLT

SEQ ID NO: 3985 - protein, 10 aa, Severe acute respiratory syndrome-related coronavirus
  REGION 1..10: note = Table A: HLA-B*38:02H
  source 1..10: note = Severe acute respiratory syndrome coronavirus 2
WLTNIFGTVY

SEQ ID NO: 3986 - protein, 10 aa, Severe acute respiratory syndrome-related coronavirus
  REGION 1..10: note = Table A: HLA-A*68:02H HLA-A*02:05H HLA-A*02:02H
  source 1..10: note = Severe acute respiratory syndrome coronavirus 2
NIFGTVYEKL

SEQ ID NO: 3987 - protein, 10 aa, Severe acute respiratory syndrome-related coronavirus
  REGION 1..10: note = Table A: HLA-A*02:11H
  source 1..10: note = Severe acute respiratory syndrome coronavirus 2
TVYEKLKPVL

SEQ ID NO: 3988 - protein, 10 aa, Severe acute respiratory syndrome-related coronavirus
  REGION 1..10: note = Table A: HLA-B*44:05H
  source 1..10: note = Severe acute respiratory syndrome coronavirus 2
EEKFKEGVEF

SEQ ID NO: 3989 - protein, 10 aa, Severe acute respiratory syndrome-related coronavirus
  REGION 1..10: note = Table A: HLA-A*74:01M HLA-A*31:01H
  source 1..10: note = Severe acute respiratory syndrome coronavirus 2
KFKEGVEFLR

SEQ ID NO: 3990 - protein, 10 aa, Severe acute respiratory syndrome-related coronavirus
  REGION 1..10: note = Table A: HLA-B*50:01H
  source 1..10: note = Severe acute respiratory syndrome coronavirus 2
WEIVKFISTC

SEQ ID NO: 3991 - protein, 10 aa, Severe acute respiratory syndrome-related coronavirus
  REGION 1..10: note = Table A: HLA-B*40:02H HLA-B*41:02H
  source 1..10: note = Severe acute respiratory syndrome coronavirus 2
CEIVGGQIVT

SEQ ID NO: 3992 - protein, 10 aa, Severe acute respiratory syndrome-related coronavirus
  REGION 1..10: note = Table A: HLA-A*25:01H HLA-A*26:01H HLA-A*26:02M HLA-A*26:03M HLA-A*68:02H HLA-A*02:08H HLA-A*34:01H HLA-B*38:02H
  source 1..10: note = Severe acute respiratory syndrome coronavirus 2
EIVGGQIVTC

SEQ ID NO: 3993 - protein, 10 aa, Severe acute respiratory syndrome-related coronavirus
  REGION 1..10: note = Table A: HLA-A*02:08M
  source 1..10: note = Severe acute respiratory syndrome coronavirus 2
IVGGQIVTCA

SEQ ID NO: 3994 - protein, 10 aa, Severe acute respiratory syndrome-related coronavirus
  REGION 1..10: note = Table A: HLA-B*58:01H HLA-B*44:02M HLA-B*44:05H HLA-C*16:04H HLA-B*45:01H HLA-B*44:03H HLA-B*27:02M HLA-A*23:01H HLA-B*40:01H HLA-B*40:02H HLA-B*40:06H HLA-B*15:01H HLA-B*15:03H HLA-B*07:05H HLA-B*41:02M HLA-B*57:03M
  REGION 1..10: note = CONT. FROM ABOVE: HLA-B*13:01H HLA-B*49:01M HLA-B*50:01H
  source 1..10: note = Severe acute respiratory syndrome coronavirus 2
KEIKESVQTF

SEQ ID NO: 3995 - protein, 10 aa, Severe acute respiratory syndrome-related coronavirus
  REGION 1..10: note = Table A: HLA-A*25:01H HLA-A*26:01H HLA-A*26:02H HLA-A*26:03H HLA-A*34:01H HLA-A*34:02H HLA-A*66:01H
  source 1..10: note = Severe acute respiratory syndrome coronavirus 2
EIKESVQTFF

SEQ ID NO: 3996 - protein, 10 aa, Severe acute respiratory syndrome-related coronavirus
  REGION 1..10: note = Table A: HLA-A*68:02H
  source 1..10: note = Severe acute respiratory syndrome coronavirus 2
ESVQTFFKLV

SEQ ID NO: 3997 - protein, 10 aa, Severe acute respiratory syndrome-related coronavirus
  REGION 1..10: note = Table A: HLA-B*57:03H
  source 1..10: note = Severe acute respiratory syndrome coronavirus 2
QTFFKLVNKF

SEQ ID NO: 3998 - protein, 10 aa, Severe acute respiratory syndrome-related coronavirus
  REGION 1..10: note = Table A: HLA-A*36:01H HLA-B*27:02H
  source 1..10: note = Severe acute respiratory syndrome coronavirus 2
ADSIIIGGAK

SEQ ID NO: 3999 - protein, 10 aa, Severe acute respiratory syndrome-related coronavirus
  REGION 1..10: note = Table A: HLA-B*44:05H HLA-A*25:01H HLA-A*33:03H HLA-A*26:01H HLA-A*26:03M HLA-A*68:01M HLA-A*68:02M HLA-C*15:05H HLA-A*34:01H HLA-A*34:02H HLA-C*08:03H HLA-B*07:05H HLA-A*66:01M
  source 1..10: note = Severe acute respiratory syndrome coronavirus 2
DSIIIGGAKL

SEQ ID NO: 4000 - protein, 10 aa, Severe acute respiratory syndrome-related coronavirus
  REGION 1..10: note = Table A: HLA-A*03:02H HLA-A*11:01H HLA-A*11:02H HLA-A*30:01H HLA-A*34:02H
  source 1..10: note = Severe acute respiratory syndrome coronavirus 2
SIIIGGAKLK

SEQ ID NO: 4001 - protein, 10 aa, Severe acute respiratory syndrome-related coronavirus
  REGION 1..10: note = Table A: HLA-B*07:04H
  source 1..10: note = Severe acute respiratory syndrome coronavirus 2
IIGGAKLKAL

SEQ ID NO: 4002 - protein, 10 aa, Severe acute respiratory syndrome-related coronavirus
  REGION 1..10: note = Table A: HLA-B*15:03H
  source 1..10: note = Severe acute respiratory syndrome coronavirus 2
LKALNLGETF

SEQ ID NO: 4003 - protein, 10 aa, Severe acute respiratory syndrome-related coronavirus
  REGION 1..10: note = Table A: HLA-A*02:11H HLA-A*02:06H HLA-B*57:03H
  source 1..10: note = Severe acute respiratory syndrome coronavirus 2
KALNLGETFV

SEQ ID NO: 4004 - protein, 10 aa, Severe acute respiratory syndrome-related coronavirus
  REGION 1..10: note = Table A: HLA-A*26:03H HLA-A*68:01H HLA-A*68:02M HLA-A*34:01M HLA-A*34:02M HLA-A*66:01M
  source 1..10: note = Severe acute respiratory syndrome coronavirus 2
ETFVTHSKGL

SEQ ID NO: 4005 - protein, 10 aa, Severe acute respiratory syndrome-related coronavirus
  REGION 1..10: note = Table A: HLA-A*29:02M HLA-A*30:02M
  source 1..10: note = Severe acute respiratory syndrome coronavirus 2
TFVTHSKGLY

SEQ ID NO: 4006 - protein, 10 aa, Severe acute respiratory syndrome-related coronavirus
  REGION 1..10: note = Table A: HLA-A*33:03H HLA-A*26:03H HLA-A*34:01M HLA-A*34:02H HLA-A*66:01M
  source 1..10: note = Severe acute respiratory syndrome coronavirus 2
FVTHSKGLYR

SEQ ID NO: 4007 - protein, 10 aa, Severe acute respiratory syndrome-related coronavirus
  REGION 1..10: note = Table A: HLA-A*11:01H HLA-A*11:02H HLA-A*34:02H
  source 1..10: note = Severe acute respiratory syndrome coronavirus 2
VTHSKGLYRK

SEQ ID NO: 4008 - protein, 10 aa, Severe acute respiratory syndrome-related coronavirus
  REGION 1..10: note = Table A: HLA-B*58:01H HLA-B*58:02M HLA-A*36:01H HLA-B*57:01H HLA-A*30:01H HLA-C*15:05H HLA-C*15:02H HLA-B*57:03H
  source 1..10: note = Severe acute respiratory syndrome coronavirus 2
KSREETGLLM

SEQ ID NO: 4009 - protein, 10 aa, Severe acute respiratory syndrome-related coronavirus
  REGION 1..10: note = Table A: HLA-B*40:01M
  source 1..10: note = Severe acute respiratory syndrome coronavirus 2
REETGLLMPL

SEQ ID NO: 4010 - protein, 10 aa, Severe acute respiratory syndrome-related coronavirus
  REGION 1..10: note = Table A: HLA-B*53:01H HLA-B*51:01H
  source 1..10: note = Severe acute respiratory syndrome coronavirus 2
MPLKAPKEII

SEQ ID NO: 4011 - protein, 10 aa, Severe acute respiratory syndrome-related coronavirus
  REGION 1..10: note = Table A: HLA-B*56:01H HLA-B*55:02H HLA-B*55:01H HLA-B*54:01H
  source 1..10: note = Severe acute respiratory syndrome coronavirus 2
APKEIIFLEG

SEQ ID NO: 4012 - protein, 10 aa, Severe acute respiratory syndrome-related coronavirus
  REGION 1..10: note = Table A: HLA-A*68:02M HLA-B*38:01H HLA-B*39:01H
  source 1..10: note = Severe acute respiratory syndrome coronavirus 2
EIIFLEGETL

SEQ ID NO: 4013 - protein, 10 aa, Severe acute respiratory syndrome-related coronavirus
  REGION 1..10: note = Table A: HLA-B*55:02H HLA-B*54:01H
  source 1..10: note = Severe acute respiratory syndrome coronavirus 2
LPTEVLTEEV

SEQ ID NO: 4014 - protein, 10 aa, Severe acute respiratory syndrome-related coronavirus
  REGION 1..10: note = Table A: HLA-B*44:05H HLA-B*40:01M HLA-B*40:02H
  source 1..10: note = Severe acute respiratory syndrome coronavirus 2
TEVLTEEVVL

SEQ ID NO: 4015 - protein, 10 aa, Severe acute respiratory syndrome-related coronavirus
  REGION 1..10: note = Table A: HLA-A*68:01H HLA-A*34:02M
  source 1..10: note = Severe acute respiratory syndrome coronavirus 2
EVLTEEVVLK

SEQ ID NO: 4016 - protein, 10 aa, Severe acute respiratory syndrome-related coronavirus
  REGION 1..10: note = Table A: HLA-B*44:05H
  source 1..10: note = Severe acute respiratory syndrome coronavirus 2
EEVVLKTGDL

SEQ ID NO: 4017 - protein, 10 aa, Severe acute respiratory syndrome-related coronavirus
  REGION 1..10: note = Table A: HLA-A*02:02H HLA-A*02:03H HLA-B*38:02H
  source 1..10: note = Severe acute respiratory syndrome coronavirus 2
VLKTGDLQPL

SEQ ID NO: 4018 - protein, 10 aa, Severe acute respiratory syndrome-related coronavirus
  REGION 1..10: note = Table A: HLA-C*08:03H
  source 1..10: note = Severe acute respiratory syndrome coronavirus 2
GDLQPLEQPT

SEQ ID NO: 4019 - protein, 10 aa, Severe acute respiratory syndrome-related coronavirus
  REGION 1..10: note = Table A: HLA-B*56:01H HLA-B*55:02M HLA-C*15:05H HLA-B*55:01H HLA-B*54:01H
  source 1..10: note = Severe acute respiratory syndrome coronavirus 2
QPLEQPTSEA

SEQ ID NO: 4020 - protein, 10 aa, Severe acute respiratory syndrome-related coronavirus
  REGION 1..10: note = Table A: HLA-A*68:02H
  source 1..10: note = Severe acute respiratory syndrome coronavirus 2
PTSEAVEAPL

SEQ ID NO: 4021 - protein, 10 aa, Severe acute respiratory syndrome-related coronavirus
  REGION 1..10: note = Table A: HLA-B*44:05H HLA-B*45:01H HLA-A*68:02H HLA-C*08:03H HLA-B*40:01H HLA-B*40:02M HLA-B*40:06H HLA-B*07:05H HLA-B*41:02H HLA-B*49:01M HLA-B*50:01M
  source 1..10: note = Severe acute respiratory syndrome coronavirus 2
VEAPLVGTPV

SEQ ID NO: 4022 - protein, 10 aa, Severe acute respiratory syndrome-related coronavirus
  REGION 1..10: note = Table A: HLA-B*55:02H HLA-C*15:05M HLA-B*07:05H
  source 1..10: note = Severe acute respiratory syndrome coronavirus 2
APLVGTPVCI

SEQ ID NO: 4023 - protein, 10 aa, Severe acute respiratory syndrome-related coronavirus
  REGION 1..10: note = Table A: HLA-B*27:02H HLA-A*34:02H
  source 1..10: note = Severe acute respiratory syndrome coronavirus 2
MLLEIKDTEK

SEQ ID NO: 4024 - protein, 10 aa, Severe acute respiratory syndrome-related coronavirus
  REGION 1..10: note = Table A: HLA-A*36:01H HLA-A*01:01M
  source 1..10: note = Severe acute respiratory syndrome coronavirus 2
LLEIKDTEKY

SEQ ID NO: 4025 - protein, 10 aa, Severe acute respiratory syndrome-related coronavirus
  REGION 1..10: note = Table A: HLA-B*38:02H
  source 1..10: note = Severe acute respiratory syndrome coronavirus 2
MMVTNNTFTL

SEQ ID NO: 4026 - protein, 10 aa, Severe acute respiratory syndrome-related coronavirus
  REGION 1..10: note = Table A: HLA-A*11:303H HLA-A*03:01H HLA-A*03:02H HLA-A*11:01M HLA-A*11:02H HLA-A*36:01H HLA-A*68:01M HLA-A*68:02H HLA-A*34:01H HLA-A*34:02H HLA-A*66:01H
  source 1..10: note = Severe acute respiratory syndrome coronavirus 2
MVTNNTFTLK

SEQ ID NO: 4027 - protein, 10 aa, Severe acute respiratory syndrome-related coronavirus
  REGION 1..10: note = Table A: HLA-A*11:01H HLA-A*36:01H HLA-A*34:02H
  source 1..10: note = Severe acute respiratory syndrome coronavirus 2
VTNNTFTLKG

SEQ ID NO: 4028 - protein, 10 aa, Severe acute respiratory syndrome-related coronavirus
  REGION 1..10: note = Table A: HLA-A*11:01H HLA-A*11:02H HLA-A*34:02M
  source 1..10: note = Severe acute respiratory syndrome coronavirus 2
FTLKGGAPTK

SEQ ID NO: 4029 - protein, 10 aa, Severe acute respiratory syndrome-related coronavirus
  REGION 1..10: note = Table A: HLA-A*02:02H HLA-A*02:03M HLA-B*38:02H
  source 1..10: note = Severe acute respiratory syndrome coronavirus 2
TLKGGAPTKV

SEQ ID NO: 4030 - protein, 10 aa, Severe acute respiratory syndrome-related coronavirus
  REGION 1..10: note = Table A: HLA-B*57:03M
  source 1..10: note = Severe acute respiratory syndrome coronavirus 2
KGGAPTKVTF

SEQ ID NO: 4031 - protein, 10 aa, Severe acute respiratory syndrome-related coronavirus
  REGION 1..10: note = Table A: HLA-A*34:02M
  source 1..10: note = Severe acute respiratory syndrome coronavirus 2
DTVIEVQGYK

SEQ ID NO: 4032 - protein, 10 aa, Severe acute respiratory syndrome-related coronavirus
  REGION 1..10: note = Table A: HLA-B*57:03M
  source 1..10: note = Severe acute respiratory syndrome coronavirus 2
QGYKSVNITF

SEQ ID NO: 4033 - protein, 10 aa, Severe acute respiratory syndrome-related coronavirus
  REGION 1..10: note = Table A: HLA-B*49:01H
  source 1..10: note = Severe acute respiratory syndrome coronavirus 2
FELDERIDKV

SEQ ID NO: 4034 - protein, 10 aa, Severe acute respiratory syndrome-related coronavirus
  REGION 1..10: note = Table A: HLA-A*34:02H
  source 1..10: note = Severe acute respiratory syndrome coronavirus 2
ERIDKVLNEK

SEQ ID NO: 4035 - protein, 10 aa, Severe acute respiratory syndrome-related coronavirus
  REGION 1..10: note = Table A: HLA-A*30:02H HLA-B*15:01H
  source 1..10: note = Severe acute respiratory syndrome coronavirus 2
KVLNEKCSAY

SEQ ID NO: 4036 - protein, 10 aa, Severe acute respiratory syndrome-related coronavirus
  REGION 1..10: note = Table A: HLA-B*44:02M HLA-B*44:05H HLA-C*16:04H HLA-B*44:03M HLA-B*18:01H HLA-B*27:02H HLA-A*24:02H HLA-A*23:01M HLA-B*40:01H HLA-B*40:02H HLA-B*39:01H HLA-B*07:05H HLA-B*41:02H
  source 1..10: note = Severe acute respiratory syndrome coronavirus 2
VELGTEVNEF

SEQ ID NO: 4037 - protein, 10 aa, Severe acute respiratory syndrome-related coronavirus
  REGION 1..10: note = Table A: HLA-B*49:01H
  source 1..10: note = Severe acute respiratory syndrome coronavirus 2
TEVNEFACVV

SEQ ID NO: 4038 - protein, 10 aa, Severe acute respiratory syndrome-related coronavirus
  REGION 1..10: note = Table A: HLA-A*11:303H HLA-A*25:01M HLA-A*26:02H HLA-A*26:03H HLA-A*02:11H HLA-A*68:01H HLA-A*68:02M HLA-C*15:05H HLA-A*02:04H HLA-A*02:05H HLA-A*02:06M HLA-A*02:08H HLA-A*02:01H HLA-A*02:02M HLA-A*02:03M
  REGION 1..10: note = CONT. FROM ABOVE: HLA-C*08:01H HLA-B*38:02H HLA-B*07:04H HLA- B*57:03H
  source 1..10: note = Severe acute respiratory syndrome coronavirus 2
VVADAVIKTL

SEQ ID NO: 4039 - protein, 10 aa, Severe acute respiratory syndrome-related coronavirus
  REGION 1..10: note = Table A: HLA-B*58:02H HLA-A*02:08H HLA-B*57:03H
  source 1..10: note = Severe acute respiratory syndrome coronavirus 2
KTLQPVSELL

SEQ ID NO: 4040 - protein, 10 aa, Severe acute respiratory syndrome-related coronavirus
  REGION 1..10: note = Table A: HLA-B*35:03H HLA-C*15:05H HLA-B*35:01H HLA-B*35:07H
  source 1..10: note = Severe acute respiratory syndrome coronavirus 2
QPVSELLTPL

SEQ ID NO: 4041 - protein, 10 aa, Severe acute respiratory syndrome-related coronavirus
  REGION 1..10: note = Table A: HLA-B*27:02H HLA-B*53:01H HLA-B*35:03H HLA-B*35:01H HLA-B*35:02H HLA-B*35:08M HLA-B*35:07H HLA-C*08:01H HLA-B*35:12H HLA-B*38:02H
  source 1..10: note = Severe acute respiratory syndrome coronavirus 2
TPLGIDLDEW

SEQ ID NO: 4042 - protein, 10 aa, Severe acute respiratory syndrome-related coronavirus
  REGION 1..10: note = Table A: HLA-B*38:02H
  source 1..10: note = Severe acute respiratory syndrome coronavirus 2
DLDEWSMATY

SEQ ID NO: 4043 - protein, 10 aa, Severe acute respiratory syndrome-related coronavirus
  REGION 1..10: note = Table A: HLA-C*14:02H HLA-C*14:03H HLA-A*29:02H HLA-B*27:02H HLA-A*24:02H HLA-C*08:01H HLA-A*23:01H
  source 1..10: note = Severe acute respiratory syndrome coronavirus 2
YYLFDESGEF

SEQ ID NO: 4044 - protein, 10 aa, Severe acute respiratory syndrome-related coronavirus
  REGION 1..10: note = Table A: HLA-A*36:01H HLA-B*27:02M HLA-A*02:05H HLA-A*02:02H HLA-A*34:01H HLA-A*34:02H HLA-B*38:02H
  source 1..10: note = Severe acute respiratory syndrome coronavirus 2
YLFDESGEFK

SEQ ID NO: 4045 - protein, 10 aa, Severe acute respiratory syndrome-related coronavirus
  REGION 1..10: note = Table A: HLA-C*04:01H HLA-C*04:03M HLA-A*02:07H HLA-C*08:01H HLA-B*38:02H
  source 1..10: note = Severe acute respiratory syndrome coronavirus 2
LFDESGEFKL

SEQ ID NO: 4046 - protein, 10 aa, Severe acute respiratory syndrome-related coronavirus
  REGION 1..10: note = Table A: HLA-B*44:02H HLA-B*44:05H HLA-B*44:03H HLA-B*18:01H HLA-A*30:02H HLA-B*40:02H
  source 1..10: note = Severe acute respiratory syndrome coronavirus 2
GEFKLASHMY

SEQ ID NO: 4047 - protein, 10 aa, Severe acute respiratory syndrome-related coronavirus
  REGION 1..10: note = Table A: HLA-B*44:03H
  source 1..10: note = Severe acute respiratory syndrome coronavirus 2
EEEFEPSTQY

SEQ ID NO: 4048 - protein, 10 aa, Severe acute respiratory syndrome-related coronavirus
  REGION 1..10: note = Table A: HLA-A*29:01H HLA-A*29:02H HLA-B*39:01H
  source 1..10: note = Severe acute respiratory syndrome coronavirus 2
EFEPSTQYEY

SEQ ID NO: 4049 - protein, 10 aa, Severe acute respiratory syndrome-related coronavirus
  REGION 1..10: note = Table A: HLA-B*39:01H
  source 1..10: note = Severe acute respiratory syndrome coronavirus 2
QYEYGTEDDY

SEQ ID NO: 4050 - protein, 10 aa, Severe acute respiratory syndrome-related coronavirus
  REGION 1..10: note = Table A: HLA-B*44:05H HLA-B*40:01H HLA-B*40:02H HLA-B*41:02H
  source 1..10: note = Severe acute respiratory syndrome coronavirus 2
TEDDYQGKPL

SEQ ID NO: 4051 - protein, 10 aa, Severe acute respiratory syndrome-related coronavirus
  REGION 1..10: note = Table A: HLA-A*25:01H HLA-A*33:01H HLA-A*26:01H HLA-A*26:02H HLA-A*26:03H HLA-B*18:01M HLA-B*27:02H HLA-A*68:02H HLA-B*14:02H HLA-C*08:03H HLA-B*38:02H HLA-B*39:01H HLA-B*07:05H
  source 1..10: note = Severe acute respiratory syndrome coronavirus 2
DDYQGKPLEF

SEQ ID NO: 4052 - protein, 10 aa, Severe acute respiratory syndrome-related coronavirus
  REGION 1..10: note = Table A: HLA-B*56:01H HLA-B*55:02H HLA-C*15:05M HLA-B*55:01H HLA-A*02:08H HLA-B*39:06M HLA-B*40:06H HLA-B*54:01H HLA-B*07:02H HLA-B*07:05M HLA-B*50:01M
  source 1..10: note = Severe acute respiratory syndrome coronavirus 2
KPLEFGATSA

SEQ ID NO: 4053 - protein, 10 aa, Severe acute respiratory syndrome-related coronavirus
  REGION 1..10: note = Table A: HLA-B*40:01H
  source 1..10: note = Severe acute respiratory syndrome coronavirus 2
LEFGATSAAL

SEQ ID NO: 4054 - protein, 10 aa, Severe acute respiratory syndrome-related coronavirus
  REGION 1..10: note = Table A: HLA-B*53:01H
  source 1..10: note = Severe acute respiratory syndrome coronavirus 2
QPEEEQEEDW

SEQ ID NO: 4055 - protein, 10 aa, Severe acute respiratory syndrome-related coronavirus
  REGION 1..10: note = Table A: HLA-A*02:07H HLA-A*02:01M HLA-C*08:02H HLA-B*38:02H
  source 1..10: note = Severe acute respiratory syndrome coronavirus 2
WLDDDSQQTV

SEQ ID NO: 4056 - protein, 10 aa, Severe acute respiratory syndrome-related coronavirus
  REGION 1..10: note = Table A: HLA-A*68:02H
  source 1..10: note = Severe acute respiratory syndrome coronavirus 2
TTTIQTIVEV

SEQ ID NO: 4057 - protein, 10 aa, Severe acute respiratory syndrome-related coronavirus
  REGION 1..10: note = Table A: HLA-A*02:05H HLA-A*02:06H HLA-A*02:08H HLA-B*57:03M
  source 1..10: note = Severe acute respiratory syndrome coronavirus 2
QTIVEVQPQL

SEQ ID NO: 4058 - protein, 10 aa, Severe acute respiratory syndrome-related coronavirus
  REGION 1..10: note = Table A: HLA-B*44:05H HLA-B*49:01M
  source 1..10: note = Severe acute respiratory syndrome coronavirus 2
MELTPVVQTI

SEQ ID NO: 4059 - protein, 10 aa, Severe acute respiratory syndrome-related coronavirus
  REGION 1..10: note = Table A: HLA-B*15:01H
  source 1..10: note = Severe acute respiratory syndrome coronavirus 2
VVQTIEVNSF

SEQ ID NO: 4060 - protein, 10 aa, Severe acute respiratory syndrome-related coronavirus
  REGION 1..10: note = Table A: HLA-A*36:01H HLA-A*01:01H
  source 1..10: note = Severe acute respiratory syndrome coronavirus 2
TIEVNSFSGY

SEQ ID NO: 4061 - protein, 10 aa, Severe acute respiratory syndrome-related coronavirus
  REGION 1..10: note = Table A: HLA-B*49:01H
  source 1..10: note = Severe acute respiratory syndrome coronavirus 2
IEVNSFSGYL

SEQ ID NO: 4062 - protein, 10 aa, Severe acute respiratory syndrome-related coronavirus
  REGION 1..10: note = Table A: HLA-A*03:02M HLA-A*11:01H HLA-A*11:02H HLA-A*36:01H HLA-A*33:01H HLA-A*33:03M HLA-A*26:03H HLA-B*27:02H HLA-A*68:01M HLA-A*68:02H HLA-A*34:01M HLA-A*34:02H HLA-A*66:01H
  source 1..10: note = Severe acute respiratory syndrome coronavirus 2
EVNSFSGYLK

SEQ ID NO: 4063 - protein, 10 aa, Severe acute respiratory syndrome-related coronavirus
  REGION 1..10: note = Table A: HLA-B*27:02H HLA-A*30:02H
  source 1..10: note = Severe acute respiratory syndrome coronavirus 2
GYLKLTDNVY

SEQ ID NO: 4064 - protein, 10 aa, Severe acute respiratory syndrome-related coronavirus
  REGION 1..10: note = Table A: HLA-A*03:02H HLA-B*27:02H
  source 1..10: note = Severe acute respiratory syndrome coronavirus 2
KNADIVEEAK

SEQ ID NO: 4065 - protein, 10 aa, Severe acute respiratory syndrome-related coronavirus
  REGION 1..10: note = Table A: HLA-B*56:01H HLA-B*55:02M HLA-A*30:01M HLA-B*55:01M HLA-A*02:05M HLA-A*02:08H HLA-A*02:02H HLA-A*02:03H HLA-B*07:04H HLA-A*31:01H
  source 1..10: note = Severe acute respiratory syndrome coronavirus 2
KVKPTVVVNA

SEQ ID NO: 4066 - protein, 10 aa, Severe acute respiratory syndrome-related coronavirus
  REGION 1..10: note = Table A: HLA-B*35:01H HLA-B*38:02H HLA-B*15:02M
  source 1..10: note = Severe acute respiratory syndrome coronavirus 2
TVVVNAANVY

SEQ ID NO: 4067 - protein, 10 aa, Severe acute respiratory syndrome-related coronavirus
  REGION 1..10: note = Table A: HLA-A*02:08H
  source 1..10: note = Severe acute respiratory syndrome coronavirus 2
VVVNAANVYL

SEQ ID NO: 4068 - protein, 10 aa, Severe acute respiratory syndrome-related coronavirus
  REGION 1..10: note = Table A: HLA-A*11:303H HLA-A*03:01H HLA-A*03:02H HLA-A*11:01M HLA-A*11:02M HLA-A*36:01H HLA-A*34:02H HLA-C*07:27H
  source 1..10: note = Severe acute respiratory syndrome coronavirus 2
VVNAANVYLK

SEQ ID NO: 4069 - protein, 10 aa, Severe acute respiratory syndrome-related coronavirus
  REGION 1..10: note = Table A: HLA-B*38:02H HLA-B*39:01H
  source 1..10: note = Severe acute respiratory syndrome coronavirus 2
KHGGGVAGAL

SEQ ID NO: 4070 - protein, 10 aa, Severe acute respiratory syndrome-related coronavirus
  REGION 1..10: note = Table A: HLA-A*03:02H HLA-A*36:01H HLA-B*27:02H
  source 1..10: note = Severe acute respiratory syndrome coronavirus 2
GGGVAGALNK

SEQ ID NO: 4071 - protein, 10 aa, Severe acute respiratory syndrome-related coronavirus
  REGION 1..10: note = Table A: HLA-A*02:05H
  source 1..10: note = Severe acute respiratory syndrome coronavirus 2
GGVAGALNKA

SEQ ID NO: 4072 - protein, 10 aa, Severe acute respiratory syndrome-related coronavirus
  REGION 1..10: note = Table A: HLA-C*08:03H
  source 1..10: note = Severe acute respiratory syndrome coronavirus 2
GVAGALNKAT

SEQ ID NO: 4073 - protein, 10 aa, Severe acute respiratory syndrome-related coronavirus
  REGION 1..10: note = Table A: HLA-A*11:303H HLA-C*15:05H HLA-A*02:02M HLA-B*38:02H HLA-B*15:01M HLA-B*15:02H
  source 1..10: note = Severe acute respiratory syndrome coronavirus 2
ALNKATNNAM

SEQ ID NO: 4074 - protein, 10 aa, Severe acute respiratory syndrome-related coronavirus
  REGION 1..10: note = Table A: HLA-A*11:01H
  source 1..10: note = Severe acute respiratory syndrome coronavirus 2
ATNNAMQVES

SEQ ID NO: 4075 - protein, 10 aa, Severe acute respiratory syndrome-related coronavirus
  REGION 1..10: note = Table A: HLA-B*35:01M HLA-B*35:08M HLA-B*35:07H HLA-B*39:01H
  source 1..10: note = Severe acute respiratory syndrome coronavirus 2
NAMQVESDDY

SEQ ID NO: 4076 - protein, 10 aa, Severe acute respiratory syndrome-related coronavirus
  REGION 1..10: note = Table A: HLA-B*35:02H
  source 1..10: note = Severe acute respiratory syndrome coronavirus 2
MQVESDDYIA

SEQ ID NO: 4077 - protein, 10 aa, Severe acute respiratory syndrome-related coronavirus
  REGION 1..10: note = Table A: HLA-A*11:01H HLA-A*36:01H HLA-A*33:01H HLA-A*33:03H HLA-A*34:02H
  source 1..10: note = Severe acute respiratory syndrome coronavirus 2
DYIATNGPLK

SEQ ID NO: 4078 - protein, 10 aa, Severe acute respiratory syndrome-related coronavirus
  REGION 1..10: note = Table A: HLA-A*02:11H HLA-A*68:02H HLA-A*02:05H HLA-A*02:02H HLA-A*02:03M HLA-B*38:02H HLA-B*13:02H
  source 1..10: note = Severe acute respiratory syndrome coronavirus 2
YIATNGPLKV

SEQ ID NO: 4079 - protein, 10 aa, Severe acute respiratory syndrome-related coronavirus
  REGION 1..10: note = Table A: HLA-A*74:01H HLA-A*11:01H HLA-A*68:01H HLA-A*31:01H
  source 1..10: note = Severe acute respiratory syndrome coronavirus 2
ATNGPLKVGG

SEQ ID NO: 4080 - protein, 10 aa, Severe acute respiratory syndrome-related coronavirus
  REGION 1..10: note = Table A: HLA-C*15:05M HLA-B*07:05H
  source 1..10: note = Severe acute respiratory syndrome coronavirus 2
GPLKVGGSCV

SEQ ID NO: 4081 - protein, 10 aa, Severe acute respiratory syndrome-related coronavirus
  REGION 1..10: note = Table A: HLA-C*08:03H
  source 1..10: note = Severe acute respiratory syndrome coronavirus 2
GSCVLSGHNL

SEQ ID NO: 4082 - protein, 10 aa, Severe acute respiratory syndrome-related coronavirus
  REGION 1..10: note = Table A: HLA-A*03:01H HLA-A*03:02H HLA-A*11:01H HLA-A*11:02M HLA-A*34:02H
  source 1..10: note = Severe acute respiratory syndrome coronavirus 2
CVLSGHNLAK

SEQ ID NO: 4083 - protein, 10 aa, Severe acute respiratory syndrome-related coronavirus
  REGION 1..10: note = Table A: HLA-A*26:03H HLA-A*68:01H HLA-A*02:08H HLA-A*34:01H
  source 1..10: note = Severe acute respiratory syndrome coronavirus 2
HVVGPNVNKG

SEQ ID NO: 4084 - protein, 10 aa, Severe acute respiratory syndrome-related coronavirus
  REGION 1..10: note = Table A: HLA-A*02:08H HLA-B*35:02H HLA-B*35:12H
  source 1..10: note = Severe acute respiratory syndrome coronavirus 2
NVNKGEDIQL

SEQ ID NO: 4085 - protein, 10 aa, Severe acute respiratory syndrome-related coronavirus
  REGION 1..10: note = Table A: HLA-B*45:01H HLA-B*50:01M
  source 1..10: note = Severe acute respiratory syndrome coronavirus 2
GEDIQLLKSA

SEQ ID NO: 4086 - protein, 10 aa, Severe acute respiratory syndrome-related coronavirus
  REGION 1..10: note = Table A: HLA-B*44:02H HLA-B*44:03H HLA-B*18:01H HLA-B*35:01H
  source 1..10: note = Severe acute respiratory syndrome coronavirus 2
EDIQLLKSAY

SEQ ID NO: 4087 - protein, 10 aa, Severe acute respiratory syndrome-related coronavirus
  REGION 1..10: note = Table A: HLA-B*45:01H HLA-C*08:03H HLA-B*39:01H
  source 1..10: note = Severe acute respiratory syndrome coronavirus 2
AYENFNQHEV

SEQ ID NO: 4088 - protein, 10 aa, Severe acute respiratory syndrome-related coronavirus
  REGION 1..10: note = Table A: HLA-B*44:05H HLA-B*40:01M HLA-B*40:02M HLA-B*41:02H HLA-B*49:01H
  source 1..10: note = Severe acute respiratory syndrome coronavirus 2
YENFNQHEVL

SEQ ID NO: 4089 - protein, 10 aa, Severe acute respiratory syndrome-related coronavirus
  REGION 1..10: note = Table A: HLA-A*68:02M
  source 1..10: note = Severe acute respiratory syndrome coronavirus 2
ENFNQHEVLL

SEQ ID NO: 4090 - protein, 10 aa, Severe acute respiratory syndrome-related coronavirus
  REGION 1..10: note = Table A: HLA-B*38:01M HLA-B*38:02H HLA-B*39:01H HLA-B*15:10H
  source 1..10: note = Severe acute respiratory syndrome coronavirus 2
QHEVLLAPLL

SEQ ID NO: 4091 - protein, 10 aa, Severe acute respiratory syndrome-related coronavirus
  REGION 1..10: note = Table A: HLA-B*54:01H
  source 1..10: note = Severe acute respiratory syndrome coronavirus 2
EVLLAPLLSA

SEQ ID NO: 4092 - protein, 10 aa, Severe acute respiratory syndrome-related coronavirus
  REGION 1..10: note = Table A: HLA-A*02:11H HLA-A*02:02H
  source 1..10: note = Severe acute respiratory syndrome coronavirus 2
LLAPLLSAGI

SEQ ID NO: 4093 - protein, 10 aa, Severe acute respiratory syndrome-related coronavirus
  REGION 1..10: note = Table A: HLA-C*14:02H HLA-C*14:03H
  source 1..10: note = Severe acute respiratory syndrome coronavirus 2
IFGADPIHSL

SEQ ID NO: 4094 - protein, 10 aa, Severe acute respiratory syndrome-related coronavirus
  REGION 1..10: note = Table A: HLA-A*33:03H HLA-A*68:01H HLA-A*68:02H HLA-A*34:01M HLA-A*34:02H HLA-A*66:01M
  source 1..10: note = Severe acute respiratory syndrome coronavirus 2
FGADPIHSLR

SEQ ID NO: 4095 - protein, 10 aa, Severe acute respiratory syndrome-related coronavirus
  REGION 1..10: note = Table A: HLA-A*36:01H HLA-A*01:01H
  source 1..10: note = Severe acute respiratory syndrome coronavirus 2
CVDTVRTNVY

SEQ ID NO: 4096 - protein, 10 aa, Severe acute respiratory syndrome-related coronavirus
  REGION 1..10: note = Table A: HLA-A*68:02H
  source 1..10: note = Severe acute respiratory syndrome coronavirus 2
DTVRTNVYLA

SEQ ID NO: 4097 - protein, 10 aa, Severe acute respiratory syndrome-related coronavirus
  REGION 1..10: note = Table A: HLA-A*36:01H HLA-A*29:02H HLA-B*38:02H HLA-B*15:01H HLA-B*15:02H
  source 1..10: note = Severe acute respiratory syndrome coronavirus 2
YLAVFDKNLY

SEQ ID NO: 4098 - protein, 10 aa, Severe acute respiratory syndrome-related coronavirus
  REGION 1..10: note = Table A: HLA-A*11:303H HLA-A*03:01H HLA-A*03:02H HLA-A*11:01M HLA-A*11:02H HLA-A*30:02H HLA-A*34:02H HLA-C*07:27H
  source 1..10: note = Severe acute respiratory syndrome coronavirus 2
AVFDKNLYDK

SEQ ID NO: 4099 - protein, 10 aa, Severe acute respiratory syndrome-related coronavirus
  REGION 1..10: note = Table A: HLA-C*04:01H HLA-C*04:03H
  source 1..10: note = Severe acute respiratory syndrome coronavirus 2
VFDKNLYDKL

SEQ ID NO: 4100 - protein, 10 aa, Severe acute respiratory syndrome-related coronavirus
  REGION 1..10: note = Table A: HLA-A*25:01M HLA-B*46:01H HLA-A*26:01H HLA-A*26:02H HLA-A*02:02H HLA-A*02:03H HLA-B*38:02M HLA-B*15:02M
  source 1..10: note = Severe acute respiratory syndrome coronavirus 2
NLYDKLVSSF

SEQ ID NO: 4101 - protein, 10 aa, Severe acute respiratory syndrome-related coronavirus
  REGION 1..10: note = Table A: HLA-C*04:03H
  source 1..10: note = Severe acute respiratory syndrome coronavirus 2
LYDKLVSSFL

SEQ ID NO: 4102 - protein, 10 aa, Severe acute respiratory syndrome-related coronavirus
  REGION 1..10: note = Table A: HLA-A*36:01H
  source 1..10: note = Severe acute respiratory syndrome coronavirus 2
KLVSSFLEMK

SEQ ID NO: 4103 - protein, 10 aa, Severe acute respiratory syndrome-related coronavirus
  REGION 1..10: note = Table A: HLA-A*11:01H HLA-A*11:02H
  source 1..10: note = Severe acute respiratory syndrome coronavirus 2
SSFLEMKSEK

SEQ ID NO: 4104 - protein, 10 aa, Severe acute respiratory syndrome-related coronavirus
  REGION 1..10: note = Table A: HLA-B*57:03H
  source 1..10: note = Severe acute respiratory syndrome coronavirus 2
KSEKQVEQKI

SEQ ID NO: 4105 - protein, 10 aa, Severe acute respiratory syndrome-related coronavirus
  REGION 1..10: note = Table A: HLA-B*45:01H HLA-B*40:06H HLA-B*41:02H
  source 1..10: note = Severe acute respiratory syndrome coronavirus 2
SEKQVEQKIA

SEQ ID NO: 4106 - protein, 10 aa, Severe acute respiratory syndrome-related coronavirus
  REGION 1..10: note = Table A: HLA-A*02:11H HLA-A*02:05H HLA-A*02:06H HLA-A*02:08M HLA-B*38:02H HLA-B*13:01H HLA-B*13:02M
  source 1..10: note = Severe acute respiratory syndrome coronavirus 2
KQVEQKIAEI

SEQ ID NO: 4107 - protein, 10 aa, Severe acute respiratory syndrome-related coronavirus
  REGION 1..10: note = Table A: HLA-A*02:11H HLA-A*68:02H HLA-A*02:05M HLA-A*02:06H HLA-A*02:07H HLA-A*02:08M HLA-A*02:01M HLA-A*02:02H HLA-A*02:03H HLA-C*08:01H HLA-C*08:03H HLA-B*38:02H HLA-B*13:02M
  source 1..10: note = Severe acute respiratory syndrome coronavirus 2
KIAEIPKEEV

SEQ ID NO: 4108 - protein, 10 aa, Severe acute respiratory syndrome-related coronavirus
  REGION 1..10: note = Table A: HLA-B*45:01M HLA-B*40:06H HLA-B*50:01H
  source 1..10: note = Severe acute respiratory syndrome coronavirus 2
AEIPKEEVKP

SEQ ID NO: 4109 - protein, 10 aa, Severe acute respiratory syndrome-related coronavirus
  REGION 1..10: note = Table A: HLA-A*25:01H HLA-A*26:03H
  source 1..10: note = Severe acute respiratory syndrome coronavirus 2
EIPKEEVKPF

SEQ ID NO: 4110 - protein, 10 aa, Severe acute respiratory syndrome-related coronavirus
  REGION 1..10: note = Table A: HLA-B*07:04H
  source 1..10: note = Severe acute respiratory syndrome coronavirus 2
IPKEEVKPFI

SEQ ID NO: 4111 - protein, 10 aa, Severe acute respiratory syndrome-related coronavirus
  REGION 1..10: note = Table A: HLA-A*33:03H HLA-A*26:03H HLA-A*68:01H HLA-A*34:01H HLA-A*34:02H HLA-A*66:01M
  source 1..10: note = Severe acute respiratory syndrome coronavirus 2
EVKPFITESK

SEQ ID NO: 4112 - protein, 10 aa, Severe acute respiratory syndrome-related coronavirus
  REGION 1..10: note = Table A: HLA-A*11:303H HLA-C*08:01H HLA-B*38:02H
  source 1..10: note = Severe acute respiratory syndrome coronavirus 2
ACVEEVTTTL

SEQ ID NO: 4113 - protein, 10 aa, Severe acute respiratory syndrome-related coronavirus
  REGION 1..10: note = Table A: HLA-B*27:02H HLA-A*68:01H HLA-A*68:02H HLA-A*34:02H
  source 1..10: note = Severe acute respiratory syndrome coronavirus 2
EVTTTLEETK

SEQ ID NO: 4114 - protein, 10 aa, Severe acute respiratory syndrome-related coronavirus
  REGION 1..10: note = Table A: HLA-B*58:01H HLA-B*57:01H HLA-B*57:03M
  source 1..10: note = Severe acute respiratory syndrome coronavirus 2
VTTTLEETKF

SEQ ID NO: 4115 - protein, 10 aa, Severe acute respiratory syndrome-related coronavirus
  REGION 1..10: note = Table A: HLA-B*44:05H
  source 1..10: note = Severe acute respiratory syndrome coronavirus 2
EETKFLTENL

SEQ ID NO: 4116 - protein, 10 aa, Severe acute respiratory syndrome-related coronavirus
  REGION 1..10: note = Table A: HLA-A*68:02H
  source 1..10: note = Severe acute respiratory syndrome coronavirus 2
ETKFLTENLL

SEQ ID NO: 4117 - protein, 10 aa, Severe acute respiratory syndrome-related coronavirus
  REGION 1..10: note = Table A: HLA-A*36:01H HLA-A*29:02M
  source 1..10: note = Severe acute respiratory syndrome coronavirus 2
KFLTENLLLY

SEQ ID NO: 4118 - protein, 10 aa, Severe acute respiratory syndrome-related coronavirus
  REGION 1..10: note = Table A: HLA-A*02:04M HLA-A*02:01H
  source 1..10: note = Severe acute respiratory syndrome coronavirus 2
FLTENLLLYI

SEQ ID NO: 4119 - protein, 10 aa, Severe acute respiratory syndrome-related coronavirus
  REGION 1..10: note = Table A: HLA-A*02:02H
  source 1..10: note = Severe acute respiratory syndrome coronavirus 2
LLYIDINGNL

SEQ ID NO: 4120 - protein, 10 aa, Severe acute respiratory syndrome-related coronavirus
  REGION 1..10: note = Table A: HLA-C*14:03H HLA-A*23:01H
  source 1..10: note = Severe acute respiratory syndrome coronavirus 2
LYIDINGNLH

SEQ ID NO: 4121 - protein, 10 aa, Severe acute respiratory syndrome-related coronavirus
  REGION 1..10: note = Table A: HLA-A*02:02H HLA-B*38:02H
  source 1..10: note = Severe acute respiratory syndrome coronavirus 2
NLHPDSATLV

SEQ ID NO: 4122 - protein, 10 aa, Severe acute respiratory syndrome-related coronavirus
  REGION 1..10: note = Table A: HLA-B*35:01H HLA-B*38:02H HLA-B*13:01H
  source 1..10: note = Severe acute respiratory syndrome coronavirus 2
TLVSDIDITF

SEQ ID NO: 4123 - protein, 10 aa, Severe acute respiratory syndrome-related coronavirus
  REGION 1..10: note = Table A: HLA-A*02:11H HLA-A*68:02M HLA-A*02:04M HLA-A*02:05M HLA-A*02:07H HLA-A*02:08H HLA-A*02:02M
  source 1..10: note = Severe acute respiratory syndrome coronavirus 2
LVSDIDITFL

SEQ ID NO: 4124 - protein, 10 aa, Severe acute respiratory syndrome-related coronavirus
  REGION 1..10: note = Table A: HLA-A*36:01H
  source 1..10: note = Severe acute respiratory syndrome coronavirus 2
VSDIDITFLK

SEQ ID NO: 4125 - protein, 10 aa, Severe acute respiratory syndrome-related coronavirus
  REGION 1..10: note = Table A: HLA-A*24:07H
  source 1..10: note = Severe acute respiratory syndrome coronavirus 2
TFLKKDAPYI

SEQ ID NO: 4126 - protein, 10 aa, Severe acute respiratory syndrome-related coronavirus
  REGION 1..10: note = Table A: HLA-A*02:02H
  source 1..10: note = Severe acute respiratory syndrome coronavirus 2
FLKKDAPYIV

SEQ ID NO: 4127 - protein, 10 aa, Severe acute respiratory syndrome-related coronavirus
  REGION 1..10: note = Table A: HLA-A*68:02M HLA-B*51:01H
  source 1..10: note = Severe acute respiratory syndrome coronavirus 2
DAPYIVGDVV

SEQ ID NO: 4128 - protein, 10 aa, Severe acute respiratory syndrome-related coronavirus
  REGION 1..10: note = Table A: HLA-A*68:02H
  source 1..10: note = Severe acute respiratory syndrome coronavirus 2
IVGDVVQEGV

SEQ ID NO: 4129 - protein, 10 aa, Severe acute respiratory syndrome-related coronavirus
  REGION 1..10: note = Table A: HLA-A*26:03H
  source 1..10: note = Severe acute respiratory syndrome coronavirus 2
DVVQEGVLTA

SEQ ID NO: 4130 - protein, 10 aa, Severe acute respiratory syndrome-related coronavirus
  REGION 1..10: note = Table A: HLA-A*11:303H HLA-A*03:02H HLA-A*02:11M HLA-A*68:02H HLA-C*15:05H HLA-A*02:04M HLA-A*02:05M HLA-A*02:06M HLA-A*02:07H HLA-A*02:08M HLA-B*14:01H HLA-A*02:01H HLA-A*02:02H HLA-A*02:03M HLA-B*38:02M
  REGION 1..10: note = CONT. FROM ABOVE: HLA-B*13:02H
  source 1..10: note = Severe acute respiratory syndrome coronavirus 2
VVQEGVLTAV

SEQ ID NO: 4131 - protein, 10 aa, Severe acute respiratory syndrome-related coronavirus
  REGION 1..10: note = Table A: HLA-C*08:03H
  source 1..10: note = Severe acute respiratory syndrome coronavirus 2
GVLTAVVIPT

SEQ ID NO: 4132 - protein, 10 aa, Severe acute respiratory syndrome-related coronavirus
  REGION 1..10: note = Table A: HLA-A*03:01H HLA-A*03:02H HLA-A*11:01H HLA-A*11:02H HLA-B*27:02H HLA-A*23:01H
  source 1..10: note = Severe acute respiratory syndrome coronavirus 2
VLTAVVIPTK

SEQ ID NO: 4133 - protein, 10 aa, Severe acute respiratory syndrome-related coronavirus
  REGION 1..10: note = Table A: HLA-A*03:01H HLA-A*03:02H HLA-A*11:01H HLA-A*11:02H HLA-A*36:01H HLA-A*68:01M HLA-A*34:02M
  source 1..10: note = Severe acute respiratory syndrome coronavirus 2
LTAVVIPTKK

SEQ ID NO: 4134 - protein, 10 aa, Severe acute respiratory syndrome-related coronavirus
  REGION 1..10: note = Table A: HLA-B*54:01H
  source 1..10: note = Severe acute respiratory syndrome coronavirus 2
TAVVIPTKKA

SEQ ID NO: 4135 - protein, 10 aa, Severe acute respiratory syndrome-related coronavirus
  REGION 1..10: note = Table A: HLA-A*11:01H HLA-A*36:01H
  source 1..10: note = Severe acute respiratory syndrome coronavirus 2
AGGTTEMLAK

SEQ ID NO: 4136 - protein, 10 aa, Severe acute respiratory syndrome-related coronavirus
  REGION 1..10: note = Table A: HLA-A*68:01H
  source 1..10: note = Severe acute respiratory syndrome coronavirus 2
TTEMLAKALR

SEQ ID NO: 4137 - protein, 10 aa, Severe acute respiratory syndrome-related coronavirus
  REGION 1..10: note = Table A: HLA-A*30:02M HLA-B*38:02H HLA-B*15:01M HLA-B*15:02H HLA-B*15:03H
  source 1..10: note = Severe acute respiratory syndrome coronavirus 2
ALRKVPTDNY

SEQ ID NO: 4138 - protein, 10 aa, Severe acute respiratory syndrome-related coronavirus
  REGION 1..10: note = Table A: HLA-B*38:02H
  source 1..10: note = Severe acute respiratory syndrome coronavirus 2
LRKVPTDNYI

SEQ ID NO: 4139 - protein, 10 aa, Severe acute respiratory syndrome-related coronavirus
  REGION 1..10: note = Table A: HLA-A*02:08H
  source 1..10: note = Severe acute respiratory syndrome coronavirus 2
KVPTDNYITT

SEQ ID NO: 4140 - protein, 10 aa, Severe acute respiratory syndrome-related coronavirus
  REGION 1..10: note = Table A: HLA-B*56:01H HLA-B*27:02H HLA-B*53:01H HLA-B*55:02H HLA-C*15:05H HLA-B*35:01H HLA-B*35:08M HLA-B*35:07H HLA-B*38:02H HLA-B*15:02H HLA-B*07:05H HLA-B*15:11M
  source 1..10: note = Severe acute respiratory syndrome coronavirus 2
VPTDNYITTY

SEQ ID NO: 4141 - protein, 10 aa, Severe acute respiratory syndrome-related coronavirus
  REGION 1..10: note = Table A: HLA-C*03:04H HLA-C*08:03H
  source 1..10: note = Severe acute respiratory syndrome coronavirus 2
YITTYPGQGL

SEQ ID NO: 4142 - protein, 10 aa, Severe acute respiratory syndrome-related coronavirus
  REGION 1..10: note = Table A: HLA-A*34:02H HLA-A*66:01H
  source 1..10: note = Severe acute respiratory syndrome coronavirus 2
TTYPGQGLNG

SEQ ID NO: 4143 - protein, 10 aa, Severe acute respiratory syndrome-related coronavirus
  REGION 1..10: note = Table A: HLA-C*14:02H HLA-C*14:03H
  source 1..10: note = Severe acute respiratory syndrome coronavirus 2
TYPGQGLNGY

SEQ ID NO: 4144 - protein, 10 aa, Severe acute respiratory syndrome-related coronavirus
  REGION 1..10: note = Table A: HLA-A*11:303H HLA-C*03:03H HLA-C*03:02H HLA-C*03:04M HLA-A*68:02M HLA-B*35:03M HLA-C*15:05H HLA-C*12:03H HLA-A*02:05H HLA-A*02:06H HLA-A*02:08H HLA-A*02:02H HLA-B*35:01H HLA-B*35:02H HLA-C*17:01H
  REGION 1..10: note = CONT. FROM ABOVE: HLA-C*08:01M HLA-C*08:03H HLA-B*35:12H HLA- B*38:02M HLA-B*40:01H HLA-B*39:01H HLA-B*57:03H HLA-A*66:01H
  source 1..10: note = Severe acute respiratory syndrome coronavirus 2
YTVEEAKTVL

SEQ ID NO: 4145 - protein, 10 aa, Severe acute respiratory syndrome-related coronavirus
  REGION 1..10: note = Table A: HLA-A*11:303M HLA-A*03:01M HLA-A*03:02H HLA-A*11:01H HLA-A*11:02H HLA-A*36:01M HLA-A*26:03H HLA-B*27:02H HLA-A*30:02H HLA-A*68:01H HLA-A*68:02H HLA-A*34:01H HLA-A*34:02H HLA-C*07:27H HLA-A*66:01H
  source 1..10: note = Severe acute respiratory syndrome coronavirus 2
TVEEAKTVLK

SEQ ID NO: 4146 - protein, 10 aa, Severe acute respiratory syndrome-related coronavirus
  REGION 1..10: note = Table A: HLA-B*58:02H HLA-B*57:03M
  source 1..10: note = Severe acute respiratory syndrome coronavirus 2
KSAFYILPSI

SEQ ID NO: 4147 - protein, 10 aa, Severe acute respiratory syndrome-related coronavirus
  REGION 1..10: note = Table A: HLA-A*68:02H HLA-C*12:03H
  source 1..10: note = Severe acute respiratory syndrome coronavirus 2
SAFYILPSII

SEQ ID NO: 4148 - protein, 10 aa, Severe acute respiratory syndrome-related coronavirus
  REGION 1..10: note = Table A: HLA-A*03:02H
  source 1..10: note = Severe acute respiratory syndrome coronavirus 2
ILPSIISNEK

SEQ ID NO: 4149 - protein, 10 aa, Severe acute respiratory syndrome-related coronavirus
  REGION 1..10: note = Table A: HLA-B*38:02H
  source 1..10: note = Severe acute respiratory syndrome coronavirus 2
SIISNEKQEI

SEQ ID NO: 4150 - protein, 10 aa, Severe acute respiratory syndrome-related coronavirus
  REGION 1..10: note = Table A: HLA-B*58:01M HLA-B*44:02H HLA-B*44:05H HLA-B*57:01H HLA-B*44:03H HLA-B*27:02H HLA-B*38:02H HLA-A*32:01H HLA-B*57:03M HLA-B*13:01H
  source 1..10: note = Severe acute respiratory syndrome coronavirus 2
KQEILGTVSW

SEQ ID NO: 4151 - protein, 10 aa, Severe acute respiratory syndrome-related coronavirus
  REGION 1..10: note = Table A: HLA-A*68:02H
  source 1..10: note = Severe acute respiratory syndrome coronavirus 2
EILGTVSWNL

SEQ ID NO: 4152 - protein, 10 aa, Severe acute respiratory syndrome-related coronavirus
  REGION 1..10: note = Table A: HLA-B*38:02H
  source 1..10: note = Severe acute respiratory syndrome coronavirus 2
AHAEETRKLM

SEQ ID NO: 4153 - protein, 10 aa, Severe acute respiratory syndrome-related coronavirus
  REGION 1..10: note = Table A: HLA-B*45:01H
  source 1..10: note = Severe acute respiratory syndrome coronavirus 2
AEETRKLMPV

SEQ ID NO: 4154 - protein, 10 aa, Severe acute respiratory syndrome-related coronavirus
  REGION 1..10: note = Table A: HLA-A*03:01H HLA-A*03:02M
  source 1..10: note = Severe acute respiratory syndrome coronavirus 2
KLMPVCVETK

SEQ ID NO: 4155 - protein, 10 aa, Severe acute respiratory syndrome-related coronavirus
  REGION 1..10: note = Table A: HLA-B*54:01H
  source 1..10: note = Severe acute respiratory syndrome coronavirus 2
MPVCVETKAI

SEQ ID NO: 4156 - protein, 10 aa, Severe acute respiratory syndrome-related coronavirus
  REGION 1..10: note = Table A: HLA-B*44:05H HLA-B*40:02H HLA-B*49:01M
  source 1..10: note = Severe acute respiratory syndrome coronavirus 2
VETKAIVSTI

SEQ ID NO: 4157 - protein, 10 aa, Severe acute respiratory syndrome-related coronavirus
  REGION 1..10: note = Table A: HLA-A*30:02M
  source 1..10: note = Severe acute respiratory syndrome coronavirus 2
AIVSTIQRKY

SEQ ID NO: 4158 - protein, 10 aa, Severe acute respiratory syndrome-related coronavirus
  REGION 1..10: note = Table A: HLA-A*30:01H
  source 1..10: note = Severe acute respiratory syndrome coronavirus 2
IVSTIQRKYK

SEQ ID NO: 4159 - protein, 10 aa, Severe acute respiratory syndrome-related coronavirus
  REGION 1..10: note = Table A: HLA-B*15:03M
  source 1..10: note = Severe acute respiratory syndrome coronavirus 2
IKIQEGVVDY

SEQ ID NO: 4160 - protein, 10 aa, Severe acute respiratory syndrome-related coronavirus
  REGION 1..10: note = Table A: HLA-A*02:11H HLA-A*30:02H HLA-A*02:08H
  source 1..10: note = Severe acute respiratory syndrome coronavirus 2
KIQEGVVDYG

SEQ ID NO: 4161 - protein, 10 aa, Severe acute respiratory syndrome-related coronavirus
  REGION 1..10: note = Table A: HLA-A*30:02H
  source 1..10: note = Severe acute respiratory syndrome coronavirus 2
GVVDYGARFY

SEQ ID NO: 4162 - protein, 10 aa, Severe acute respiratory syndrome-related coronavirus
  REGION 1..10: note = Table A: HLA-A*36:01H HLA-C*04:03H
  source 1..10: note = Severe acute respiratory syndrome coronavirus 2
VVDYGARFYF

SEQ ID NO: 4163 - protein, 10 aa, Severe acute respiratory syndrome-related coronavirus
  REGION 1..10: note = Table A: HLA-C*14:02H HLA-C*14:03M
  source 1..10: note = Severe acute respiratory syndrome coronavirus 2
FYFYTSKTTV

SEQ ID NO: 4164 - protein, 10 aa, Severe acute respiratory syndrome-related coronavirus
  REGION 1..10: note = Table A: HLA-C*14:02H HLA-C*14:03M
  source 1..10: note = Severe acute respiratory syndrome coronavirus 2
YFYTSKTTVA

SEQ ID NO: 4165 - protein, 10 aa, Severe acute respiratory syndrome-related coronavirus
  REGION 1..10: note = Table A: HLA-A*68:02H HLA-A*02:08H
  source 1..10: note = Severe acute respiratory syndrome coronavirus 2
YTSKTTVASL

SEQ ID NO: 4166 - protein, 10 aa, Severe acute respiratory syndrome-related coronavirus
  REGION 1..10: note = Table A: HLA-A*68:01H HLA-A*68:02M HLA-A*02:08H HLA-B*57:03H
  source 1..10: note = Severe acute respiratory syndrome coronavirus 2
TTVASLINTL

SEQ ID NO: 4167 - protein, 10 aa, Severe acute respiratory syndrome-related coronavirus
  REGION 1..10: note = Table A: HLA-A*02:02H HLA-A*02:03H HLA-B*38:02H
  source 1..10: note = Severe acute respiratory syndrome coronavirus 2
TLNDLNETLV

SEQ ID NO: 4168 - protein, 10 aa, Severe acute respiratory syndrome-related coronavirus
  REGION 1..10: note = Table A: HLA-A*36:01H HLA-A*25:01H HLA-A*26:01M HLA-A*26:02H HLA-A*26:03H HLA-A*29:02H HLA-A*01:01H HLA-A*34:02M
  source 1..10: note = Severe acute respiratory syndrome coronavirus 2
ETLVTMPLGY

SEQ ID NO: 4169 - protein, 10 aa, Severe acute respiratory syndrome-related coronavirus
  REGION 1..10: note = Table A: HLA-A*11:01H HLA-A*11:02H HLA-B*57:01H HLA-A*34:02H HLA-B*57:03H
  source 1..10: note = Severe acute respiratory syndrome coronavirus 2
VTMPLGYVTH

SEQ ID NO: 4170 - protein, 10 aa, Severe acute respiratory syndrome-related coronavirus
  REGION 1..10: note = Table A: HLA-B*42:01H HLA-B*53:01H HLA-B*35:03M HLA-C*15:05M HLA-A*34:01H HLA-B*35:01H HLA-B*35:07H HLA-B*54:01H HLA-B*07:02H HLA-B*07:04H HLA-B*07:05H
  source 1..10: note = Severe acute respiratory syndrome coronavirus 2
MPLGYVTHGL

SEQ ID NO: 4171 - protein, 10 aa, Severe acute respiratory syndrome-related coronavirus
  REGION 1..10: note = Table A: HLA-A*02:08H
  source 1..10: note = Severe acute respiratory syndrome coronavirus 2
VTHGLNLEEA

SEQ ID NO: 4172 - protein, 10 aa, Severe acute respiratory syndrome-related coronavirus
  REGION 1..10: note = Table A: HLA-A*30:02H HLA-B*15:01M
  source 1..10: note = Severe acute respiratory syndrome coronavirus 2
GLNLEEAARY

SEQ ID NO: 4173 - protein, 10 aa, Severe acute respiratory syndrome-related coronavirus
  REGION 1..10: note = Table A: HLA-A*34:02H
  source 1..10: note = Severe acute respiratory syndrome coronavirus 2
EAARYMRSLK

SEQ ID NO: 4174 - protein, 10 aa, Severe acute respiratory syndrome-related coronavirus
  REGION 1..10: note = Table A: HLA-B*55:02H
  source 1..10: note = Severe acute respiratory syndrome coronavirus 2
RYMRSLKVPA

SEQ ID NO: 4175 - protein, 10 aa, Severe acute respiratory syndrome-related coronavirus
  REGION 1..10: note = Table A: HLA-B*08:01H HLA-A*02:02H HLA-A*02:03M HLA-B*38:02M HLA-B*07:02H HLA-B*07:04H
  source 1..10: note = Severe acute respiratory syndrome coronavirus 2
SLKVPATVSV

SEQ ID NO: 4176 - protein, 10 aa, Severe acute respiratory syndrome-related coronavirus
  REGION 1..10: note = Table A: HLA-B*58:01H HLA-A*36:01M HLA-B*57:01H HLA-B*46:01H HLA-A*01:01M HLA-A*30:02H HLA-B*35:01H HLA-B*38:02H HLA-B*15:01M HLA-B*39:01H HLA-B*57:03H HLA-B*15:11H
  source 1..10: note = Severe acute respiratory syndrome coronavirus 2
VSSPDAVTAY

SEQ ID NO: 4177 - protein, 10 aa, Severe acute respiratory syndrome-related coronavirus
  REGION 1..10: note = Table A: HLA-A*03:01H HLA-A*68:01H HLA-A*68:02H HLA-A*02:05H HLA-A*34:02H HLA-B*38:02H HLA-B*54:01H
  source 1..10: note = Severe acute respiratory syndrome coronavirus 2
TAYNGYLTSS

SEQ ID NO: 4178 - protein, 10 aa, Severe acute respiratory syndrome-related coronavirus
  REGION 1..10: note = Table A: HLA-A*02:05H HLA-A*02:06H HLA-A*02:08M HLA-B*57:03H
  source 1..10: note = Severe acute respiratory syndrome coronavirus 2
KTPEEHFIET

SEQ ID NO: 4179 - protein, 10 aa, Severe acute respiratory syndrome-related coronavirus
  REGION 1..10: note = Table A: HLA-C*15:05H HLA-B*38:02H
  source 1..10: note = Severe acute respiratory syndrome coronavirus 2
TPEEHFIETI

SEQ ID NO: 4180 - protein, 10 aa, Severe acute respiratory syndrome-related coronavirus
  REGION 1..10: note = Table A: HLA-B*44:05H HLA-B*40:01H HLA-B*40:02H
  source 1..10: note = Severe acute respiratory syndrome coronavirus 2
EEHFIETISL

SEQ ID NO: 4181 - protein, 10 aa, Severe acute respiratory syndrome-related coronavirus
  REGION 1..10: note = Table A: HLA-C*14:03H
  source 1..10: note = Severe acute respiratory syndrome coronavirus 2
HFIETISLAG

SEQ ID NO: 4182 - protein, 10 aa, Severe acute respiratory syndrome-related coronavirus
  REGION 1..10: note = Table A: HLA-A*33:03H HLA-A*26:03M HLA-A*68:01M HLA-A*68:02H HLA-A*34:01M HLA-A*34:02H HLA-A*66:01H
  source 1..10: note = Severe acute respiratory syndrome coronavirus 2
ETISLAGSYK

SEQ ID NO: 4183 - protein, 10 aa, Severe acute respiratory syndrome-related coronavirus
  REGION 1..10: note = Table A: HLA-B*57:01H
  source 1..10: note = Severe acute respiratory syndrome coronavirus 2
ISLAGSYKDW

SEQ ID NO: 4184 - protein, 10 aa, Severe acute respiratory syndrome-related coronavirus
  REGION 1..10: note = Table A: HLA-A*68:02H HLA-C*15:05H HLA-C*17:01H HLA-B*38:02H
  source 1..10: note = Severe acute respiratory syndrome coronavirus 2
WSYSGQSTQL

SEQ ID NO: 4185 - protein, 10 aa, Severe acute respiratory syndrome-related coronavirus
  REGION 1..10: note = Table A: HLA-B*27:02H HLA-B*15:01M HLA-B*15:03H
  source 1..10: note = Severe acute respiratory syndrome coronavirus 2
GQSTQLGIEF

SEQ ID NO: 4186 - protein, 10 aa, Severe acute respiratory syndrome-related coronavirus
  REGION 1..10: note = Table A: HLA-A*68:02H
  source 1..10: note = Severe acute respiratory syndrome coronavirus 2
QSTQLGIEFL

SEQ ID NO: 4187 - protein, 10 aa, Severe acute respiratory syndrome-related coronavirus
  REGION 1..10: note = Table A: HLA-A*11:303M HLA-A*03:02M HLA-A*11:01H HLA-A*11:02H HLA-A*36:01H HLA-A*30:02H HLA-A*68:02H HLA-A*34:02H HLA-C*07:27H
  source 1..10: note = Severe acute respiratory syndrome coronavirus 2
STQLGIEFLK

SEQ ID NO: 4188 - protein, 10 aa, Severe acute respiratory syndrome-related coronavirus
  REGION 1..10: note = Table A: HLA-B*38:02H HLA-B*15:01H HLA-B*15:02H
  source 1..10: note = Severe acute respiratory syndrome coronavirus 2
FLKRGDKSVY

SEQ ID NO: 4189 - protein, 10 aa, Severe acute respiratory syndrome-related coronavirus
  REGION 1..10: note = Table A: HLA-B*15:03H
  source 1..10: note = Severe acute respiratory syndrome coronavirus 2
LKRGDKSVYY

SEQ ID NO: 4190 - protein, 10 aa, Severe acute respiratory syndrome-related coronavirus
  REGION 1..10: note = Table A: HLA-C*14:02H HLA-C*14:03H HLA-B*46:01H HLA-A*29:01H HLA-A*29:02H HLA-C*07:02H HLA-B*27:02H HLA-C*15:05H HLA-A*24:02H HLA-A*24:07H HLA-C*08:01H HLA-A*23:01H HLA-B*39:01H HLA-B*07:05H
  source 1..10: note = Severe acute respiratory syndrome coronavirus 2
VYYTSNPTTF

SEQ ID NO: 4191 - protein, 10 aa, Severe acute respiratory syndrome-related coronavirus
  REGION 1..10: note = Table A: HLA-A*68:02H HLA-A*02:05H HLA-A*02:08H HLA-A*02:02H HLA-A*34:02H HLA-A*66:01H
  source 1..10: note = Severe acute respiratory syndrome coronavirus 2
YTSNPTTFHL

SEQ ID NO: 4192 - protein, 10 aa, Severe acute respiratory syndrome-related coronavirus
  REGION 1..10: note = Table A: HLA-A*68:02H
  source 1..10: note = Severe acute respiratory syndrome coronavirus 2
TTFHLDGEVI

SEQ ID NO: 4193 - protein, 10 aa, Severe acute respiratory syndrome-related coronavirus
  REGION 1..10: note = Table A: HLA-B*38:01M HLA-B*38:02H HLA-B*39:01H HLA-B*15:10M
  source 1..10: note = Severe acute respiratory syndrome coronavirus 2
FHLDGEVITF

SEQ ID NO: 4194 - protein, 10 aa, Severe acute respiratory syndrome-related coronavirus
  REGION 1..10: note = Table A: HLA-A*26:03H HLA-A*68:02H
  source 1..10: note = Severe acute respiratory syndrome coronavirus 2
EVITFDNLKT

SEQ ID NO: 4195 - protein, 10 aa, Severe acute respiratory syndrome-related coronavirus
  REGION 1..10: note = Table A: HLA-A*02:11H HLA-A*68:02H HLA-A*02:05H HLA-A*02:08H HLA-A*02:02H HLA-B*57:03M
  source 1..10: note = Severe acute respiratory syndrome coronavirus 2
ITFDNLKTLL

SEQ ID NO: 4196 - protein, 10 aa, Severe acute respiratory syndrome-related coronavirus
  REGION 1..10: note = Table A: HLA-A*33:01H
  source 1..10: note = Severe acute respiratory syndrome coronavirus 2
DNLKTLLSLR

SEQ ID NO: 4197 - protein, 10 aa, Severe acute respiratory syndrome-related coronavirus
  REGION 1..10: note = Table A: HLA-A*74:01H
  source 1..10: note = Severe acute respiratory syndrome coronavirus 2
KTLLSLREVR

SEQ ID NO: 4198 - protein, 10 aa, Severe acute respiratory syndrome-related coronavirus
  REGION 1..10: note = Table A: HLA-A*24:07H HLA-A*23:01H
  source 1..10: note = Severe acute respiratory syndrome coronavirus 2
VFTTVDNINL

SEQ ID NO: 4199 - protein, 10 aa, Severe acute respiratory syndrome-related coronavirus
  REGION 1..10: note = Table A: HLA-A*68:02H
  source 1..10: note = Severe acute respiratory syndrome coronavirus 2
TTVDNINLHT

SEQ ID NO: 4200 - protein, 10 aa, Severe acute respiratory syndrome-related coronavirus
  REGION 1..10: note = Table A: HLA-A*68:02H
  source 1..10: note = Severe acute respiratory syndrome coronavirus 2
DNINLHTQVV

SEQ ID NO: 4201 - protein, 10 aa, Severe acute respiratory syndrome-related coronavirus
  REGION 1..10: note = Table A: HLA-B*38:02H
  source 1..10: note = Severe acute respiratory syndrome coronavirus 2
LHTQVVDMSM

SEQ ID NO: 4202 - protein, 10 aa, Severe acute respiratory syndrome-related coronavirus
  REGION 1..10: note = Table A: HLA-B*27:02M HLA-A*30:02H HLA-B*35:01H HLA-B*38:02M HLA-B*15:01M HLA-B*15:02M HLA-B*15:03M HLA-B*39:01H
  source 1..10: note = Severe acute respiratory syndrome coronavirus 2
TQVVDMSMTY

SEQ ID NO: 4203 - protein, 10 aa, Severe acute respiratory syndrome-related coronavirus
  REGION 1..10: note = Table A: HLA-A*68:02H HLA-A*34:02H HLA-C*08:03H
  source 1..10: note = Severe acute respiratory syndrome coronavirus 2
MTYGQQFGPT

SEQ ID NO: 4204 - protein, 10 aa, Severe acute respiratory syndrome-related coronavirus
  REGION 1..10: note = Table A: HLA-A*29:02H HLA-A*30:02H
  source 1..10: note = Severe acute respiratory syndrome coronavirus 2
TYGQQFGPTY

SEQ ID NO: 4205 - protein, 10 aa, Severe acute respiratory syndrome-related coronavirus
  REGION 1..10: note = Table A: HLA-B*39:01H
  source 1..10: note = Severe acute respiratory syndrome coronavirus 2
YGQQFGPTYL

SEQ ID NO: 4206 - protein, 10 aa, Severe acute respiratory syndrome-related coronavirus
  REGION 1..10: note = Table A: HLA-B*39:01H
  source 1..10: note = Severe acute respiratory syndrome coronavirus 2
QQFGPTYLDG

SEQ ID NO: 4207 - protein, 10 aa, Severe acute respiratory syndrome-related coronavirus
  REGION 1..10: note = Table A: HLA-B*27:02H HLA-A*23:01H
  source 1..10: note = Severe acute respiratory syndrome coronavirus 2
TYLDGADVTK

SEQ ID NO: 4208 - protein, 10 aa, Severe acute respiratory syndrome-related coronavirus
  REGION 1..10: note = Table A: HLA-A*02:07H HLA-B*38:02H HLA-B*13:01H
  source 1..10: note = Severe acute respiratory syndrome coronavirus 2
YLDGADVTKI

SEQ ID NO: 4209 - protein, 10 aa, Severe acute respiratory syndrome-related coronavirus
  REGION 1..10: note = Table A: HLA-A*68:01H HLA-A*68:02H
  source 1..10: note = Severe acute respiratory syndrome coronavirus 2
DGADVTKIKP

SEQ ID NO: 4210 - protein, 10 aa, Severe acute respiratory syndrome-related coronavirus
  REGION 1..10: note = Table A: HLA-B*38:01H HLA-B*38:02H HLA-B*15:10H
  source 1..10: note = Severe acute respiratory syndrome coronavirus 2
SHEGKTFYVL

SEQ ID NO: 4211 - protein, 10 aa, Severe acute respiratory syndrome-related coronavirus
  REGION 1..10: note = Table A: HLA-C*08:01H HLA-B*39:01H
  source 1..10: note = Severe acute respiratory syndrome coronavirus 2
FYVLPNDDTL

SEQ ID NO: 4212 - protein, 10 aa, Severe acute respiratory syndrome-related coronavirus
  REGION 1..10: note = Table A: HLA-A*34:01H HLA-A*66:01H
  source 1..10: note = Severe acute respiratory syndrome coronavirus 2
YVLPNDDTLR

SEQ ID NO: 4213 - protein, 10 aa, Severe acute respiratory syndrome-related coronavirus
  REGION 1..10: note = Table A: HLA-A*02:07H
  source 1..10: note = Severe acute respiratory syndrome coronavirus 2
VLPNDDTLRV

SEQ ID NO: 4214 - protein, 10 aa, Severe acute respiratory syndrome-related coronavirus
  REGION 1..10: note = Table A: HLA-B*38:02M HLA-B*15:02H
  source 1..10: note = Severe acute respiratory syndrome coronavirus 2
TLRVEAFEYY

SEQ ID NO: 4215 - protein, 10 aa, Severe acute respiratory syndrome-related coronavirus
  REGION 1..10: note = Table A: HLA-A*24:02H HLA-A*24:07H HLA-A*23:01H
  source 1..10: note = Severe acute respiratory syndrome coronavirus 2
EYYHTTDPSF

SEQ ID NO: 4216 - protein, 10 aa, Severe acute respiratory syndrome-related coronavirus
  REGION 1..10: note = Table A: HLA-C*14:02M HLA-C*14:03H HLA-A*29:02H HLA-C*04:03H HLA-A*24:02H HLA-A*24:07M HLA-A*23:01H
  source 1..10: note = Severe acute respiratory syndrome coronavirus 2
YYHTTDPSFL

SEQ ID NO: 4217 - protein, 10 aa, Severe acute respiratory syndrome-related coronavirus
  REGION 1..10: note = Table A: HLA-A*11:303H HLA-A*74:01H HLA-A*03:01H HLA-A*11:01M HLA-A*11:02H HLA-A*36:01H HLA-A*33:01M HLA-A*33:03H HLA-A*26:01H HLA-A*26:03H HLA-A*68:01H HLA-A*68:02H HLA-A*34:01H HLA-A*34:02H HLA-C*07:27H
  REGION 1..10: note = CONT. FROM ABOVE: HLA-A*31:01H HLA-A*66:01H
  source 1..10: note = Severe acute respiratory syndrome coronavirus 2
HTTDPSFLGR

SEQ ID NO: 4218 - protein, 10 aa, Severe acute respiratory syndrome-related coronavirus
  REGION 1..10: note = Table A: HLA-B*58:01H HLA-A*36:01H HLA-A*26:01H HLA-A*29:02H HLA-A*01:01H HLA-C*04:03H HLA-A*30:02M HLA-A*34:02M
  source 1..10: note = Severe acute respiratory syndrome coronavirus 2
TTDPSFLGRY

SEQ ID NO: 4219 - protein, 10 aa, Severe acute respiratory syndrome-related coronavirus
  REGION 1..10: note = Table A: HLA-C*14:02H HLA-C*14:03H
  source 1..10: note = Severe acute respiratory syndrome coronavirus 2
SFLGRYMSAL

SEQ ID NO: 4220 - protein, 10 aa, Severe acute respiratory syndrome-related coronavirus
  REGION 1..10: note = Table A: HLA-A*30:02H
  source 1..10: note = Severe acute respiratory syndrome coronavirus 2
RYMSALNHTK

SEQ ID NO: 4221 - protein, 10 aa, Severe acute respiratory syndrome-related coronavirus
  REGION 1..10: note = Table A: HLA-A*30:02H
  source 1..10: note = Severe acute respiratory syndrome coronavirus 2
ALNHTKKWKY

SEQ ID NO: 4222 - protein, 10 aa, Severe acute respiratory syndrome-related coronavirus
  REGION 1..10: note = Table A: HLA-B*56:01H HLA-B*55:02H HLA-B*35:03H HLA-C*15:05M HLA-B*55:01H HLA-B*51:01M HLA-B*38:02H HLA-B*54:01H HLA-B*07:02H HLA-B*07:05H
  source 1..10: note = Severe acute respiratory syndrome coronavirus 2
YPQVNGLTSI

SEQ ID NO: 4223 - protein, 10 aa, Severe acute respiratory syndrome-related coronavirus
  REGION 1..10: note = Table A: HLA-B*58:01H HLA-B*57:01H HLA-A*25:01H HLA-B*53:01M HLA-B*15:13H HLA-A*32:01H HLA-B*57:03M
  source 1..10: note = Severe acute respiratory syndrome coronavirus 2
QVNGLTSIKW

SEQ ID NO: 4224 - protein, 10 aa, Severe acute respiratory syndrome-related coronavirus
  REGION 1..10: note = Table A: HLA-A*24:02H HLA-A*23:01H
  source 1..10: note = Severe acute respiratory syndrome coronavirus 2
CYLATALLTL

SEQ ID NO: 4225 - protein, 10 aa, Severe acute respiratory syndrome-related coronavirus
  REGION 1..10: note = Table A: HLA-A*68:02H
  source 1..10: note = Severe acute respiratory syndrome coronavirus 2
ATALLTLQQI

SEQ ID NO: 4226 - protein, 10 aa, Severe acute respiratory syndrome-related coronavirus
  REGION 1..10: note = Table A: HLA-A*02:11H HLA-A*02:04M HLA-A*02:01M HLA-A*02:02H
  source 1..10: note = Severe acute respiratory syndrome coronavirus 2
ALLTLQQIEL

SEQ ID NO: 4227 - protein, 10 aa, Severe acute respiratory syndrome-related coronavirus
  REGION 1..10: note = Table A: HLA-B*57:01H HLA-A*29:02H HLA-B*57:03M
  source 1..10: note = Severe acute respiratory syndrome coronavirus 2
LTLQQIELKF

SEQ ID NO: 4228 - protein, 10 aa, Severe acute respiratory syndrome-related coronavirus
  REGION 1..10: note = Table A: HLA-B*45:01H HLA-B*40:06H HLA-B*50:01M
  source 1..10: note = Severe acute respiratory syndrome coronavirus 2
QQIELKFNPP

SEQ ID NO: 4229 - protein, 10 aa, Severe acute respiratory syndrome-related coronavirus
  REGION 1..10: note = Table A: HLA-B*40:01M HLA-B*40:02M HLA-B*40:06H HLA-B*41:02H HLA-B*49:01H
  source 1..10: note = Severe acute respiratory syndrome coronavirus 2
IELKFNPPAL

SEQ ID NO: 4230 - protein, 10 aa, Severe acute respiratory syndrome-related coronavirus
  REGION 1..10: note = Table A: HLA-A*29:02H HLA-B*39:01H
  source 1..10: note = Severe acute respiratory syndrome coronavirus 2
FNPPALQDAY

SEQ ID NO: 4231 - protein, 10 aa, Severe acute respiratory syndrome-related coronavirus
  REGION 1..10: note = Table A: HLA-B*35:01M HLA-B*35:08H
  source 1..10: note = Severe acute respiratory syndrome coronavirus 2
NPPALQDAYY

SEQ ID NO: 4232 - protein, 10 aa, Severe acute respiratory syndrome-related coronavirus
  REGION 1..10: note = Table A: HLA-A*74:01M
  source 1..10: note = Severe acute respiratory syndrome coronavirus 2
ALQDAYYRAR

SEQ ID NO: 4233 - protein, 10 aa, Severe acute respiratory syndrome-related coronavirus
  REGION 1..10: note = Table A: HLA-B*57:03M
  source 1..10: note = Severe acute respiratory syndrome coronavirus 2
RARAGEAANF

SEQ ID NO: 4234 - protein, 10 aa, Severe acute respiratory syndrome-related coronavirus
  REGION 1..10: note = Table A: HLA-B*49:01H
  source 1..10: note = Severe acute respiratory syndrome coronavirus 2
GEAANFCALI

SEQ ID NO: 4235 - protein, 10 aa, Severe acute respiratory syndrome-related coronavirus
  REGION 1..10: note = Table A: HLA-A*74:01H HLA-A*36:01H HLA-A*30:02H
  source 1..10: note = Severe acute respiratory syndrome coronavirus 2
KTVGELGDVR

SEQ ID NO: 4236 - protein, 10 aa, Severe acute respiratory syndrome-related coronavirus
  REGION 1..10: note = Table A: HLA-B*44:05M HLA-B*44:03H HLA-B*40:01M HLA-B*40:02M HLA-B*41:02M HLA-B*49:01H
  source 1..10: note = Severe acute respiratory syndrome coronavirus 2
GELGDVRETM

SEQ ID NO: 4237 - protein, 10 aa, Severe acute respiratory syndrome-related coronavirus
  REGION 1..10: note = Table A: HLA-A*36:01H
  source 1..10: note = Severe acute respiratory syndrome coronavirus 2
LGDVRETMSY

SEQ ID NO: 4238 - protein, 10 aa, Severe acute respiratory syndrome-related coronavirus
  REGION 1..10: note = Table A: HLA-A*68:02M HLA-A*34:02H
  source 1..10: note = Severe acute respiratory syndrome coronavirus 2
ETMSYLFQHA

SEQ ID NO: 4239 - protein, 10 aa, Severe acute respiratory syndrome-related coronavirus
  REGION 1..10: note = Table A: HLA-C*15:05M HLA-A*02:08M HLA-C*08:03H HLA-B*57:03M
  source 1..10: note = Severe acute respiratory syndrome coronavirus 2
KTCGQQQTTL

SEQ ID NO: 4240 - protein, 10 aa, Severe acute respiratory syndrome-related coronavirus
  REGION 1..10: note = Table A: HLA-B*13:02H
  source 1..10: note = Severe acute respiratory syndrome coronavirus 2
GQQQTTLKGV

SEQ ID NO: 4241 - protein, 10 aa, Severe acute respiratory syndrome-related coronavirus
  REGION 1..10: note = Table A: HLA-B*39:06H
  source 1..10: note = Severe acute respiratory syndrome coronavirus 2
QQTTLKGVEA

SEQ ID NO: 4242 - protein, 10 aa, Severe acute respiratory syndrome-related coronavirus
  REGION 1..10: note = Table A: HLA-B*35:03H HLA-B*57:03H
  source 1..10: note = Severe acute respiratory syndrome coronavirus 2
TTLKGVEAVM

SEQ ID NO: 4243 - protein, 10 aa, Severe acute respiratory syndrome-related coronavirus
  REGION 1..10: note = Table A: HLA-B*46:01H HLA-A*30:02H HLA-B*38:02M HLA-B*15:01H HLA-B*15:02H HLA-B*15:11H
  source 1..10: note = Severe acute respiratory syndrome coronavirus 2
TLKGVEAVMY

SEQ ID NO: 4244 - protein, 10 aa, Severe acute respiratory syndrome-related coronavirus
  REGION 1..10: note = Table A: HLA-B*40:01H
  source 1..10: note = Severe acute respiratory syndrome coronavirus 2
VEAVMYMGTL

SEQ ID NO: 4245 - protein, 10 aa, Severe acute respiratory syndrome-related coronavirus
  REGION 1..10: note = Table A: HLA-A*11:01H HLA-A*11:02H HLA-A*29:01H HLA-A*29:02H HLA-A*30:02H HLA-B*15:01H
  source 1..10: note = Severe acute respiratory syndrome coronavirus 2
AVMYMGTLSY

SEQ ID NO: 4246 - protein, 10 aa, Severe acute respiratory syndrome-related coronavirus
  REGION 1..10: note = Table A: HLA-B*38:02H
  source 1..10: note = Severe acute respiratory syndrome coronavirus 2
YMGTLSYEQF

SEQ ID NO: 4247 - protein, 10 aa, Severe acute respiratory syndrome-related coronavirus
  REGION 1..10: note = Table A: HLA-A*36:01H
  source 1..10: note = Severe acute respiratory syndrome coronavirus 2
MGTLSYEQFK

SEQ ID NO: 4248 - protein, 10 aa, Severe acute respiratory syndrome-related coronavirus
  REGION 1..10: note = Table A: HLA-A*11:303M HLA-A*03:01H HLA-A*03:02M HLA-A*11:01H HLA-A*11:02H HLA-A*36:01H HLA-A*30:02H HLA-A*34:02H HLA-C*07:27M
  source 1..10: note = Severe acute respiratory syndrome coronavirus 2
GTLSYEQFKK

SEQ ID NO: 4249 - protein, 10 aa, Severe acute respiratory syndrome-related coronavirus
  REGION 1..10: note = Table A: HLA-B*49:01H
  source 1..10: note = Severe acute respiratory syndrome coronavirus 2
YEQFKKGVQI

SEQ ID NO: 4250 - protein, 10 aa, Severe acute respiratory syndrome-related coronavirus
  REGION 1..10: note = Table A: HLA-A*03:02H
  source 1..10: note = Severe acute respiratory syndrome coronavirus 2
GVQIPCTCGK

SEQ ID NO: 4251 - protein, 10 aa, Severe acute respiratory syndrome-related coronavirus
  REGION 1..10: note = Table A: HLA-C*14:03H HLA-A*23:01H
  source 1..10: note = Severe acute respiratory syndrome coronavirus 2
KYLVQQESPF

SEQ ID NO: 4252 - protein, 10 aa, Severe acute respiratory syndrome-related coronavirus
  REGION 1..10: note = Table A: HLA-A*02:04H HLA-A*02:01H HLA-A*02:02H HLA-A*02:03H HLA-B*38:02H
  source 1..10: note = Severe acute respiratory syndrome coronavirus 2
YLVQQESPFV

SEQ ID NO: 4253 - protein, 10 aa, Severe acute respiratory syndrome-related coronavirus
  REGION 1..10: note = Table A: HLA-B*45:01H HLA-B*40:06H HLA-B*50:01H
  source 1..10: note = Severe acute respiratory syndrome coronavirus 2
QESPFVMMSA

SEQ ID NO: 4254 - protein, 10 aa, Severe acute respiratory syndrome-related coronavirus
  REGION 1..10: note = Table A: HLA-A*03:02H HLA-A*29:01M HLA-A*29:02M HLA-A*30:02M HLA-B*38:02H HLA-B*15:01H HLA-B*07:05H
  source 1..10: note = Severe acute respiratory syndrome coronavirus 2
VMMSAPPAQY

SEQ ID NO: 4255 - protein, 10 aa, Severe acute respiratory syndrome-related coronavirus
  REGION 1..10: note = Table A: HLA-C*03:04H HLA-A*68:02M HLA-B*35:03H HLA-A*02:08H HLA-C*08:01H HLA-C*08:03H HLA-B*38:02H HLA-B*39:01H HLA-B*57:03H
  source 1..10: note = Severe acute respiratory syndrome coronavirus 2
MSAPPAQYEL

SEQ ID NO: 4256 - protein, 10 aa, Severe acute respiratory syndrome-related coronavirus
  REGION 1..10: note = Table A: HLA-A*36:01H
  source 1..10: note = Severe acute respiratory syndrome coronavirus 2
SAPPAQYELK

SEQ ID NO: 4257 - protein, 10 aa, Severe acute respiratory syndrome-related coronavirus
  REGION 1..10: note = Table A: HLA-B*38:02H HLA-B*15:01M HLA-B*15:03M
  source 1..10: note = Severe acute respiratory syndrome coronavirus 2
AQYELKHGTF

SEQ ID NO: 4258 - protein, 10 aa, Severe acute respiratory syndrome-related coronavirus
  REGION 1..10: note = Table A: HLA-B*44:05H HLA-B*45:01M HLA-A*68:02H HLA-A*02:05H HLA-C*08:03H HLA-B*38:02H HLA-B*40:01H HLA-B*40:02M HLA-B*40:06M HLA-B*39:01H HLA-B*41:02H HLA-B*49:01M HLA-B*50:01H
  source 1..10: note = Severe acute respiratory syndrome coronavirus 2
SEYTGNYQCG

SEQ ID NO: 4259 - protein, 10 aa, Severe acute respiratory syndrome-related coronavirus
  REGION 1..10: note = Table A: HLA-B*38:02H HLA-B*15:03H
  source 1..10: note = Severe acute respiratory syndrome coronavirus 2
KHITSKETLY

SEQ ID NO: 4260 - protein, 10 aa, Severe acute respiratory syndrome-related coronavirus
  REGION 1..10: note = Table A: HLA-A*02:02H
  source 1..10: note = Severe acute respiratory syndrome coronavirus 2
TLYCIDGALL

SEQ ID NO: 4261 - protein, 10 aa, Severe acute respiratory syndrome-related coronavirus
  REGION 1..10: note = Table A: HLA-A*11:01H HLA-A*11:02H HLA-A*26:03H HLA-A*34:01H HLA-A*34:02M HLA-A*66:01H
  source 1..10: note = Severe acute respiratory syndrome coronavirus 2
YCIDGALLTK

SEQ ID NO: 4262 - protein, 10 aa, Severe acute respiratory syndrome-related coronavirus
  REGION 1..10: note = Table A: HLA-B*27:02H HLA-B*35:01H HLA-B*15:01H HLA-B*15:03H
  source 1..10: note = Severe acute respiratory syndrome coronavirus 2
GALLTKSSEY

SEQ ID NO: 4263 - protein, 10 aa, Severe acute respiratory syndrome-related coronavirus
  REGION 1..10: note = Table A: HLA-B*45:01H HLA-B*40:02H HLA-B*40:06H HLA-B*41:02H HLA-B*49:01M HLA-B*50:01H
  source 1..10: note = Severe acute respiratory syndrome coronavirus 2
SEYKGPITDV

SEQ ID NO: 4264 - protein, 10 aa, Severe acute respiratory syndrome-related coronavirus
  REGION 1..10: note = Table A: HLA-A*33:03H HLA-A*24:02H HLA-A*24:07M HLA-A*23:01H
  source 1..10: note = Severe acute respiratory syndrome coronavirus 2
EYKGPITDVF

SEQ ID NO: 4265 - protein, 10 aa, Severe acute respiratory syndrome-related coronavirus
  REGION 1..10: note = Table A: HLA-B*15:03H
  source 1..10: note = Severe acute respiratory syndrome coronavirus 2
YKGPITDVFY

SEQ ID NO: 4266 - protein, 10 aa, Severe acute respiratory syndrome-related coronavirus
  REGION 1..10: note = Table A: HLA-A*36:01H
  source 1..10: note = Severe acute respiratory syndrome coronavirus 2
KGPITDVFYK

SEQ ID NO: 4267 - protein, 10 aa, Severe acute respiratory syndrome-related coronavirus
  REGION 1..10: note = Table A: HLA-B*58:01H HLA-C*16:01H HLA-A*36:01H HLA-B*57:01H HLA-A*25:01H HLA-A*29:02H HLA-A*01:01H HLA-A*68:02H HLA-B*57:03H
  source 1..10: note = Severe acute respiratory syndrome coronavirus 2
YTTTIKPVTY

SEQ ID NO: 4268 - protein, 10 aa, Severe acute respiratory syndrome-related coronavirus
  REGION 1..10: note = Table A: HLA-A*11:303H HLA-A*03:01H HLA-A*03:02H HLA-A*11:01M HLA-A*11:02M HLA-A*36:01H HLA-A*68:01H HLA-A*34:02H HLA-C*07:27H
  source 1..10: note = Severe acute respiratory syndrome coronavirus 2
TTTIKPVTYK

SEQ ID NO: 4269 - protein, 10 aa, Severe acute respiratory syndrome-related coronavirus
  REGION 1..10: note = Table A: HLA-A*68:02H HLA-A*02:08H HLA-A*34:02H HLA-B*57:03H HLA-A*66:01H
  source 1..10: note = Severe acute respiratory syndrome coronavirus 2
TTIKPVTYKL

SEQ ID NO: 4270 - protein, 10 aa, Severe acute respiratory syndrome-related coronavirus
  REGION 1..10: note = Table A: HLA-A*02:06H
  source 1..10: note = Severe acute respiratory syndrome coronavirus 2
VVCTEIDPKL

SEQ ID NO: 4271 - protein, 10 aa, Severe acute respiratory syndrome-related coronavirus
  REGION 1..10: note = Table A: HLA-B*44:02M HLA-B*44:05M HLA-C*16:04H HLA-B*46:01M HLA-B*45:01H HLA-B*44:03H HLA-B*18:01M HLA-B*27:02H HLA-A*30:02H HLA-B*35:01H HLA-B*38:02H HLA-B*40:01H HLA-B*40:02H HLA-B*15:01H HLA-B*39:01H HLA-B*07:05H
  REGION 1..10: note = CONT. FROM ABOVE: HLA-B*49:01H HLA-B*50:01H
  source 1..10: note = Severe acute respiratory syndrome coronavirus 2
TEIDPKLDNY

SEQ ID NO: 4272 - protein, 10 aa, Severe acute respiratory syndrome-related coronavirus
  REGION 1..10: note = Table A: HLA-A*36:01H HLA-A*26:01H HLA-A*01:01H HLA-A*34:02H HLA-B*38:02H
  source 1..10: note = Severe acute respiratory syndrome coronavirus 2
EIDPKLDNYY

SEQ ID NO: 4273 - protein, 10 aa, Severe acute respiratory syndrome-related coronavirus
  REGION 1..10: note = Table A: HLA-C*14:02H HLA-C*14:03H HLA-A*24:02H HLA-A*24:07M HLA-A*23:01H
  source 1..10: note = Severe acute respiratory syndrome coronavirus 2
NYYKKDNSYF

SEQ ID NO: 4274 - protein, 10 aa, Severe acute respiratory syndrome-related coronavirus
  REGION 1..10: note = Table A: HLA-C*14:02H HLA-C*14:03M HLA-A*23:01H HLA-B*39:01H
  source 1..10: note = Severe acute respiratory syndrome coronavirus 2
SYFTEQPIDL

SEQ ID NO: 4275 - protein, 10 aa, Severe acute respiratory syndrome-related coronavirus
  REGION 1..10: note = Table A: HLA-A*36:01H HLA-A*01:01H
  source 1..10: note = Severe acute respiratory syndrome coronavirus 2
PIDLVPNQPY

SEQ ID NO: 4276 - protein, 10 aa, Severe acute respiratory syndrome-related coronavirus
  REGION 1..10: note = Table A: HLA-A*02:07H
  source 1..10: note = Severe acute respiratory syndrome coronavirus 2
LVPNQPYPNA

SEQ ID NO: 4277 - protein, 10 aa, Severe acute respiratory syndrome-related coronavirus
  REGION 1..10: note = Table A: HLA-B*55:02H
  source 1..10: note = Severe acute respiratory syndrome coronavirus 2
VPNQPYPNAS

SEQ ID NO: 4278 - protein, 10 aa, Severe acute respiratory syndrome-related coronavirus
  REGION 1..10: note = Table A: HLA-A*24:02H HLA-A*24:07M HLA-A*23:01H
  source 1..10: note = Severe acute respiratory syndrome coronavirus 2
PYPNASFDNF

SEQ ID NO: 4279 - protein, 10 aa, Severe acute respiratory syndrome-related coronavirus
  REGION 1..10: note = Table A: HLA-B*38:02H
  source 1..10: note = Severe acute respiratory syndrome coronavirus 2
IKFADDLNQL

SEQ ID NO: 4280 - protein, 10 aa, Severe acute respiratory syndrome-related coronavirus
  REGION 1..10: note = Table A: HLA-A*36:01H
  source 1..10: note = Severe acute respiratory syndrome coronavirus 2
ADDLNQLTGY

SEQ ID NO: 4281 - protein, 10 aa, Severe acute respiratory syndrome-related coronavirus
  REGION 1..10: note = Table A: HLA-A*34:02H
  source 1..10: note = Severe acute respiratory syndrome coronavirus 2
DDLNQLTGYK

SEQ ID NO: 4282 - protein, 10 aa, Severe acute respiratory syndrome-related coronavirus
  REGION 1..10: note = Table A: HLA-B*57:03H
  source 1..10: note = Severe acute respiratory syndrome coronavirus 2
PASRELKVTF

SEQ ID NO: 4283 - protein, 10 aa, Severe acute respiratory syndrome-related coronavirus
  REGION 1..10: note = Table A: HLA-B*57:03H
  source 1..10: note = Severe acute respiratory syndrome coronavirus 2
ASRELKVTFF

SEQ ID NO: 4284 - protein, 10 aa, Severe acute respiratory syndrome-related coronavirus
  REGION 1..10: note = Table A: HLA-C*14:02H HLA-C*14:03H
  source 1..10: note = Severe acute respiratory syndrome coronavirus 2
FFPDLNGDVV

SEQ ID NO: 4285 - protein, 10 aa, Severe acute respiratory syndrome-related coronavirus
  REGION 1..10: note = Table A: HLA-B*55:02H HLA-B*35:03H HLA-B*35:02H HLA-B*35:08H HLA-B*35:12H HLA-B*54:01H
  source 1..10: note = Severe acute respiratory syndrome coronavirus 2
FPDLNGDVVA

SEQ ID NO: 4286 - protein, 10 aa, Severe acute respiratory syndrome-related coronavirus
  REGION 1..10: note = Table A: HLA-A*25:01M HLA-A*26:01M HLA-A*26:02H HLA-A*26:03M
  source 1..10: note = Severe acute respiratory syndrome coronavirus 2
DVVAIDYKHY

SEQ ID NO: 4287 - protein, 10 aa, Severe acute respiratory syndrome-related coronavirus
  REGION 1..10: note = Table A: HLA-A*33:01H HLA-A*33:03M
  source 1..10: note = Severe acute respiratory syndrome coronavirus 2
DYKHYTPSFK

SEQ ID NO: 4288 - protein, 10 aa, Severe acute respiratory syndrome-related coronavirus
  REGION 1..10: note = Table A: HLA-A*26:03H HLA-A*34:02H HLA-A*66:01H
  source 1..10: note = Severe acute respiratory syndrome coronavirus 2
YTPSFKKGAK

SEQ ID NO: 4289 - protein, 10 aa, Severe acute respiratory syndrome-related coronavirus
  REGION 1..10: note = Table A: HLA-B*07:04M
  source 1..10: note = Severe acute respiratory syndrome coronavirus 2
TPSFKKGAKL

SEQ ID NO: 4290 - protein, 10 aa, Severe acute respiratory syndrome-related coronavirus
  REGION 1..10: note = Table A: HLA-A*02:11M HLA-A*02:02H
  source 1..10: note = Severe acute respiratory syndrome coronavirus 2
LLHKPIVWHV

SEQ ID NO: 4291 - protein, 10 aa, Severe acute respiratory syndrome-related coronavirus
  REGION 1..10: note = Table A: HLA-B*56:01H HLA-B*55:02M HLA-B*55:01H
  source 1..10: note = Severe acute respiratory syndrome coronavirus 2
KPIVWHVNNA

SEQ ID NO: 4292 - protein, 10 aa, Severe acute respiratory syndrome-related coronavirus
  REGION 1..10: note = Table A: HLA-A*30:02M HLA-B*15:01H
  source 1..10: note = Severe acute respiratory syndrome coronavirus 2
VNNATNKATY

SEQ ID NO: 4293 - protein, 10 aa, Severe acute respiratory syndrome-related coronavirus
  REGION 1..10: note = Table A: HLA-A*34:02H
  source 1..10: note = Severe acute respiratory syndrome coronavirus 2
NNATNKATYK

SEQ ID NO: 4294 - protein, 10 aa, Severe acute respiratory syndrome-related coronavirus
  REGION 1..10: note = Table A: HLA-A*33:03M HLA-A*31:01H
  source 1..10: note = Severe acute respiratory syndrome coronavirus 2
TYKPNTWCIR

SEQ ID NO: 4295 - protein, 10 aa, Severe acute respiratory syndrome-related coronavirus
  REGION 1..10: note = Table A: HLA-B*07:04H
  source 1..10: note = Severe acute respiratory syndrome coronavirus 2
KPNTWCIRCL

SEQ ID NO: 4296 - protein, 10 aa, Severe acute respiratory syndrome-related coronavirus
  REGION 1..10: note = Table A: HLA-A*02:11M HLA-A*02:01H HLA-A*02:03H
  source 1..10: note = Severe acute respiratory syndrome coronavirus 2
CLWSTKPVET

SEQ ID NO: 4297 - protein, 10 aa, Severe acute respiratory syndrome-related coronavirus
  REGION 1..10: note = Table A: HLA-B*15:03M
  source 1..10: note = Severe acute respiratory syndrome coronavirus 2
TKPVETSNSF

SEQ ID NO: 4298 - protein, 10 aa, Severe acute respiratory syndrome-related coronavirus
  REGION 1..10: note = Table A: HLA-B*40:01H
  source 1..10: note = Severe acute respiratory syndrome coronavirus 2
VETSNSFDVL

SEQ ID NO: 4299 - protein, 10 aa, Severe acute respiratory syndrome-related coronavirus
  REGION 1..10: note = Table A: HLA-A*68:01M HLA-A*68:02M HLA-A*34:02H HLA-A*66:01H
  source 1..10: note = Severe acute respiratory syndrome coronavirus 2
ETSNSFDVLK

SEQ ID NO: 4300 - protein, 10 aa, Severe acute respiratory syndrome-related coronavirus
  REGION 1..10: note = Table A: HLA-A*02:02H HLA-A*02:03H HLA-B*38:02H HLA-B*15:01H
  source 1..10: note = Severe acute respiratory syndrome coronavirus 2
VLKSEDAQGM

SEQ ID NO: 4301 - protein, 10 aa, Severe acute respiratory syndrome-related coronavirus
  REGION 1..10: note = Table A: HLA-B*44:05H HLA-B*40:01M
  source 1..10: note = Severe acute respiratory syndrome coronavirus 2
SEDAQGMDNL

SEQ ID NO: 4302 - protein, 10 aa, Severe acute respiratory syndrome-related coronavirus
  REGION 1..10: note = Table A: HLA-B*38:02H
  source 1..10: note = Severe acute respiratory syndrome coronavirus 2
DLKPVSEEVV

SEQ ID NO: 4303 - protein, 10 aa, Severe acute respiratory syndrome-related coronavirus
  REGION 1..10: note = Table A: HLA-B*44:05M HLA-B*40:01H HLA-B*40:02H HLA-B*49:01M
  source 1..10: note = Severe acute respiratory syndrome coronavirus 2
SEEVVENPTI

SEQ ID NO: 4304 - protein, 10 aa, Severe acute respiratory syndrome-related coronavirus
  REGION 1..10: note = Table A: HLA-A*11:303H HLA-A*03:02H HLA-A*11:01M HLA-A*11:02H HLA-A*33:03H HLA-A*26:03H HLA-B*27:02H HLA-A*68:01H HLA-A*68:02M HLA-A*34:01H HLA-A*34:02H HLA-C*07:27H HLA-A*66:01H
  source 1..10: note = Severe acute respiratory syndrome coronavirus 2
EVVENPTIQK

SEQ ID NO: 4305 - protein, 10 aa, Severe acute respiratory syndrome-related coronavirus
  REGION 1..10: note = Table A: HLA-B*49:01H
  source 1..10: note = Severe acute respiratory syndrome coronavirus 2
LECNVKTTEV

SEQ ID NO: 4306 - protein, 10 aa, Severe acute respiratory syndrome-related coronavirus
  REGION 1..10: note = Table A: HLA-B*58:01H HLA-A*68:02H HLA-A*02:08H HLA-B*57:03H
  source 1..10: note = Severe acute respiratory syndrome coronavirus 2
KTTEVVGDII

SEQ ID NO: 4307 - protein, 10 aa, Severe acute respiratory syndrome-related coronavirus
  REGION 1..10: note = Table A: HLA-A*26:01H HLA-A*26:02H HLA-A*26:03H HLA-A*68:01H HLA-A*68:02H HLA-A*34:02H
  source 1..10: note = Severe acute respiratory syndrome coronavirus 2
EVVGDIILKP

SEQ ID NO: 4308 - protein, 10 aa, Severe acute respiratory syndrome-related coronavirus
  REGION 1..10: note = Table A: HLA-A*11:303H HLA-C*03:03H HLA-A*02:11H HLA-C*03:04H HLA-C*15:05H HLA-C*01:02H HLA-A*02:08H HLA-B*14:01H HLA-C*08:01H HLA-C*08:03H HLA-B*38:02H
  source 1..10: note = Severe acute respiratory syndrome coronavirus 2
IILKPANNSL

SEQ ID NO: 4309 - protein, 10 aa, Severe acute respiratory syndrome-related coronavirus
  REGION 1..10: note = Table A: HLA-A*03:01H
  source 1..10: note = Severe acute respiratory syndrome coronavirus 2
ILKPANNSLK

SEQ ID NO: 4310 - protein, 10 aa, Severe acute respiratory syndrome-related coronavirus
  REGION 1..10: note = Table A: HLA-C*04:03M HLA-C*08:02H HLA-C*05:01H
  source 1..10: note = Severe acute respiratory syndrome coronavirus 2
ITEEVGHTDL

SEQ ID NO: 4311 - protein, 10 aa, Severe acute respiratory syndrome-related coronavirus
  REGION 1..10: note = Table A: HLA-B*44:05H HLA-B*40:01M
  source 1..10: note = Severe acute respiratory syndrome coronavirus 2
TEEVGHTDLM

SEQ ID NO: 4312 - protein, 10 aa, Severe acute respiratory syndrome-related coronavirus
  REGION 1..10: note = Table A: HLA-B*45:01H HLA-B*50:01H
  source 1..10: note = Severe acute respiratory syndrome coronavirus 2
EEVGHTDLMA

SEQ ID NO: 4313 - protein, 10 aa, Severe acute respiratory syndrome-related coronavirus
  REGION 1..10: note = Table A: HLA-A*30:02H
  source 1..10: note = Severe acute respiratory syndrome coronavirus 2
VGHTDLMAAY

SEQ ID NO: 4314 - protein, 10 aa, Severe acute respiratory syndrome-related coronavirus
  REGION 1..10: note = Table A: HLA-B*38:02H
  source 1..10: note = Severe acute respiratory syndrome coronavirus 2
GHTDLMAAYV

SEQ ID NO: 4315 - protein, 10 aa, Severe acute respiratory syndrome-related coronavirus
  REGION 1..10: note = Table A: HLA-A*11:303H HLA-C*03:03H HLA-C*03:04M HLA-A*68:02H HLA-B*35:03M HLA-C*15:05H HLA-A*34:01H HLA-C*07:27H HLA-B*35:01H HLA-B*35:02H HLA-B*35:07H HLA-C*08:01M HLA-C*08:03H HLA-B*35:12H HLA-B*38:02M
  REGION 1..10: note = CONT. FROM ABOVE: HLA-B*39:01H HLA-B*07:05H
  source 1..10: note = Severe acute respiratory syndrome coronavirus 2
MAAYVDNSSL

SEQ ID NO: 4316 - protein, 10 aa, Severe acute respiratory syndrome-related coronavirus
  REGION 1..10: note = Table A: HLA-C*14:03H HLA-B*27:02H HLA-A*24:02H HLA-A*24:07H HLA-A*23:01M HLA-B*49:01H
  source 1..10: note = Severe acute respiratory syndrome coronavirus 2
AYVDNSSLTI

SEQ ID NO: 4317 - protein, 10 aa, Severe acute respiratory syndrome-related coronavirus
  REGION 1..10: note = Table A: HLA-A*03:02H HLA-A*36:01H HLA-B*27:02H HLA-A*68:01H HLA-A*34:02H
  source 1..10: note = Severe acute respiratory syndrome coronavirus 2
YVDNSSLTIK

SEQ ID NO: 4318 - protein, 10 aa, Severe acute respiratory syndrome-related coronavirus
  REGION 1..10: note = Table A: HLA-A*03:02H HLA-A*11:01H
  source 1..10: note = Severe acute respiratory syndrome coronavirus 2
VDNSSLTIKK

SEQ ID NO: 4319 - protein, 10 aa, Severe acute respiratory syndrome-related coronavirus
  REGION 1..10: note = Table A: HLA-A*74:01H HLA-A*33:03H
  source 1..10: note = Severe acute respiratory syndrome coronavirus 2
TIKKPNELSR

SEQ ID NO: 4320 - protein, 10 aa, Severe acute respiratory syndrome-related coronavirus
  REGION 1..10: note = Table A: HLA-B*56:01H HLA-B*55:02H HLA-C*15:05H
  source 1..10: note = Severe acute respiratory syndrome coronavirus 2
KPNELSRVLG

SEQ ID NO: 4321 - protein, 10 aa, Severe acute respiratory syndrome-related coronavirus
  REGION 1..10: note = Table A: HLA-B*13:02H
  source 1..10: note = Severe acute respiratory syndrome coronavirus 2
RVLGLKTLAT

SEQ ID NO: 4322 - protein, 10 aa, Severe acute respiratory syndrome-related coronavirus
  REGION 1..10: note = Table A: HLA-A*02:02M HLA-A*02:03H
  source 1..10: note = Severe acute respiratory syndrome coronavirus 2
GLKTLATHGL

SEQ ID NO: 4323 - protein, 10 aa, Severe acute respiratory syndrome-related coronavirus
  REGION 1..10: note = Table A: HLA-B*55:02H HLA-C*15:05H HLA-A*02:08H
  source 1..10: note = Severe acute respiratory syndrome coronavirus 2
KTLATHGLAA

SEQ ID NO: 4324 - protein, 10 aa, Severe acute respiratory syndrome-related coronavirus
  REGION 1..10: note = Table A: HLA-A*02:11H HLA-A*68:02H HLA-A*02:04H HLA-A*02:05H HLA-A*02:06H HLA-A*02:08H HLA-A*02:01M HLA-A*02:02H HLA-A*02:03H HLA-B*38:02M
  source 1..10: note = Severe acute respiratory syndrome coronavirus 2
TLATHGLAAV

SEQ ID NO: 4325 - protein, 10 aa, Severe acute respiratory syndrome-related coronavirus
  REGION 1..10: note = Table A: HLA-B*38:02H HLA-B*39:01H
  source 1..10: note = Severe acute respiratory syndrome coronavirus 2
THGLAAVNSV

SEQ ID NO: 4326 - protein, 10 aa, Severe acute respiratory syndrome-related coronavirus
  REGION 1..10: note = Table A: HLA-A*11:01H HLA-A*11:02H HLA-A*25:01M HLA-A*26:01M HLA-A*26:02M HLA-A*26:03M HLA-A*29:01H HLA-A*29:02H HLA-A*30:02M HLA-A*34:02H
  source 1..10: note = Severe acute respiratory syndrome coronavirus 2
SVPWDTIANY

SEQ ID NO: 4327 - protein, 10 aa, Severe acute respiratory syndrome-related coronavirus
  REGION 1..10: note = Table A: HLA-B*56:01H HLA-B*55:02M HLA-B*55:01H HLA-B*54:01H
  source 1..10: note = Severe acute respiratory syndrome coronavirus 2
VPWDTIANYA

SEQ ID NO: 4328 - protein, 10 aa, Severe acute respiratory syndrome-related coronavirus
  REGION 1..10: note = Table A: HLA-A*02:02H
  source 1..10: note = Severe acute respiratory syndrome coronavirus 2
TIANYAKPFL

SEQ ID NO: 4329 - protein, 10 aa, Severe acute respiratory syndrome-related coronavirus
  REGION 1..10: note = Table A: HLA-A*03:01H HLA-A*11:02H HLA-A*34:02H
  source 1..10: note = Severe acute respiratory syndrome coronavirus 2
ANYAKPFLNK

SEQ ID NO: 4330 - protein, 10 aa, Severe acute respiratory syndrome-related coronavirus
  REGION 1..10: note = Table A: HLA-C*12:03H HLA-B*07:04H
  source 1..10: note = Severe acute respiratory syndrome coronavirus 2
YAKPFLNKVV

SEQ ID NO: 4331 - protein, 10 aa, Severe acute respiratory syndrome-related coronavirus
  REGION 1..10: note = Table A: HLA-B*42:01H HLA-B*56:01M HLA-B*55:02H HLA-C*15:05H HLA-B*55:01M HLA-B*54:01H HLA-B*07:02H HLA-B*07:04M
  source 1..10: note = Severe acute respiratory syndrome coronavirus 2
KPFLNKVVST

SEQ ID NO: 4332 - protein, 10 aa, Severe acute respiratory syndrome-related coronavirus
  REGION 1..10: note = Table A: HLA-A*02:08H
  source 1..10: note = Severe acute respiratory syndrome coronavirus 2
KVVSTTTNIV

SEQ ID NO: 4333 - protein, 10 aa, Severe acute respiratory syndrome-related coronavirus
  REGION 1..10: note = Table A: HLA-A*74:01H HLA-A*11:01H HLA-A*36:01H HLA-B*57:01H HLA-A*33:03H HLA-A*68:01M HLA-A*31:01H
  source 1..10: note = Severe acute respiratory syndrome coronavirus 2
VSTTTNIVTR

SEQ ID NO: 4334 - protein, 10 aa, Severe acute respiratory syndrome-related coronavirus
  REGION 1..10: note = Table A: HLA-A*02:08H
  source 1..10: note = Severe acute respiratory syndrome coronavirus 2
STTTNIVTRC

SEQ ID NO: 4335 - protein, 10 aa, Severe acute respiratory syndrome-related coronavirus
  REGION 1..10: note = Table A: HLA-A*68:02H
  source 1..10: note = Severe acute respiratory syndrome coronavirus 2
TTTNIVTRCL

SEQ ID NO: 4336 - protein, 10 aa, Severe acute respiratory syndrome-related coronavirus
  REGION 1..10: note = Table A: HLA-A*24:02H HLA-A*24:07M HLA-A*23:01H
  source 1..10: note = Severe acute respiratory syndrome coronavirus 2
NYMPYFFTLL

SEQ ID NO: 4337 - protein, 10 aa, Severe acute respiratory syndrome-related coronavirus
  REGION 1..10: note = Table A: HLA-A*34:02H
  source 1..10: note = Severe acute respiratory syndrome coronavirus 2
FTRSTNSRIK

SEQ ID NO: 4338 - protein, 10 aa, Severe acute respiratory syndrome-related coronavirus
  REGION 1..10: note = Table A: HLA-B*07:04H
  source 1..10: note = Severe acute respiratory syndrome coronavirus 2
STNSRIKASM

SEQ ID NO: 4339 - protein, 10 aa, Severe acute respiratory syndrome-related coronavirus
  REGION 1..10: note = Table A: HLA-B*58:02H HLA-B*07:04H HLA-B*13:02H
  source 1..10: note = Severe acute respiratory syndrome coronavirus 2
RIKASMPTTI

SEQ ID NO: 4340 - protein, 10 aa, Severe acute respiratory syndrome-related coronavirus
  REGION 1..10: note = Table A: HLA-A*03:01H HLA-A*03:02M HLA-A*11:01H HLA-A*36:01H
  source 1..10: note = Severe acute respiratory syndrome coronavirus 2
KASMPTTIAK

SEQ ID NO: 4341 - protein, 10 aa, Severe acute respiratory syndrome-related coronavirus
  REGION 1..10: note = Table A: HLA-B*56:01H HLA-B*53:01H HLA-B*55:02H HLA-A*68:02H HLA-B*35:03M HLA-C*15:05M HLA-B*55:01M HLA-B*35:01H HLA-B*35:02H HLA-B*51:01H HLA-B*35:12H HLA-B*38:02H HLA-B*54:01H HLA-B*07:02H HLA-B*07:04H HLA-B*07:05H
  source 1..10: note = Severe acute respiratory syndrome coronavirus 2
MPTTIAKNTV

SEQ ID NO: 4342 - protein, 10 aa, Severe acute respiratory syndrome-related coronavirus
  REGION 1..10: note = Table A: HLA-A*02:08H HLA-A*02:03H
  source 1..10: note = Severe acute respiratory syndrome coronavirus 2
TIAKNTVKSV

SEQ ID NO: 4343 - protein, 10 aa, Severe acute respiratory syndrome-related coronavirus
  REGION 1..10: note = Table A: HLA-B*07:04H
  source 1..10: note = Severe acute respiratory syndrome coronavirus 2
TVKSVGKFCL

SEQ ID NO: 4344 - protein, 10 aa, Severe acute respiratory syndrome-related coronavirus
  REGION 1..10: note = Table A: HLA-A*24:07H
  source 1..10: note = Severe acute respiratory syndrome coronavirus 2
SFNYLKSPNF

SEQ ID NO: 4345 - protein, 10 aa, Severe acute respiratory syndrome-related coronavirus
  REGION 1..10: note = Table A: HLA-A*02:02H HLA-A*02:03H HLA-B*38:02H HLA-B*07:04H
  source 1..10: note = Severe acute respiratory syndrome coronavirus 2
YLKSPNFSKL

SEQ ID NO: 4346 - protein, 10 aa, Severe acute respiratory syndrome-related coronavirus
  REGION 1..10: note = Table A: HLA-B*42:01H HLA-C*15:05H HLA-B*07:04M
  source 1..10: note = Severe acute respiratory syndrome coronavirus 2
SPNFSKLINI

SEQ ID NO: 4347 - protein, 10 aa, Severe acute respiratory syndrome-related coronavirus
  REGION 1..10: note = Table A: HLA-A*02:11M HLA-A*02:04M HLA-A*02:02M HLA-B*40:06H
  source 1..10: note = Severe acute respiratory syndrome coronavirus 2
KLINIIIWFL

SEQ ID NO: 4348 - protein, 10 aa, Severe acute respiratory syndrome-related coronavirus
  REGION 1..10: note = Table A: HLA-A*11:303H HLA-C*15:05H
  source 1..10: note = Severe acute respiratory syndrome coronavirus 2
AALGVLMSNL

SEQ ID NO: 4349 - protein, 10 aa, Severe acute respiratory syndrome-related coronavirus
  REGION 1..10: note = Table A: HLA-A*02:02H
  source 1..10: note = Severe acute respiratory syndrome coronavirus 2
ALGVLMSNLG

SEQ ID NO: 4350 - protein, 10 aa, Severe acute respiratory syndrome-related coronavirus
  REGION 1..10: note = Table A: HLA-A*36:01H HLA-A*29:01H HLA-A*29:02H HLA-A*30:02H
  source 1..10: note = Severe acute respiratory syndrome coronavirus 2
LMSNLGMPSY

SEQ ID NO: 4351 - protein, 10 aa, Severe acute respiratory syndrome-related coronavirus
  REGION 1..10: note = Table A: HLA-B*40:02H HLA-B*49:01H
  source 1..10: note = Severe acute respiratory syndrome coronavirus 2
REGYLNSTNV

SEQ ID NO: 4352 - protein, 10 aa, Severe acute respiratory syndrome-related coronavirus
  REGION 1..10: note = Table A: HLA-A*24:02H HLA-C*08:03H HLA-A*23:01H
  source 1..10: note = Severe acute respiratory syndrome coronavirus 2
GYLNSTNVTI

SEQ ID NO: 4353 - protein, 10 aa, Severe acute respiratory syndrome-related coronavirus
  REGION 1..10: note = Table A: HLA-A*25:01H HLA-A*30:02H HLA-B*35:01H HLA-B*07:05H
  source 1..10: note = Severe acute respiratory syndrome coronavirus 2
NSTNVTIATY

SEQ ID NO: 4354 - protein, 10 aa, Severe acute respiratory syndrome-related coronavirus
  REGION 1..10: note = Table A: HLA-A*24:02H HLA-A*24:07H HLA-A*23:01H
  source 1..10: note = Severe acute respiratory syndrome coronavirus 2
TYPSLETIQI

SEQ ID NO: 4355 - protein, 10 aa, Severe acute respiratory syndrome-related coronavirus
  REGION 1..10: note = Table A: HLA-C*15:05H HLA-B*57:03H
  source 1..10: note = Severe acute respiratory syndrome coronavirus 2
PSLETIQITI

SEQ ID NO: 4356 - protein, 10 aa, Severe acute respiratory syndrome-related coronavirus
  REGION 1..10: note = Table A: HLA-B*44:05H HLA-A*25:01H HLA-A*33:03H HLA-A*26:01H HLA-A*26:02H HLA-A*26:03H HLA-A*68:01H HLA-A*68:02M HLA-A*34:01M HLA-A*34:02M HLA-B*38:02H HLA-A*66:01M
  source 1..10: note = Severe acute respiratory syndrome coronavirus 2
ETIQITISSF

SEQ ID NO: 4357 - protein, 10 aa, Severe acute respiratory syndrome-related coronavirus
  REGION 1..10: note = Table A: HLA-A*03:02H
  source 1..10: note = Severe acute respiratory syndrome coronavirus 2
TIQITISSFK

SEQ ID NO: 4358 - protein, 10 aa, Severe acute respiratory syndrome-related coronavirus
  REGION 1..10: note = Table A: HLA-A*24:07H HLA-B*57:03H
  source 1..10: note = Severe acute respiratory syndrome coronavirus 2
IQITISSFKW

SEQ ID NO: 4359 - protein, 10 aa, Severe acute respiratory syndrome-related coronavirus
  REGION 1..10: note = Table A: HLA-B*46:01H HLA-C*15:05H HLA-A*32:01H HLA-B*57:03M
  source 1..10: note = Severe acute respiratory syndrome coronavirus 2
SSFKWDLTAF

SEQ ID NO: 4360 - protein, 10 aa, Severe acute respiratory syndrome-related coronavirus
  REGION 1..10: note = Table A: HLA-C*04:01H
  source 1..10: note = Severe acute respiratory syndrome coronavirus 2
KWDLTAFGLV

SEQ ID NO: 4361 - protein, 10 aa, Severe acute respiratory syndrome-related coronavirus
  REGION 1..10: note = Table A: HLA-B*57:03H
  source 1..10: note = Severe acute respiratory syndrome coronavirus 2
LTAFGLVAEW

SEQ ID NO: 4362 - protein, 10 aa, Severe acute respiratory syndrome-related coronavirus
  REGION 1..10: note = Table A: HLA-C*14:03H HLA-A*29:02H HLA-A*30:02H
  source 1..10: note = Severe acute respiratory syndrome coronavirus 2
AYILFTRFFY

SEQ ID NO: 4363 - protein, 10 aa, Severe acute respiratory syndrome-related coronavirus
  REGION 1..10: note = Table A: HLA-A*02:04H HLA-A*02:02H
  source 1..10: note = Severe acute respiratory syndrome coronavirus 2
ILFTRFFYVL

SEQ ID NO: 4364 - protein, 10 aa, Severe acute respiratory syndrome-related coronavirus
  REGION 1..10: note = Table A: HLA-C*14:03H
  source 1..10: note = Severe acute respiratory syndrome coronavirus 2
FFYVLGLAAI

SEQ ID NO: 4365 - protein, 10 aa, Severe acute respiratory syndrome-related coronavirus
  REGION 1..10: note = Table A: HLA-A*24:07H
  source 1..10: note = Severe acute respiratory syndrome coronavirus 2
LFFSYFAVHF

SEQ ID NO: 4366 - protein, 10 aa, Severe acute respiratory syndrome-related coronavirus
  REGION 1..10: note = Table A: HLA-B*58:01H HLA-B*57:01H HLA-A*25:01H HLA-B*53:01H HLA-B*57:03H
  source 1..10: note = Severe acute respiratory syndrome coronavirus 2
FAVHFISNSW

SEQ ID NO: 4367 - protein, 10 aa, Severe acute respiratory syndrome-related coronavirus
  REGION 1..10: note = Table A: HLA-A*24:07M HLA-A*23:01H
  source 1..10: note = Severe acute respiratory syndrome coronavirus 2
HFISNSWLMW

SEQ ID NO: 4368 - protein, 10 aa, Severe acute respiratory syndrome-related coronavirus
  REGION 1..10: note = Table A: HLA-B*13:02H
  source 1..10: note = Severe acute respiratory syndrome coronavirus 2
VQMAPISAMV

SEQ ID NO: 4369 - protein, 10 aa, Severe acute respiratory syndrome-related coronavirus
  REGION 1..10: note = Table A: HLA-A*74:01H HLA-A*34:01H
  source 1..10: note = Severe acute respiratory syndrome coronavirus 2
QMAPISAMVR

SEQ ID NO: 4370 - protein, 10 aa, Severe acute respiratory syndrome-related coronavirus
  REGION 1..10: note = Table A: HLA-B*35:01H HLA-B*35:07H
  source 1..10: note = Severe acute respiratory syndrome coronavirus 2
APISAMVRMY

SEQ ID NO: 4371 - protein, 10 aa, Severe acute respiratory syndrome-related coronavirus
  REGION 1..10: note = Table A: HLA-A*30:02H
  source 1..10: note = Severe acute respiratory syndrome coronavirus 2
RMYIFFASFY

SEQ ID NO: 4372 - protein, 10 aa, Severe acute respiratory syndrome-related coronavirus
  REGION 1..10: note = Table A: HLA-A*29:02H
  source 1..10: note = Severe acute respiratory syndrome coronavirus 2
MYIFFASFYY

SEQ ID NO: 4373 - protein, 10 aa, Severe acute respiratory syndrome-related coronavirus
  REGION 1..10: note = Table A: HLA-A*24:07H
  source 1..10: note = Severe acute respiratory syndrome coronavirus 2
IFFASFYYVW

SEQ ID NO: 4374 - protein, 10 aa, Severe acute respiratory syndrome-related coronavirus
  REGION 1..10: note = Table A: HLA-A*02:11M
  source 1..10: note = Severe acute respiratory syndrome coronavirus 2
YVWKSYVHVV

SEQ ID NO: 4375 - protein, 10 aa, Severe acute respiratory syndrome-related coronavirus
  REGION 1..10: note = Table A: HLA-A*02:08H HLA-B*38:02H
  source 1..10: note = Severe acute respiratory syndrome coronavirus 2
HVVDGCNSST

SEQ ID NO: 4376 - protein, 10 aa, Severe acute respiratory syndrome-related coronavirus
  REGION 1..10: note = Table A: HLA-B*49:01H
  source 1..10: note = Severe acute respiratory syndrome coronavirus 2
VECTTIVNGV

SEQ ID NO: 4377 - protein, 10 aa, Severe acute respiratory syndrome-related coronavirus
  REGION 1..10: note = Table A: HLA-A*33:03H HLA-A*26:03H HLA-A*68:01M HLA-A*34:01M HLA-A*34:02H HLA-A*66:01M
  source 1..10: note = Severe acute respiratory syndrome coronavirus 2
ECTTIVNGVR

SEQ ID NO: 4378 - protein, 10 aa, Severe acute respiratory syndrome-related coronavirus
  REGION 1..10: note = Table A: HLA-A*30:02H
  source 1..10: note = Severe acute respiratory syndrome coronavirus 2
IVNGVRRSFY

SEQ ID NO: 4379 - protein, 10 aa, Severe acute respiratory syndrome-related coronavirus
  REGION 1..10: note = Table A: HLA-A*11:303H HLA-A*25:01M HLA-B*46:01H HLA-A*26:01M HLA-A*26:02H HLA-A*26:03M HLA-C*03:02H HLA-C*03:04H HLA-A*68:02H HLA-A*34:01M HLA-A*34:02H HLA-B*38:02M HLA-B*07:04H HLA-B*15:01H HLA-B*15:02M
  REGION 1..10: note = CONT. FROM ABOVE: HLA-A*66:01M
  source 1..10: note = Severe acute respiratory syndrome coronavirus 2
YVYANGGKGF

SEQ ID NO: 4380 - protein, 10 aa, Severe acute respiratory syndrome-related coronavirus
  REGION 1..10: note = Table A: HLA-A*68:02M HLA-A*34:02H
  source 1..10: note = Severe acute respiratory syndrome coronavirus 2
DTFCAGSTFI

SEQ ID NO: 4381 - protein, 10 aa, Severe acute respiratory syndrome-related coronavirus
  REGION 1..10: note = Table A: HLA-A*74:01H HLA-A*11:01H HLA-A*11:02H HLA-A*26:03H HLA-B*27:02H HLA-A*68:01M HLA-A*68:02H HLA-A*34:01H HLA-A*34:02H HLA-A*66:01H
  source 1..10: note = Severe acute respiratory syndrome coronavirus 2
STFISDEVAR

SEQ ID NO: 4382 - protein, 10 aa, Severe acute respiratory syndrome-related coronavirus
  REGION 1..10: note = Table A: HLA-C*03:04H HLA-C*01:02H HLA-A*02:05H HLA-A*02:02M
  source 1..10: note = Severe acute respiratory syndrome coronavirus 2
FISDEVARDL

SEQ ID NO: 4383 - protein, 10 aa, Severe acute respiratory syndrome-related coronavirus
  REGION 1..10: note = Table A: HLA-A*25:01H HLA-A*26:01H HLA-A*26:02H HLA-A*26:03H HLA-A*34:01H HLA-A*34:02H
  source 1..10: note = Severe acute respiratory syndrome coronavirus 2
EVARDLSLQF

SEQ ID NO: 4384 - protein, 10 aa, Severe acute respiratory syndrome-related coronavirus
  REGION 1..10: note = Table A: HLA-A*34:02H
  source 1..10: note = Severe acute respiratory syndrome coronavirus 2
VARDLSLQFK

SEQ ID NO: 4385 - protein, 10 aa, Severe acute respiratory syndrome-related coronavirus
  REGION 1..10: note = Table A: HLA-B*56:01H HLA-B*55:02H
  source 1..10: note = Severe acute respiratory syndrome coronavirus 2
RPINPTDQSS

SEQ ID NO: 4386 - protein, 10 aa, Severe acute respiratory syndrome-related coronavirus
  REGION 1..10: note = Table A: HLA-B*15:01H
  source 1..10: note = Severe acute respiratory syndrome coronavirus 2
PINPTDQSSY

SEQ ID NO: 4387 - protein, 10 aa, Severe acute respiratory syndrome-related coronavirus
  REGION 1..10: note = Table A: HLA-A*68:02H HLA-C*15:05H
  source 1..10: note = Severe acute respiratory syndrome coronavirus 2
SSYIVDSVTV

SEQ ID NO: 4388 - protein, 10 aa, Severe acute respiratory syndrome-related coronavirus
  REGION 1..10: note = Table A: HLA-B*27:02H HLA-A*30:02H HLA-A*23:01H
  source 1..10: note = Severe acute respiratory syndrome coronavirus 2
SYIVDSVTVK

SEQ ID NO: 4389 - protein, 10 aa, Severe acute respiratory syndrome-related coronavirus
  REGION 1..10: note = Table A: HLA-A*02:07H
  source 1..10: note = Severe acute respiratory syndrome coronavirus 2
IVDSVTVKNG

SEQ ID NO: 4390 - protein, 10 aa, Severe acute respiratory syndrome-related coronavirus
  REGION 1..10: note = Table A: HLA-B*57:03H
  source 1..10: note = Severe acute respiratory syndrome coronavirus 2
VTVKNGSIHL

SEQ ID NO: 4391 - protein, 10 aa, Severe acute respiratory syndrome-related coronavirus
  REGION 1..10: note = Table A: HLA-A*25:01H HLA-B*46:01H HLA-A*26:01M HLA-A*26:02M HLA-A*26:03M HLA-A*29:02H HLA-A*30:02H HLA-C*12:02H HLA-A*34:01H HLA-A*34:02H HLA-B*38:02H HLA-B*15:01M HLA-B*15:02H HLA-A*31:01H
  source 1..10: note = Severe acute respiratory syndrome coronavirus 2
TVKNGSIHLY

SEQ ID NO: 4392 - protein, 10 aa, Severe acute respiratory syndrome-related coronavirus
  REGION 1..10: note = Table A: HLA-B*15:03H
  source 1..10: note = Severe acute respiratory syndrome coronavirus 2
VKNGSIHLYF

SEQ ID NO: 4393 - protein, 10 aa, Severe acute respiratory syndrome-related coronavirus
  REGION 1..10: note = Table A: HLA-A*03:01H HLA-A*34:02H
  source 1..10: note = Severe acute respiratory syndrome coronavirus 2
HLYFDKAGQK

SEQ ID NO: 4394 - protein, 10 aa, Severe acute respiratory syndrome-related coronavirus
  REGION 1..10: note = Table A: HLA-A*36:01M HLA-A*29:01H HLA-A*29:02M HLA-A*01:01H HLA-C*04:03H HLA-A*30:02H HLA-B*38:02H HLA-B*07:05H
  source 1..10: note = Severe acute respiratory syndrome coronavirus 2
YFDKAGQKTY

SEQ ID NO: 4395 - protein, 10 aa, Severe acute respiratory syndrome-related coronavirus
  REGION 1..10: note = Table A: HLA-B*15:01H
  source 1..10: note = Severe acute respiratory syndrome coronavirus 2
GQKTYERHSL

SEQ ID NO: 4396 - protein, 10 aa, Severe acute respiratory syndrome-related coronavirus
  REGION 1..10: note = Table A: HLA-A*03:01H
  source 1..10: note = Severe acute respiratory syndrome coronavirus 2
KTYERHSLSH

SEQ ID NO: 4397 - protein, 10 aa, Severe acute respiratory syndrome-related coronavirus
  REGION 1..10: note = Table A: HLA-A*24:07H HLA-A*23:01H
  source 1..10: note = Severe acute respiratory syndrome coronavirus 2
TYERHSLSHF

SEQ ID NO: 4398 - protein, 10 aa, Severe acute respiratory syndrome-related coronavirus
  REGION 1..10: note = Table A: HLA-B*38:02H
  source 1..10: note = Severe acute respiratory syndrome coronavirus 2
RHSLSHFVNL

SEQ ID NO: 4399 - protein, 10 aa, Severe acute respiratory syndrome-related coronavirus
  REGION 1..10: note = Table A: HLA-A*68:02H HLA-C*08:01H
  source 1..10: note = Severe acute respiratory syndrome coronavirus 2
LSHFVNLDNL

SEQ ID NO: 4400 - protein, 10 aa, Severe acute respiratory syndrome-related coronavirus
  REGION 1..10: note = Table A: HLA-B*38:02H
  source 1..10: note = Severe acute respiratory syndrome coronavirus 2
SHFVNLDNLR

SEQ ID NO: 4401 - protein, 10 aa, Severe acute respiratory syndrome-related coronavirus
  REGION 1..10: note = Table A: HLA-A*68:02H
  source 1..10: note = Severe acute respiratory syndrome coronavirus 2
NTKGSLPINV

SEQ ID NO: 4402 - protein, 10 aa, Severe acute respiratory syndrome-related coronavirus
  REGION 1..10: note = Table A: HLA-B*57:03M
  source 1..10: note = Severe acute respiratory syndrome coronavirus 2
GSLPINVIVF

SEQ ID NO: 4403 - protein, 10 aa, Severe acute respiratory syndrome-related coronavirus
  REGION 1..10: note = Table A: HLA-B*54:01H
  source 1..10: note = Severe acute respiratory syndrome coronavirus 2
LPINVIVFDG

SEQ ID NO: 4404 - protein, 10 aa, Severe acute respiratory syndrome-related coronavirus
  REGION 1..10: note = Table A: HLA-A*26:03H HLA-A*68:01H HLA-A*34:01H HLA-A*34:02H HLA-A*66:01H
  source 1..10: note = Severe acute respiratory syndrome coronavirus 2
NVIVFDGKSK

SEQ ID NO: 4405 - protein, 10 aa, Severe acute respiratory syndrome-related coronavirus
  REGION 1..10: note = Table A: HLA-B*58:01H HLA-A*36:01H HLA-A*30:02H HLA-B*57:03H
  source 1..10: note = Severe acute respiratory syndrome coronavirus 2
SSAKSASVYY

SEQ ID NO: 4406 - protein, 10 aa, Severe acute respiratory syndrome-related coronavirus
  REGION 1..10: note = Table A: HLA-B*58:02H HLA-C*15:05H HLA-C*15:02H HLA-A*02:08H HLA-B*57:03M
  source 1..10: note = Severe acute respiratory syndrome coronavirus 2
KSASVYYSQL

SEQ ID NO: 4407 - protein, 10 aa, Severe acute respiratory syndrome-related coronavirus
  REGION 1..10: note = Table A: HLA-B*35:03H HLA-C*15:05M HLA-B*35:01H HLA-B*35:02H HLA-B*35:12H HLA-B*07:05H
  source 1..10: note = Severe acute respiratory syndrome coronavirus 2
QPILLLDQAL

SEQ ID NO: 4408 - protein, 10 aa, Severe acute respiratory syndrome-related coronavirus
  REGION 1..10: note = Table A: HLA-B*38:02H HLA-B*39:01H
  source 1..10: note = Severe acute respiratory syndrome coronavirus 2
ALVSDVGDSA

SEQ ID NO: 4409 - protein, 10 aa, Severe acute respiratory syndrome-related coronavirus
  REGION 1..10: note = Table A: HLA-C*08:02H HLA-C*05:01H
  source 1..10: note = Severe acute respiratory syndrome coronavirus 2
VSDVGDSAEV

SEQ ID NO: 4410 - protein, 10 aa, Severe acute respiratory syndrome-related coronavirus
  REGION 1..10: note = Table A: HLA-A*68:02H
  source 1..10: note = Severe acute respiratory syndrome coronavirus 2
DVGDSAEVAV

SEQ ID NO: 4411 - protein, 10 aa, Severe acute respiratory syndrome-related coronavirus
  REGION 1..10: note = Table A: HLA-A*03:02H HLA-A*36:01H
  source 1..10: note = Severe acute respiratory syndrome coronavirus 2
VGDSAEVAVK

SEQ ID NO: 4412 - protein, 10 aa, Severe acute respiratory syndrome-related coronavirus
  REGION 1..10: note = Table A: HLA-A*25:01H HLA-A*26:02H
  source 1..10: note = Severe acute respiratory syndrome coronavirus 2
DSAEVAVKMF

SEQ ID NO: 4413 - protein, 10 aa, Severe acute respiratory syndrome-related coronavirus
  REGION 1..10: note = Table A: HLA-B*45:01M HLA-B*40:06M HLA-B*50:01M
  source 1..10: note = Severe acute respiratory syndrome coronavirus 2
AEVAVKMFDA

SEQ ID NO: 4414 - protein, 10 aa, Severe acute respiratory syndrome-related coronavirus
  REGION 1..10: note = Table A: HLA-A*25:01M HLA-A*26:01M HLA-A*26:02M HLA-A*26:03H HLA-B*38:02H
  source 1..10: note = Severe acute respiratory syndrome coronavirus 2
EVAVKMFDAY

SEQ ID NO: 4415 - protein, 10 aa, Severe acute respiratory syndrome-related coronavirus
  REGION 1..10: note = Table A: HLA-B*58:01M HLA-B*58:02H HLA-C*14:02H HLA-C*14:03H HLA-A*74:01H HLA-B*44:05H HLA-A*03:02H HLA-B*57:01H HLA-B*46:01H HLA-C*07:01H HLA-A*02:11M HLA-B*27:02H HLA-A*30:02H HLA-C*12:02H HLA-A*02:04H HLA-A*02:05H
  REGION 1..10: note = CONT. FROM ABOVE: HLA-A*02:07H HLA-A*02:08H HLA-A*02:01H HLA- A*02:02H HLA-A*02:03H HLA-A*24:02H HLA-A*24:07M HLA-C*08:01H HLA-A*23:01M HLA-B*38:02M HLA-A*32:01H HLA-B*40:06H HLA-B*15 :01M HLA-B*15:03M HLA-B*07:05H HLA-B*57:03H HLA-B*13:01M
  source 1..10: note = Severe acute respiratory syndrome coronavirus 2
KMFDAYVNTF

SEQ ID NO: 4416 - protein, 10 aa, Severe acute respiratory syndrome-related coronavirus
  REGION 1..10: note = Table A: HLA-C*14:02H HLA-C*14:03M HLA-B*27:02H HLA-A*24:02M HLA-A*24:07M HLA-A*23:01M
  source 1..10: note = Severe acute respiratory syndrome coronavirus 2
AYVNTFSSTF

SEQ ID NO: 4417 - protein, 10 aa, Severe acute respiratory syndrome-related coronavirus
  REGION 1..10: note = Table A: HLA-A*11:303H HLA-A*03:02H HLA-A*11:01M HLA-A*11:02H HLA-A*36:01H HLA-A*34:02H HLA-C*07:27H
  source 1..10: note = Severe acute respiratory syndrome coronavirus 2
SSTFNVPMEK

SEQ ID NO: 4418 - protein, 10 aa, Severe acute respiratory syndrome-related coronavirus
  REGION 1..10: note = Table A: HLA-A*11:01H HLA-A*11:02H HLA-A*02:11H HLA-A*68:01H HLA-A*68:02M HLA-A*02:05M HLA-A*02:08M HLA-A*02:02H HLA-A*34:02H HLA-B*57:03H
  source 1..10: note = Severe acute respiratory syndrome coronavirus 2
STFNVPMEKL

SEQ ID NO: 4419 - protein, 10 aa, Severe acute respiratory syndrome-related coronavirus
  REGION 1..10: note = Table A: HLA-B*56:01H HLA-B*55:02H HLA-C*15:05H HLA-B*51:01H HLA-B*07:04H
  source 1..10: note = Severe acute respiratory syndrome coronavirus 2
VPMEKLKTLV

SEQ ID NO: 4420 - protein, 10 aa, Severe acute respiratory syndrome-related coronavirus
  REGION 1..10: note = Table A: HLA-A*02:02H HLA-B*38:02H HLA-B*39:01H
  source 1..10: note = Severe acute respiratory syndrome coronavirus 2
TLVATAEAEL

SEQ ID NO: 4421 - protein, 10 aa, Severe acute respiratory syndrome-related coronavirus
  REGION 1..10: note = Table A: HLA-B*45:01M HLA-B*40:06H HLA-B*41:02H HLA-B*50:01M
  source 1..10: note = Severe acute respiratory syndrome coronavirus 2
AEAELAKNVS

SEQ ID NO: 4422 - protein, 10 aa, Severe acute respiratory syndrome-related coronavirus
  REGION 1..10: note = Table A: HLA-B*35:02H HLA-B*39:01H
  source 1..10: note = Severe acute respiratory syndrome coronavirus 2
EAELAKNVSL

SEQ ID NO: 4423 - protein, 10 aa, Severe acute respiratory syndrome-related coronavirus
  REGION 1..10: note = Table A: HLA-B*58:01H HLA-B*57:01H HLA-B*46:01H HLA-C*15:05H HLA-A*23:01H HLA-B*57:03M
  source 1..10: note = Severe acute respiratory syndrome coronavirus 2
VSLDNVLSTF

SEQ ID NO: 4424 - protein, 10 aa, Severe acute respiratory syndrome-related coronavirus
  REGION 1..10: note = Table A: HLA-A*02:07H HLA-B*38:02H
  source 1..10: note = Severe acute respiratory syndrome coronavirus 2
SLDNVLSTFI

SEQ ID NO: 4425 - protein, 10 aa, Severe acute respiratory syndrome-related coronavirus
  REGION 1..10: note = Table A: HLA-B*54:01H
  source 1..10: note = Severe acute respiratory syndrome coronavirus 2
DNVLSTFISA

SEQ ID NO: 4426 - protein, 10 aa, Severe acute respiratory syndrome-related coronavirus
  REGION 1..10: note = Table A: HLA-B*55:02H HLA-B*54:01H
  source 1..10: note = Severe acute respiratory syndrome coronavirus 2
NVLSTFISAA

SEQ ID NO: 4427 - protein, 10 aa, Severe acute respiratory syndrome-related coronavirus
  REGION 1..10: note = Table A: HLA-A*74:01M HLA-A*26:03H HLA-A*34:01H HLA-A*66:01H
  source 1..10: note = Severe acute respiratory syndrome coronavirus 2
VLSTFISAAR

SEQ ID NO: 4428 - protein, 10 aa, Severe acute respiratory syndrome-related coronavirus
  REGION 1..10: note = Table A: HLA-C*14:02H HLA-C*14:03H HLA-A*24:07M HLA-A*23:01H
  source 1..10: note = Severe acute respiratory syndrome coronavirus 2
TFISAARQGF

SEQ ID NO: 4429 - protein, 10 aa, Severe acute respiratory syndrome-related coronavirus
  REGION 1..10: note = Table A: HLA-B*27:02H
  source 1..10: note = Severe acute respiratory syndrome coronavirus 2
GFVDSDVETK

SEQ ID NO: 4430 - protein, 10 aa, Severe acute respiratory syndrome-related coronavirus
  REGION 1..10: note = Table A: HLA-B*40:01H HLA-B*40:02H
  source 1..10: note = Severe acute respiratory syndrome coronavirus 2
VETKDVVECL

SEQ ID NO: 4431 - protein, 10 aa, Severe acute respiratory syndrome-related coronavirus
  REGION 1..10: note = Table A: HLA-A*34:02H
  source 1..10: note = Severe acute respiratory syndrome coronavirus 2
ETKDVVECLK

SEQ ID NO: 4432 - protein, 10 aa, Severe acute respiratory syndrome-related coronavirus
  REGION 1..10: note = Table A: HLA-A*02:02M
  source 1..10: note = Severe acute respiratory syndrome coronavirus 2
KLSHQSDIEV

SEQ ID NO: 4433 - protein, 10 aa, Severe acute respiratory syndrome-related coronavirus
  REGION 1..10: note = Table A: HLA-B*39:01H
  source 1..10: note = Severe acute respiratory syndrome coronavirus 2
SHQSDIEVTG

SEQ ID NO: 4434 - protein, 10 aa, Severe acute respiratory syndrome-related coronavirus
  REGION 1..10: note = Table A: HLA-A*25:01H HLA-A*26:01H HLA-A*26:02H HLA-A*26:03M
  source 1..10: note = Severe acute respiratory syndrome coronavirus 2
EVTGDSCNNY

SEQ ID NO: 4435 - protein, 10 aa, Severe acute respiratory syndrome-related coronavirus
  REGION 1..10: note = Table A: HLA-C*08:03H
  source 1..10: note = Severe acute respiratory syndrome coronavirus 2
TYNKVENMTP

SEQ ID NO: 4436 - protein, 10 aa, Severe acute respiratory syndrome-related coronavirus
  REGION 1..10: note = Table A: HLA-A*33:01H HLA-A*33:03H
  source 1..10: note = Severe acute respiratory syndrome coronavirus 2
YNKVENMTPR

SEQ ID NO: 4437 - protein, 10 aa, Severe acute respiratory syndrome-related coronavirus
  REGION 1..10: note = Table A: HLA-B*57:03H
  source 1..10: note = Severe acute respiratory syndrome coronavirus 2
MTPRDLGACI

SEQ ID NO: 4438 - protein, 10 aa, Severe acute respiratory syndrome-related coronavirus
  REGION 1..10: note = Table A: HLA-B*55:02H
  source 1..10: note = Severe acute respiratory syndrome coronavirus 2
SARHINAQVA

SEQ ID NO: 4439 - protein, 10 aa, Severe acute respiratory syndrome-related coronavirus
  REGION 1..10: note = Table A: HLA-B*27:05M HLA-B*27:02H
  source 1..10: note = Severe acute respiratory syndrome coronavirus 2
ARHINAQVAK

SEQ ID NO: 4440 - protein, 10 aa, Severe acute respiratory syndrome-related coronavirus
  REGION 1..10: note = Table A: HLA-A*02:08M HLA-B*07:04H
  source 1..10: note = Severe acute respiratory syndrome coronavirus 2
QVAKSHNIAL

SEQ ID NO: 4441 - protein, 10 aa, Severe acute respiratory syndrome-related coronavirus
  REGION 1..10: note = Table A: HLA-B*38:02H
  source 1..10: note = Severe acute respiratory syndrome coronavirus 2
SHNIALIWNV

SEQ ID NO: 4442 - protein, 10 aa, Severe acute respiratory syndrome-related coronavirus
  REGION 1..10: note = Table A: HLA-A*02:02H HLA-B*13:01H
  source 1..10: note = Severe acute respiratory syndrome coronavirus 2
ALIWNVKDFM

SEQ ID NO: 4443 - protein, 10 aa, Severe acute respiratory syndrome-related coronavirus
  REGION 1..10: note = Table A: HLA-C*08:03H HLA-B*40:01H HLA-B*40:02H
  source 1..10: note = Severe acute respiratory syndrome coronavirus 2
KDFMSLSEQL

SEQ ID NO: 4444 - protein, 10 aa, Severe acute respiratory syndrome-related coronavirus
  REGION 1..10: note = Table A: HLA-A*33:01M HLA-A*33:03M
  source 1..10: note = Severe acute respiratory syndrome coronavirus 2
DFMSLSEQLR

SEQ ID NO: 4445 - protein, 10 aa, Severe acute respiratory syndrome-related coronavirus
  REGION 1..10: note = Table A: HLA-A*02:02H
  source 1..10: note = Severe acute respiratory syndrome coronavirus 2
SLSEQLRKQI

SEQ ID NO: 4446 - protein, 10 aa, Severe acute respiratory syndrome-related coronavirus
  REGION 1..10: note = Table A: HLA-A*30:01H
  source 1..10: note = Severe acute respiratory syndrome coronavirus 2
AAKKNNLPFK

SEQ ID NO: 4447 - protein, 10 aa, Severe acute respiratory syndrome-related coronavirus
  REGION 1..10: note = Table A: HLA-A*02:08H
  source 1..10: note = Severe acute respiratory syndrome coronavirus 2
ATTRQVVNVV

SEQ ID NO: 4448 - protein, 10 aa, Severe acute respiratory syndrome-related coronavirus
  REGION 1..10: note = Table A: HLA-A*68:01H HLA-A*68:02M HLA-A*02:05H HLA-A*02:08M HLA-B*38:02H HLA-B*57:03H HLA-B*13:02H
  source 1..10: note = Severe acute respiratory syndrome coronavirus 2
QVVNVVTTKI

SEQ ID NO: 4449 - protein, 10 aa, Severe acute respiratory syndrome-related coronavirus
  REGION 1..10: note = Table A: HLA-A*11:01H HLA-A*11:02H HLA-A*26:03H HLA-A*68:01M HLA-A*68:02H HLA-A*34:01H HLA-A*34:02H HLA-A*66:01H
  source 1..10: note = Severe acute respiratory syndrome coronavirus 2
NVVTTKIALK

SEQ ID NO: 4450 - protein, 10 aa, Severe acute respiratory syndrome-related coronavirus
  REGION 1..10: note = Table A: HLA-A*02:04H
  source 1..10: note = Severe acute respiratory syndrome coronavirus 2
KIVNNWLKQL

SEQ ID NO: 4451 - protein, 10 aa, Severe acute respiratory syndrome-related coronavirus
  REGION 1..10: note = Table A: HLA-B*08:01H
  source 1..10: note = Severe acute respiratory syndrome coronavirus 2
WLKQLIKVTL

SEQ ID NO: 4452 - protein, 10 aa, Severe acute respiratory syndrome-related coronavirus
  REGION 1..10: note = Table A: HLA-A*02:11H HLA-A*02:04M HLA-A*02:02H
  source 1..10: note = Severe acute respiratory syndrome coronavirus 2
QLIKVTLVFL

SEQ ID NO: 4453 - protein, 10 aa, Severe acute respiratory syndrome-related coronavirus
  REGION 1..10: note = Table A: HLA-C*14:03H HLA-A*29:02M
  source 1..10: note = Severe acute respiratory syndrome coronavirus 2
VFLFVAAIFY

SEQ ID NO: 4454 - protein, 10 aa, Severe acute respiratory syndrome-related coronavirus
  REGION 1..10: note = Table A: HLA-A*02:04M HLA-A*02:02H
  source 1..10: note = Severe acute respiratory syndrome coronavirus 2
FLFVAAIFYL

SEQ ID NO: 4455 - protein, 10 aa, Severe acute respiratory syndrome-related coronavirus
  REGION 1..10: note = Table A: HLA-C*14:03H HLA-C*04:01H HLA-C*04:03H HLA-A*02:11H
  source 1..10: note = Severe acute respiratory syndrome coronavirus 2
IFYLITPVHV

SEQ ID NO: 4456 - protein, 10 aa, Severe acute respiratory syndrome-related coronavirus
  REGION 1..10: note = Table A: HLA-C*14:02H HLA-C*14:03M
  source 1..10: note = Severe acute respiratory syndrome coronavirus 2
FYLITPVHVM

SEQ ID NO: 4457 - protein, 10 aa, Severe acute respiratory syndrome-related coronavirus
  REGION 1..10: note = Table A: HLA-A*36:01H
  source 1..10: note = Severe acute respiratory syndrome coronavirus 2
LITPVHVMSK

SEQ ID NO: 4458 - protein, 10 aa, Severe acute respiratory syndrome-related coronavirus
  REGION 1..10: note = Table A: HLA-B*38:02H
  source 1..10: note = Severe acute respiratory syndrome coronavirus 2
KHTDFSSEII

SEQ ID NO: 4459 - protein, 10 aa, Severe acute respiratory syndrome-related coronavirus
  REGION 1..10: note = Table A: HLA-B*27:02H HLA-B*35:01H HLA-B*39:01H
  source 1..10: note = Severe acute respiratory syndrome coronavirus 2
TDFSSEIIGY

SEQ ID NO: 4460 - protein, 10 aa, Severe acute respiratory syndrome-related coronavirus
  REGION 1..10: note = Table A: HLA-A*34:02H
  source 1..10: note = Severe acute respiratory syndrome coronavirus 2
DFSSEIIGYK

SEQ ID NO: 4461 - protein, 10 aa, Severe acute respiratory syndrome-related coronavirus
  REGION 1..10: note = Table A: HLA-A*02:11H HLA-A*68:02M HLA-A*02:05H HLA-A*02:02H HLA-B*54:01H
  source 1..10: note = Severe acute respiratory syndrome coronavirus 2
FSSEIIGYKA

SEQ ID NO: 4462 - protein, 10 aa, Severe acute respiratory syndrome-related coronavirus
  REGION 1..10: note = Table A: HLA-A*26:03H
  source 1..10: note = Severe acute respiratory syndrome coronavirus 2
EIIGYKAIDG

SEQ ID NO: 4463 - protein, 10 aa, Severe acute respiratory syndrome-related coronavirus
  REGION 1..10: note = Table A: HLA-C*08:02H
  source 1..10: note = Severe acute respiratory syndrome coronavirus 2
AIDGGVTRDI

SEQ ID NO: 4464 - protein, 10 aa, Severe acute respiratory syndrome-related coronavirus
  REGION 1..10: note = Table A: HLA-A*68:02H
  source 1..10: note = Severe acute respiratory syndrome coronavirus 2
DIASTDTCFA

SEQ ID NO: 4465 - protein, 10 aa, Severe acute respiratory syndrome-related coronavirus
  REGION 1..10: note = Table A: HLA-A*11:303H HLA-A*03:01H HLA-A*03:02H HLA-A*11:01M HLA-A*11:02H HLA-A*34:02H
  source 1..10: note = Severe acute respiratory syndrome coronavirus 2
ASTDTCFANK

SEQ ID NO: 4466 - protein, 10 aa, Severe acute respiratory syndrome-related coronavirus
  REGION 1..10: note = Table A: HLA-A*25:01H
  source 1..10: note = Severe acute respiratory syndrome coronavirus 2
ANKHADFDTW

SEQ ID NO: 4467 - protein, 10 aa, Severe acute respiratory syndrome-related coronavirus
  REGION 1..10: note = Table A: HLA-A*30:02H
  source 1..10: note = Severe acute respiratory syndrome coronavirus 2
TWFSQRGGSY

SEQ ID NO: 4468 - protein, 10 aa, Severe acute respiratory syndrome-related coronavirus
  REGION 1..10: note = Table A: HLA-B*57:03H
  source 1..10: note = Severe acute respiratory syndrome coronavirus 2
KACPLIAAVI

SEQ ID NO: 4469 - protein, 10 aa, Severe acute respiratory syndrome-related coronavirus
  REGION 1..10: note = Table A: HLA-A*02:05H HLA-A*02:06H HLA-A*02:03H
  source 1..10: note = Severe acute respiratory syndrome coronavirus 2
AVITREVGFV

SEQ ID NO: 4470 - protein, 10 aa, Severe acute respiratory syndrome-related coronavirus
  REGION 1..10: note = Table A: HLA-B*40:01H HLA-B*40:02M HLA-B*40:06H
  source 1..10: note = Severe acute respiratory syndrome coronavirus 2
REVGFVVPGL

SEQ ID NO: 4471 - protein, 10 aa, Severe acute respiratory syndrome-related coronavirus
  REGION 1..10: note = Table A: HLA-A*68:02H HLA-A*02:03H
  source 1..10: note = Severe acute respiratory syndrome coronavirus 2
FVVPGLPGTI

SEQ ID NO: 4472 - protein, 10 aa, Severe acute respiratory syndrome-related coronavirus
  REGION 1..10: note = Table A: HLA-C*15:05H
  source 1..10: note = Severe acute respiratory syndrome coronavirus 2
VVPGLPGTIL

SEQ ID NO: 4473 - protein, 10 aa, Severe acute respiratory syndrome-related coronavirus
  REGION 1..10: note = Table A: HLA-A*34:01H
  source 1..10: note = Severe acute respiratory syndrome coronavirus 2
VPGLPGTILR

SEQ ID NO: 4474 - protein, 10 aa, Severe acute respiratory syndrome-related coronavirus
  REGION 1..10: note = Table A: HLA-A*02:02H HLA-B*38:02H
  source 1..10: note = Severe acute respiratory syndrome coronavirus 2
ILRTTNGDFL

SEQ ID NO: 4475 - protein, 10 aa, Severe acute respiratory syndrome-related coronavirus
  REGION 1..10: note = Table A: HLA-B*58:01H HLA-A*36:01H HLA-B*57:03M
  source 1..10: note = Severe acute respiratory syndrome coronavirus 2
RTTNGDFLHF

SEQ ID NO: 4476 - protein, 10 aa, Severe acute respiratory syndrome-related coronavirus
  REGION 1..10: note = Table A: HLA-A*68:02H HLA-A*02:02H
  source 1..10: note = Severe acute respiratory syndrome coronavirus 2
TTNGDFLHFL

SEQ ID NO: 4477 - protein, 10 aa, Severe acute respiratory syndrome-related coronavirus
  REGION 1..10: note = Table A: HLA-A*02:11H
  source 1..10: note = Severe acute respiratory syndrome coronavirus 2
FLHFLPRVFS

SEQ ID NO: 4478 - protein, 10 aa, Severe acute respiratory syndrome-related coronavirus
  REGION 1..10: note = Table A: HLA-A*29:01H HLA-A*29:02H HLA-A*30:02H
  source 1..10: note = Severe acute respiratory syndrome coronavirus 2
VFSAVGNICY

SEQ ID NO: 4479 - protein, 10 aa, Severe acute respiratory syndrome-related coronavirus
  REGION 1..10: note = Table A: HLA-B*45:01H HLA-B*18:01H HLA-B*40:06M HLA-B*49:01H HLA-B*50:01H
  source 1..10: note = Severe acute respiratory syndrome coronavirus 2
IEYTDFATSA

SEQ ID NO: 4480 - protein, 10 aa, Severe acute respiratory syndrome-related coronavirus
  REGION 1..10: note = Table A: HLA-B*40:02H
  source 1..10: note = Severe acute respiratory syndrome coronavirus 2
TDFATSACVL

SEQ ID NO: 4481 - protein, 10 aa, Severe acute respiratory syndrome-related coronavirus
  REGION 1..10: note = Table A: HLA-A*03:01H HLA-A*03:02H
  source 1..10: note = Severe acute respiratory syndrome coronavirus 2
VLAAECTIFK

SEQ ID NO: 4482 - protein, 10 aa, Severe acute respiratory syndrome-related coronavirus
  REGION 1..10: note = Table A: HLA-A*30:02H
  source 1..10: note = Severe acute respiratory syndrome coronavirus 2
ASGKPVPYCY

SEQ ID NO: 4483 - protein, 10 aa, Severe acute respiratory syndrome-related coronavirus
  REGION 1..10: note = Table A: HLA-C*15:05H
  source 1..10: note = Severe acute respiratory syndrome coronavirus 2
VPYCYDTNVL

SEQ ID NO: 4484 - protein, 10 aa, Severe acute respiratory syndrome-related coronavirus
  REGION 1..10: note = Table A: HLA-B*35:01H
  source 1..10: note = Severe acute respiratory syndrome coronavirus 2
TNVLEGSVAY

SEQ ID NO: 4485 - protein, 10 aa, Severe acute respiratory syndrome-related coronavirus
  REGION 1..10: note = Table A: HLA-B*40:01H HLA-B*40:02H
  source 1..10: note = Severe acute respiratory syndrome coronavirus 2
LEGSVAYESL

SEQ ID NO: 4486 - protein, 10 aa, Severe acute respiratory syndrome-related coronavirus
  REGION 1..10: note = Table A: HLA-A*02:02H HLA-B*07:04H
  source 1..10: note = Severe acute respiratory syndrome coronavirus 2
SLRPDTRYVL

SEQ ID NO: 4487 - protein, 10 aa, Severe acute respiratory syndrome-related coronavirus
  REGION 1..10: note = Table A: HLA-C*14:03H HLA-A*11:303H HLA-A*25:01H HLA-B*46:01H HLA-A*26:02H HLA-A*02:11H HLA-C*15:05H HLA-A*02:04M HLA-A*02:07H HLA-B*14:01H HLA-A*02:01M HLA-A*02:02M HLA-A*02:03H HLA-A*24:02H HLA-A*23:01H
  REGION 1..10: note = CONT. FROM ABOVE: HLA-B*38:02M HLA-B*15:01M HLA-B*15:02H
  source 1..10: note = Severe acute respiratory syndrome coronavirus 2
VLMDGSIIQF

SEQ ID NO: 4488 - protein, 10 aa, Severe acute respiratory syndrome-related coronavirus
  REGION 1..10: note = Table A: HLA-A*30:02H
  source 1..10: note = Severe acute respiratory syndrome coronavirus 2
GSIIQFPNTY

SEQ ID NO: 4489 - protein, 10 aa, Severe acute respiratory syndrome-related coronavirus
  REGION 1..10: note = Table A: HLA-A*11:303H HLA-C*03:03H HLA-A*02:11H HLA-C*03:04H HLA-A*68:02H HLA-A*02:04H HLA-A*02:05H HLA-A*02:08H HLA-A*02:01H HLA-A*02:02H HLA-A*02:03H HLA-C*17:01H HLA-A*66:01H
  source 1..10: note = Severe acute respiratory syndrome coronavirus 2
SIIQFPNTYL

SEQ ID NO: 4490 - protein, 10 aa, Severe acute respiratory syndrome-related coronavirus
  REGION 1..10: note = Table A: HLA-A*68:02H
  source 1..10: note = Severe acute respiratory syndrome coronavirus 2
NTYLEGSVRV

SEQ ID NO: 4491 - protein, 10 aa, Severe acute respiratory syndrome-related coronavirus
  REGION 1..10: note = Table A: HLA-C*14:03H HLA-C*06:02H
  source 1..10: note = Severe acute respiratory syndrome coronavirus 2
TYLEGSVRVV

SEQ ID NO: 4492 - protein, 10 aa, Severe acute respiratory syndrome-related coronavirus
  REGION 1..10: note = Table A: HLA-A*36:01H HLA-A*30:02M HLA-B*15:01H
  source 1..10: note = Severe acute respiratory syndrome coronavirus 2
RVVTTFDSEY

SEQ ID NO: 4493 - protein, 10 aa, Severe acute respiratory syndrome-related coronavirus
  REGION 1..10: note = Table A: HLA-A*34:02H
  source 1..10: note = Severe acute respiratory syndrome coronavirus 2
TTFDSEYCRH

SEQ ID NO: 4494 - protein, 10 aa, Severe acute respiratory syndrome-related coronavirus
  REGION 1..10: note = Table A: HLA-A*33:03H
  source 1..10: note = Severe acute respiratory syndrome coronavirus 2
EYCRHGTCER

SEQ ID NO: 4495 - protein, 10 aa, Severe acute respiratory syndrome-related coronavirus
  REGION 1..10: note = Table A: HLA-A*30:02H
  source 1..10: note = Severe acute respiratory syndrome coronavirus 2
SGRWVLNNDY

SEQ ID NO: 4496 - protein, 10 aa, Severe acute respiratory syndrome-related coronavirus
  REGION 1..10: note = Table A: HLA-B*27:05M HLA-B*27:02M HLA-B*38:02H
  source 1..10: note = Severe acute respiratory syndrome coronavirus 2
GRWVLNNDYY

SEQ ID NO: 4497 - protein, 10 aa, Severe acute respiratory syndrome-related coronavirus
  REGION 1..10: note = Table A: HLA-C*01:02H HLA-A*02:04H HLA-A*02:02H
  source 1..10: note = Severe acute respiratory syndrome coronavirus 2
VLNNDYYRSL

SEQ ID NO: 4498 - protein, 10 aa, Severe acute respiratory syndrome-related coronavirus
  REGION 1..10: note = Table A: HLA-A*24:07H
  source 1..10: note = Severe acute respiratory syndrome coronavirus 2
DYYRSLPGVF

SEQ ID NO: 4499 - protein, 10 aa, Severe acute respiratory syndrome-related coronavirus
  REGION 1..10: note = Table A: HLA-A*02:11H HLA-A*02:06H
  source 1..10: note = Severe acute respiratory syndrome coronavirus 2
RSLPGVFCGV

SEQ ID NO: 4500 - protein, 10 aa, Severe acute respiratory syndrome-related coronavirus
  REGION 1..10: note = Table A: HLA-B*35:01H
  source 1..10: note = Severe acute respiratory syndrome coronavirus 2
DAVNLLTNMF

SEQ ID NO: 4501 - protein, 10 aa, Severe acute respiratory syndrome-related coronavirus
  REGION 1..10: note = Table A: HLA-A*02:11H HLA-A*68:02H HLA-B*54:01H
  source 1..10: note = Severe acute respiratory syndrome coronavirus 2
FTPLIQPIGA

SEQ ID NO: 4502 - protein, 10 aa, Severe acute respiratory syndrome-related coronavirus
  REGION 1..10: note = Table A: HLA-C*15:05M HLA-B*07:02H HLA-B*07:05M
  source 1..10: note = Severe acute respiratory syndrome coronavirus 2
TPLIQPIGAL

SEQ ID NO: 4503 - protein, 10 aa, Severe acute respiratory syndrome-related coronavirus
  REGION 1..10: note = Table A: HLA-B*56:01H HLA-B*55:02H HLA-B*35:03H HLA-C*15:05H HLA-B*55:01M HLA-B*39:06H HLA-B*54:01M
  source 1..10: note = Severe acute respiratory syndrome coronavirus 2
QPIGALDISA

SEQ ID NO: 4504 - protein, 10 aa, Severe acute respiratory syndrome-related coronavirus
  REGION 1..10: note = Table A: HLA-A*68:02H HLA-A*02:05H HLA-A*02:06H HLA-A*02:08M HLA-A*02:01H HLA-B*38:02H
  source 1..10: note = Severe acute respiratory syndrome coronavirus 2
SIVAGGIVAI

SEQ ID NO: 4505 - protein, 10 aa, Severe acute respiratory syndrome-related coronavirus
  REGION 1..10: note = Table A: HLA-A*68:02H HLA-A*02:08H
  source 1..10: note = Severe acute respiratory syndrome coronavirus 2
IVAGGIVAIV

SEQ ID NO: 4506 - protein, 10 aa, Severe acute respiratory syndrome-related coronavirus
  REGION 1..10: note = Table A: HLA-C*16:04H HLA-A*02:11H HLA-B*55:02H HLA-A*30:02H HLA-C*15:02H HLA-A*02:05H HLA-A*02:08H HLA-A*02:02H HLA-C*08:01H HLA-B*07:04H HLA-B*13:02H
  source 1..10: note = Severe acute respiratory syndrome coronavirus 2
RAFGEYSHVV

SEQ ID NO: 4507 - protein, 10 aa, Severe acute respiratory syndrome-related coronavirus
  REGION 1..10: note = Table A: HLA-C*08:01H
  source 1..10: note = Severe acute respiratory syndrome coronavirus 2
YSHVVAFNTL

SEQ ID NO: 4508 - protein, 10 aa, Severe acute respiratory syndrome-related coronavirus
  REGION 1..10: note = Table A: HLA-B*38:01H HLA-B*38:02M HLA-B*15:10H
  source 1..10: note = Severe acute respiratory syndrome coronavirus 2
SHVVAFNTLL

SEQ ID NO: 4509 - protein, 10 aa, Severe acute respiratory syndrome-related coronavirus
  REGION 1..10: note = Table A: HLA-A*26:01H
  source 1..10: note = Severe acute respiratory syndrome coronavirus 2
HVVAFNTLLF

SEQ ID NO: 4510 - protein, 10 aa, Severe acute respiratory syndrome-related coronavirus
  REGION 1..10: note = Table A: HLA-A*68:02H
  source 1..10: note = Severe acute respiratory syndrome coronavirus 2
YSFLPGVYSV

SEQ ID NO: 4511 - protein, 10 aa, Severe acute respiratory syndrome-related coronavirus
  REGION 1..10: note = Table A: HLA-A*24:07H HLA-A*23:01H
  source 1..10: note = Severe acute respiratory syndrome coronavirus 2
SFLPGVYSVI

SEQ ID NO: 4512 - protein, 10 aa, Severe acute respiratory syndrome-related coronavirus
  REGION 1..10: note = Table A: HLA-C*14:02H HLA-C*14:03M HLA-A*24:07H HLA-A*23:01H HLA-B*15:02H HLA-B*07:05H
  source 1..10: note = Severe acute respiratory syndrome coronavirus 2
TFYLTNDVSF

SEQ ID NO: 4513 - protein, 10 aa, Severe acute respiratory syndrome-related coronavirus
  REGION 1..10: note = Table A: HLA-C*14:02H HLA-C*14:03M HLA-A*24:02H HLA-A*24:07H HLA-A*23:01H
  source 1..10: note = Severe acute respiratory syndrome coronavirus 2
FYLTNDVSFL

SEQ ID NO: 4514 - protein, 10 aa, Severe acute respiratory syndrome-related coronavirus
  REGION 1..10: note = Table A: HLA-A*34:02H
  source 1..10: note = Severe acute respiratory syndrome coronavirus 2
LTNDVSFLAH

SEQ ID NO: 4515 - protein, 10 aa, Severe acute respiratory syndrome-related coronavirus
  REGION 1..10: note = Table A: HLA-A*25:01H HLA-B*53:01H HLA-A*68:02H
  source 1..10: note = Severe acute respiratory syndrome coronavirus 2
DVSFLAHIQW

SEQ ID NO: 4516 - protein, 10 aa, Severe acute respiratory syndrome-related coronavirus
  REGION 1..10: note = Table A: HLA-C*15:05H
  source 1..10: note = Severe acute respiratory syndrome coronavirus 2
TPLVPFWITI

SEQ ID NO: 4517 - protein, 10 aa, Severe acute respiratory syndrome-related coronavirus
  REGION 1..10: note = Table A: HLA-B*58:02H HLA-B*57:03H
  source 1..10: note = Severe acute respiratory syndrome coronavirus 2
ISTKHFYWFF

SEQ ID NO: 4518 - protein, 10 aa, Severe acute respiratory syndrome-related coronavirus
  REGION 1..10: note = Table A: HLA-C*14:03H
  source 1..10: note = Severe acute respiratory syndrome coronavirus 2
HFYWFFSNYL

SEQ ID NO: 4519 - protein, 10 aa, Severe acute respiratory syndrome-related coronavirus
  REGION 1..10: note = Table A: HLA-B*27:05H HLA-B*27:02H
  source 1..10: note = Severe acute respiratory syndrome coronavirus 2
RRVVFNGVSF

SEQ ID NO: 4520 - protein, 10 aa, Severe acute respiratory syndrome-related coronavirus
  REGION 1..10: note = Table A: HLA-A*68:02H
  source 1..10: note = Severe acute respiratory syndrome coronavirus 2
VVFNGVSFST

SEQ ID NO: 4521 - protein, 10 aa, Severe acute respiratory syndrome-related coronavirus
  REGION 1..10: note = Table A: HLA-C*14:02M HLA-C*14:03M HLA-A*29:02H HLA-A*24:02M HLA-A*24:07H HLA-A*23:01H HLA-B*07:05H
  source 1..10: note = Severe acute respiratory syndrome coronavirus 2
VFNGVSFSTF

SEQ ID NO: 4522 - protein, 10 aa, Severe acute respiratory syndrome-related coronavirus
  REGION 1..10: note = Table A: HLA-A*68:02H
  source 1..10: note = Severe acute respiratory syndrome coronavirus 2
GVSFSTFEEA

SEQ ID NO: 4523 - protein, 10 aa, Severe acute respiratory syndrome-related coronavirus
  REGION 1..10: note = Table A: HLA-C*04:01M HLA-C*04:03H HLA-B*38:02H
  source 1..10: note = Severe acute respiratory syndrome coronavirus 2
TFEEAALCTF

SEQ ID NO: 4524 - protein, 10 aa, Severe acute respiratory syndrome-related coronavirus
  REGION 1..10: note = Table A: HLA-B*40:01H
  source 1..10: note = Severe acute respiratory syndrome coronavirus 2
FEEAALCTFL

SEQ ID NO: 4525 - protein, 10 aa, Severe acute respiratory syndrome-related coronavirus
  REGION 1..10: note = Table A: HLA-A*02:02M
  source 1..10: note = Severe acute respiratory syndrome coronavirus 2
LLNKEMYLKL

SEQ ID NO: 4526 - protein, 10 aa, Severe acute respiratory syndrome-related coronavirus
  REGION 1..10: note = Table A: HLA-B*08:01H
  source 1..10: note = Severe acute respiratory syndrome coronavirus 2
YLKLRSDVLL

SEQ ID NO: 4527 - protein, 10 aa, Severe acute respiratory syndrome-related coronavirus
  REGION 1..10: note = Table A: HLA-B*44:03H HLA-B*18:01H HLA-B*35:01H
  source 1..10: note = Severe acute respiratory syndrome coronavirus 2
SDVLLPLTQY

SEQ ID NO: 4528 - protein, 10 aa, Severe acute respiratory syndrome-related coronavirus
  REGION 1..10: note = Table A: HLA-A*74:01M
  source 1..10: note = Severe acute respiratory syndrome coronavirus 2
VLLPLTQYNR

SEQ ID NO: 4529 - protein, 10 aa, Severe acute respiratory syndrome-related coronavirus
  REGION 1..10: note = Table A: HLA-A*30:02M HLA-B*38:02H HLA-B*15:01H HLA-B*15:02H HLA-B*15:03H
  source 1..10: note = Severe acute respiratory syndrome coronavirus 2
TQYNRYLALY

SEQ ID NO: 4530 - protein, 10 aa, Severe acute respiratory syndrome-related coronavirus
  REGION 1..10: note = Table A: HLA-A*30:01H
  source 1..10: note = Severe acute respiratory syndrome coronavirus 2
RYLALYNKYK

SEQ ID NO: 4531 - protein, 10 aa, Severe acute respiratory syndrome-related coronavirus
  REGION 1..10: note = Table A: HLA-A*01:01H
  source 1..10: note = Severe acute respiratory syndrome coronavirus 2
FSGAMDTTSY

SEQ ID NO: 4532 - protein, 10 aa, Severe acute respiratory syndrome-related coronavirus
  REGION 1..10: note = Table A: HLA-A*68:01H HLA-A*34:01H
  source 1..10: note = Severe acute respiratory syndrome coronavirus 2
SGAMDTTSYR

SEQ ID NO: 4533 - protein, 10 aa, Severe acute respiratory syndrome-related coronavirus
  REGION 1..10: note = Table A: HLA-A*02:07H HLA-A*02:01H HLA-A*02:02H
  source 1..10: note = Severe acute respiratory syndrome coronavirus 2
AMDTTSYREA

SEQ ID NO: 4534 - protein, 10 aa, Severe acute respiratory syndrome-related coronavirus
  REGION 1..10: note = Table A: HLA-B*38:02H
  source 1..10: note = Severe acute respiratory syndrome coronavirus 2
CHLAKALNDF

SEQ ID NO: 4535 - protein, 10 aa, Severe acute respiratory syndrome-related coronavirus
  REGION 1..10: note = Table A: HLA-A*36:01H HLA-A*30:02H HLA-B*35:01H
  source 1..10: note = Severe acute respiratory syndrome coronavirus 2
FSNSGSDVLY

SEQ ID NO: 4536 - protein, 10 aa, Severe acute respiratory syndrome-related coronavirus
  REGION 1..10: note = Table A: HLA-A*03:01H HLA-A*02:11H HLA-C*15:05H HLA-A*02:03H HLA-B*52:01M HLA-B*38:02H HLA-B*13:02H
  source 1..10: note = Severe acute respiratory syndrome coronavirus 2
VLYQPPQTSI

SEQ ID NO: 4537 - protein, 10 aa, Severe acute respiratory syndrome-related coronavirus
  REGION 1..10: note = Table A: HLA-B*56:01H HLA-B*55:02M HLA-C*15:05M HLA-B*55:01H HLA-B*54:01H HLA-B*07:05H
  source 1..10: note = Severe acute respiratory syndrome coronavirus 2
QPPQTSITSA

SEQ ID NO: 4538 - protein, 10 aa, Severe acute respiratory syndrome-related coronavirus
  REGION 1..10: note = Table A: HLA-B*58:01H HLA-B*57:01H HLA-A*68:01H HLA-B*57:03M
  source 1..10: note = Severe acute respiratory syndrome coronavirus 2
ITSAVLQSGF

SEQ ID NO: 4539 - protein, 10 aa, Severe acute respiratory syndrome-related coronavirus
  REGION 1..10: note = Table A: HLA-A*68:01H HLA-A*34:01H HLA-A*34:02H HLA-A*66:01M
  source 1..10: note = Severe acute respiratory syndrome coronavirus 2
TSAVLQSGFR

SEQ ID NO: 4540 - protein, 10 aa, Severe acute respiratory syndrome-related coronavirus
  REGION 1..10: note = Table A: HLA-B*35:01H HLA-B*35:07H HLA-B*54:01M
  source 1..10: note = Severe acute respiratory syndrome coronavirus 2
MAFPSGKVEG

SEQ ID NO: 4541 - protein, 10 aa, Severe acute respiratory syndrome-related coronavirus
  REGION 1..10: note = Table A: HLA-C*15:05H
  source 1..10: note = Severe acute respiratory syndrome coronavirus 2
FPSGKVEGCM

SEQ ID NO: 4542 - protein, 10 aa, Severe acute respiratory syndrome-related coronavirus
  REGION 1..10: note = Table A: HLA-B*15:01H
  source 1..10: note = Severe acute respiratory syndrome coronavirus 2
VQVTCGTTTL

SEQ ID NO: 4543 - protein, 10 aa, Severe acute respiratory syndrome-related coronavirus
  REGION 1..10: note = Table A: HLA-A*02:04H HLA-A*02:01H
  source 1..10: note = Severe acute respiratory syndrome coronavirus 2
GLWLDDVVYC

SEQ ID NO: 4544 - protein, 10 aa, Severe acute respiratory syndrome-related coronavirus
  REGION 1..10: note = Table A: HLA-A*36:01H HLA-A*01:01H
  source 1..10: note = Severe acute respiratory syndrome coronavirus 2
TSEDMLNPNY

SEQ ID NO: 4545 - protein, 10 aa, Severe acute respiratory syndrome-related coronavirus
  REGION 1..10: note = Table A: HLA-A*02:04H HLA-A*02:02M HLA-B*38:02H
  source 1..10: note = Severe acute respiratory syndrome coronavirus 2
MLNPNYEDLL

SEQ ID NO: 4546 - protein, 10 aa, Severe acute respiratory syndrome-related coronavirus
  REGION 1..10: note = Table A: HLA-B*55:02M HLA-A*02:08H
  source 1..10: note = Severe acute respiratory syndrome coronavirus 2
KSNHNFLVQA

SEQ ID NO: 4547 - protein, 10 aa, Severe acute respiratory syndrome-related coronavirus
  REGION 1..10: note = Table A: HLA-A*11:303H HLA-A*02:04M HLA-A*02:05H HLA-A*02:06H HLA-B*14:01H HLA-A*02:01M HLA-A*02:02M HLA-A*02:03H HLA-C*08:03H HLA-B*38:02M
  source 1..10: note = Severe acute respiratory syndrome coronavirus 2
FLVQAGNVQL

SEQ ID NO: 4548 - protein, 10 aa, Severe acute respiratory syndrome-related coronavirus
  REGION 1..10: note = Table A: HLA-A*74:01M HLA-A*03:02H HLA-A*11:01H HLA-A*33:01H HLA-A*33:03H HLA-A*26:03M HLA-A*68:01M HLA-A*34:01M HLA-A*34:02H HLA-A*31:01H HLA-A*66:01H
  source 1..10: note = Severe acute respiratory syndrome coronavirus 2
LVQAGNVQLR

SEQ ID NO: 4549 - protein, 10 aa, Severe acute respiratory syndrome-related coronavirus
  REGION 1..10: note = Table A: HLA-B*13:02H
  source 1..10: note = Severe acute respiratory syndrome coronavirus 2
VQAGNVQLRV

SEQ ID NO: 4550 - protein, 10 aa, Severe acute respiratory syndrome-related coronavirus
  REGION 1..10: note = Table A: HLA-A*30:02H
  source 1..10: note = Severe acute respiratory syndrome coronavirus 2
VQLRVIGHSM

SEQ ID NO: 4551 - protein, 10 aa, Severe acute respiratory syndrome-related coronavirus
  REGION 1..10: note = Table A: HLA-A*02:05H HLA-A*02:08H
  source 1..10: note = Severe acute respiratory syndrome coronavirus 2
RVIGHSMQNC

SEQ ID NO: 4552 - protein, 10 aa, Severe acute respiratory syndrome-related coronavirus
  REGION 1..10: note = Table A: HLA-A*74:01H HLA-A*03:01H HLA-A*03:02H
  source 1..10: note = Severe acute respiratory syndrome coronavirus 2
KLKVDTANPK

SEQ ID NO: 4553 - protein, 10 aa, Severe acute respiratory syndrome-related coronavirus
  REGION 1..10: note = Table A: HLA-A*25:01M HLA-A*26:01H HLA-A*26:02M HLA-A*26:03H HLA-A*68:01H HLA-A*34:02M
  source 1..10: note = Severe acute respiratory syndrome coronavirus 2
DTANPKTPKY

SEQ ID NO: 4554 - protein, 10 aa, Severe acute respiratory syndrome-related coronavirus
  REGION 1..10: note = Table A: HLA-A*34:02H
  source 1..10: note = Severe acute respiratory syndrome coronavirus 2
TANPKTPKYK

SEQ ID NO: 4555 - protein, 10 aa, Severe acute respiratory syndrome-related coronavirus
  REGION 1..10: note = Table A: HLA-B*07:04M
  source 1..10: note = Severe acute respiratory syndrome coronavirus 2
NPKTPKYKFV

SEQ ID NO: 4556 - protein, 10 aa, Severe acute respiratory syndrome-related coronavirus
  REGION 1..10: note = Table A: HLA-B*57:03H
  source 1..10: note = Severe acute respiratory syndrome coronavirus 2
KTPKYKFVRI

SEQ ID NO: 4557 - protein, 10 aa, Severe acute respiratory syndrome-related coronavirus
  REGION 1..10: note = Table A: HLA-B*42:01H HLA-B*57:01H HLA-A*25:01H HLA-B*46:01M HLA-C*03:02M HLA-C*15:05H HLA-C*12:02M HLA-A*34:01H HLA-B*38:02M HLA-B*07:02M HLA-B*07:04M HLA-B*15:01H HLA-B*15:02M HLA-B*57:03H HLA-C*02:02H HLA-B*15:11H
  REGION 1..10: note = CONT. FROM ABOVE: HLA-A*66:01H
  source 1..10: note = Severe acute respiratory syndrome coronavirus 2
FVRIQPGQTF

SEQ ID NO: 4558 - protein, 10 aa, Severe acute respiratory syndrome-related coronavirus
  REGION 1..10: note = Table A: HLA-A*02:11H HLA-A*02:08H HLA-B*13:02H
  source 1..10: note = Severe acute respiratory syndrome coronavirus 2
RIQPGQTFSV

SEQ ID NO: 4559 - protein, 10 aa, Severe acute respiratory syndrome-related coronavirus
  REGION 1..10: note = Table A: HLA-C*01:02H HLA-B*15:01H
  source 1..10: note = Severe acute respiratory syndrome coronavirus 2
IQPGQTFSVL

SEQ ID NO: 4560 - protein, 10 aa, Severe acute respiratory syndrome-related coronavirus
  REGION 1..10: note = Table A: HLA-B*55:02H
  source 1..10: note = Severe acute respiratory syndrome coronavirus 2
QPGQTFSVLA

SEQ ID NO: 4561 - protein, 10 aa, Severe acute respiratory syndrome-related coronavirus
  REGION 1..10: note = Table A: HLA-A*30:02H HLA-B*15:01M HLA-B*13:02H
  source 1..10: note = Severe acute respiratory syndrome coronavirus 2
GQTFSVLACY

SEQ ID NO: 4562 - protein, 10 aa, Severe acute respiratory syndrome-related coronavirus
  REGION 1..10: note = Table A: HLA-A*02:03H
  source 1..10: note = Severe acute respiratory syndrome coronavirus 2
ACYNGSPSGV

SEQ ID NO: 4563 - protein, 10 aa, Severe acute respiratory syndrome-related coronavirus
  REGION 1..10: note = Table A: HLA-A*30:02H
  source 1..10: note = Severe acute respiratory syndrome coronavirus 2
CYNGSPSGVY

SEQ ID NO: 4564 - protein, 10 aa, Severe acute respiratory syndrome-related coronavirus
  REGION 1..10: note = Table A: HLA-B*35:03H HLA-C*15:05M HLA-B*35:01H HLA-B*07:02M HLA-B*07:04H HLA-B*07:05M
  source 1..10: note = Severe acute respiratory syndrome coronavirus 2
SPSGVYQCAM

SEQ ID NO: 4565 - protein, 10 aa, Severe acute respiratory syndrome-related coronavirus
  REGION 1..10: note = Table A: HLA-A*74:01H HLA-A*02:02H
  source 1..10: note = Severe acute respiratory syndrome coronavirus 2
AMRPNFTIKG

SEQ ID NO: 4566 - protein, 10 aa, Severe acute respiratory syndrome-related coronavirus
  REGION 1..10: note = Table A: HLA-B*42:01H HLA-B*56:01H HLA-B*55:02H HLA-C*15:05M HLA-B*55:01H HLA-B*07:02M HLA-B*07:04H HLA-B*07:05H
  source 1..10: note = Severe acute respiratory syndrome coronavirus 2
RPNFTIKGSF

SEQ ID NO: 4567 - protein, 10 aa, Severe acute respiratory syndrome-related coronavirus
  REGION 1..10: note = Table A: HLA-A*34:02H HLA-A*66:01H
  source 1..10: note = Severe acute respiratory syndrome coronavirus 2
FTIKGSFLNG

SEQ ID NO: 4568 - protein, 10 aa, Severe acute respiratory syndrome-related coronavirus
  REGION 1..10: note = Table A: HLA-B*38:02M HLA-B*39:06H HLA-B*39:01H
  source 1..10: note = Severe acute respiratory syndrome coronavirus 2
MHHMELPTGV

SEQ ID NO: 4569 - protein, 10 aa, Severe acute respiratory syndrome-related coronavirus
  REGION 1..10: note = Table A: HLA-B*38:02H
  source 1..10: note = Severe acute respiratory syndrome coronavirus 2
HHMELPTGVH

SEQ ID NO: 4570 - protein, 10 aa, Severe acute respiratory syndrome-related coronavirus
  REGION 1..10: note = Table A: HLA-B*38:02H
  source 1..10: note = Severe acute respiratory syndrome coronavirus 2
HMELPTGVHA

SEQ ID NO: 4571 - protein, 10 aa, Severe acute respiratory syndrome-related coronavirus
  REGION 1..10: note = Table A: HLA-B*45:01H HLA-B*40:02H HLA-B*40:06H HLA-B*50:01H
  source 1..10: note = Severe acute respiratory syndrome coronavirus 2
MELPTGVHAG

SEQ ID NO: 4572 - protein, 10 aa, Severe acute respiratory syndrome-related coronavirus
  REGION 1..10: note = Table A: HLA-A*30:02H
  source 1..10: note = Severe acute respiratory syndrome coronavirus 2
AGTDLEGNFY

SEQ ID NO: 4573 - protein, 10 aa, Severe acute respiratory syndrome-related coronavirus
  REGION 1..10: note = Table A: HLA-A*36:01H
  source 1..10: note = Severe acute respiratory syndrome coronavirus 2
GTDLEGNFYG

SEQ ID NO: 4574 - protein, 10 aa, Severe acute respiratory syndrome-related coronavirus
  REGION 1..10: note = Table A: HLA-A*33:01H HLA-A*33:03M HLA-B*27:02H HLA-A*68:01H HLA-A*68:02H HLA-A*66:01H
  source 1..10: note = Severe acute respiratory syndrome coronavirus 2
GNFYGPFVDR

SEQ ID NO: 4575 - protein, 10 aa, Severe acute respiratory syndrome-related coronavirus
  REGION 1..10: note = Table A: HLA-C*06:02H
  source 1..10: note = Severe acute respiratory syndrome coronavirus 2
FYGPFVDRQT

SEQ ID NO: 4576 - protein, 10 aa, Severe acute respiratory syndrome-related coronavirus
  REGION 1..10: note = Table A: HLA-C*15:05H
  source 1..10: note = Severe acute respiratory syndrome coronavirus 2
GPFVDRQTAQ

SEQ ID NO: 4577 - protein, 10 aa, Severe acute respiratory syndrome-related coronavirus
  REGION 1..10: note = Table A: HLA-B*38:02H HLA-B*13:01H HLA-B*13:02M
  source 1..10: note = Severe acute respiratory syndrome coronavirus 2
AQAAGTDTTI

SEQ ID NO: 4578 - protein, 10 aa, Severe acute respiratory syndrome-related coronavirus
  REGION 1..10: note = Table A: HLA-A*68:02H
  source 1..10: note = Severe acute respiratory syndrome coronavirus 2
GTDTTITVNV

SEQ ID NO: 4579 - protein, 10 aa, Severe acute respiratory syndrome-related coronavirus
  REGION 1..10: note = Table A: HLA-C*08:03H
  source 1..10: note = Severe acute respiratory syndrome coronavirus 2
TDTTITVNVL

SEQ ID NO: 4580 - protein, 10 aa, Severe acute respiratory syndrome-related coronavirus
  REGION 1..10: note = Table A: HLA-B*58:01H HLA-B*57:01H HLA-A*25:01M HLA-B*57:03H
  source 1..10: note = Severe acute respiratory syndrome coronavirus 2
TTITVNVLAW

SEQ ID NO: 4581 - protein, 10 aa, Severe acute respiratory syndrome-related coronavirus
  REGION 1..10: note = Table A: HLA-A*36:01H HLA-A*29:02H
  source 1..10: note = Severe acute respiratory syndrome coronavirus 2
ITVNVLAWLY

SEQ ID NO: 4582 - protein, 10 aa, Severe acute respiratory syndrome-related coronavirus
  REGION 1..10: note = Table A: HLA-B*58:01H HLA-B*57:01H HLA-B*53:01H HLA-B*35:07H HLA-B*38:02H HLA-B*57:03M HLA-B*13:01H
  source 1..10: note = Severe acute respiratory syndrome coronavirus 2
YAAVINGDRW

SEQ ID NO: 4583 - protein, 10 aa, Severe acute respiratory syndrome-related coronavirus
  REGION 1..10: note = Table A: HLA-A*11:303H HLA-A*74:01H HLA-A*11:01H HLA-A*11:02M HLA-A*02:11M HLA-C*03:04H HLA-A*30:02H HLA-A*68:02M HLA-C*15:02H HLA-A*02:04M HLA-A*02:05M HLA-A*02:06M HLA-A*02:07H HLA-A*02:08M HLA-A*02:01H
  REGION 1..10: note = CONT. FROM ABOVE: HLA-A*02:02M HLA-C*17:01H HLA-C*08:01M HLA- B*38:02H HLA-B*40:06H HLA-B*57:03H HLA-B*13:01H HLA-A*66:01H
  source 1..10: note = Severe acute respiratory syndrome coronavirus 2
AVINGDRWFL

SEQ ID NO: 4584 - protein, 10 aa, Severe acute respiratory syndrome-related coronavirus
  REGION 1..10: note = Table A: HLA-A*24:07H
  source 1..10: note = Severe acute respiratory syndrome coronavirus 2
WFLNRFTTTL

SEQ ID NO: 4585 - protein, 10 aa, Severe acute respiratory syndrome-related coronavirus
  REGION 1..10: note = Table A: HLA-A*68:02H
  source 1..10: note = Severe acute respiratory syndrome coronavirus 2
FTTTLNDFNL

SEQ ID NO: 4586 - protein, 10 aa, Severe acute respiratory syndrome-related coronavirus
  REGION 1..10: note = Table A: HLA-A*11:303H HLA-B*46:01M HLA-A*02:04M HLA-A*02:01H HLA-A*02:02H HLA-A*02:03H HLA-B*38:02M HLA-B*15:01H HLA-B*15:02M
  source 1..10: note = Severe acute respiratory syndrome coronavirus 2
TLNDFNLVAM

SEQ ID NO: 4587 - protein, 10 aa, Severe acute respiratory syndrome-related coronavirus
  REGION 1..10: note = Table A: HLA-B*18:01H
  source 1..10: note = Severe acute respiratory syndrome coronavirus 2
NDFNLVAMKY

SEQ ID NO: 4588 - protein, 10 aa, Severe acute respiratory syndrome-related coronavirus
  REGION 1..10: note = Table A: HLA-B*39:01H
  source 1..10: note = Severe acute respiratory syndrome coronavirus 2
DHVDILGPLS

SEQ ID NO: 4589 - protein, 10 aa, Severe acute respiratory syndrome-related coronavirus
  REGION 1..10: note = Table A: HLA-A*36:01H HLA-B*38:02H HLA-B*54:01H
  source 1..10: note = Severe acute respiratory syndrome coronavirus 2
HVDILGPLSA

SEQ ID NO: 4590 - protein, 10 aa, Severe acute respiratory syndrome-related coronavirus
  REGION 1..10: note = Table A: HLA-B*55:02H
  source 1..10: note = Severe acute respiratory syndrome coronavirus 2
GPLSAQTGIA

SEQ ID NO: 4591 - protein, 10 aa, Severe acute respiratory syndrome-related coronavirus
  REGION 1..10: note = Table A: HLA-B*13:02H
  source 1..10: note = Severe acute respiratory syndrome coronavirus 2
AQTGIAVLDM

SEQ ID NO: 4592 - protein, 10 aa, Severe acute respiratory syndrome-related coronavirus
  REGION 1..10: note = Table A: HLA-A*03:01M HLA-A*03:02H HLA-A*11:01M HLA-A*11:02M HLA-A*34:02H
  source 1..10: note = Severe acute respiratory syndrome coronavirus 2
AVLDMCASLK

SEQ ID NO: 4593 - protein, 10 aa, Severe acute respiratory syndrome-related coronavirus
  REGION 1..10: note = Table A: HLA-A*02:02M HLA-A*02:03H HLA-B*38:02H
  source 1..10: note = Severe acute respiratory syndrome coronavirus 2
SLKELLQNGM

SEQ ID NO: 4594 - protein, 10 aa, Severe acute respiratory syndrome-related coronavirus
  REGION 1..10: note = Table A: HLA-A*33:03H HLA-A*26:03H HLA-B*27:02H HLA-A*68:01H HLA-A*34:01H HLA-A*34:02H HLA-A*66:01M
  source 1..10: note = Severe acute respiratory syndrome coronavirus 2
ELLQNGMNGR

SEQ ID NO: 4595 - protein, 10 aa, Severe acute respiratory syndrome-related coronavirus
  REGION 1..10: note = Table A: HLA-A*68:02H
  source 1..10: note = Severe acute respiratory syndrome coronavirus 2
DEFTPFDVVR

SEQ ID NO: 4596 - protein, 10 aa, Severe acute respiratory syndrome-related coronavirus
  REGION 1..10: note = Table A: HLA-B*15:01H
  source 1..10: note = Severe acute respiratory syndrome coronavirus 2
VVRQCSGVTF

SEQ ID NO: 4597 - protein, 10 aa, Severe acute respiratory syndrome-related coronavirus
  REGION 1..10: note = Table A: HLA-A*11:01H HLA-A*36:01H HLA-B*27:02H HLA-A*30:02H HLA-A*34:02H
  source 1..10: note = Severe acute respiratory syndrome coronavirus 2
SGVTFQSAVK

SEQ ID NO: 4598 - protein, 10 aa, Severe acute respiratory syndrome-related coronavirus
  REGION 1..10: note = Table A: HLA-A*74:01H HLA-A*68:01M HLA-A*34:01H
  source 1..10: note = Severe acute respiratory syndrome coronavirus 2
GVTFQSAVKR

SEQ ID NO: 4599 - protein, 10 aa, Severe acute respiratory syndrome-related coronavirus
  REGION 1..10: note = Table A: HLA-B*57:03H
  source 1..10: note = Severe acute respiratory syndrome coronavirus 2
RTIKGTHHWL

SEQ ID NO: 4600 - protein, 10 aa, Severe acute respiratory syndrome-related coronavirus
  REGION 1..10: note = Table A: HLA-B*07:04H
  source 1..10: note = Severe acute respiratory syndrome coronavirus 2
TIKGTHHWLL

SEQ ID NO: 4601 - protein, 10 aa, Severe acute respiratory syndrome-related coronavirus
  REGION 1..10: note = Table A: HLA-B*38:02H
  source 1..10: note = Severe acute respiratory syndrome coronavirus 2
THHWLLLTIL

SEQ ID NO: 4602 - protein, 10 aa, Severe acute respiratory syndrome-related coronavirus
  REGION 1..10: note = Table A: HLA-B*58:01H HLA-B*27:02H
  source 1..10: note = Severe acute respiratory syndrome coronavirus 2
LLVLVQSTQW

SEQ ID NO: 4603 - protein, 10 aa, Severe acute respiratory syndrome-related coronavirus
  REGION 1..10: note = Table A: HLA-C*03:02H HLA-B*38:02H
  source 1..10: note = Severe acute respiratory syndrome coronavirus 2
FLYENAFLPF

SEQ ID NO: 4604 - protein, 10 aa, Severe acute respiratory syndrome-related coronavirus
  REGION 1..10: note = Table A: HLA-B*18:01H
  source 1..10: note = Severe acute respiratory syndrome coronavirus 2
YENAFLPFAM

SEQ ID NO: 4605 - protein, 10 aa, Severe acute respiratory syndrome-related coronavirus
  REGION 1..10: note = Table A: HLA-B*42:01H HLA-B*56:01H HLA-B*53:01H HLA-B*55:02M HLA-B*35:03H HLA-C*15:05M HLA-B*35:01H HLA-B*35:02H HLA-B*35:08H HLA-B*51:01M HLA-B*35:07H HLA-B*35:12H HLA-B*38:02H HLA-B*54:01M HLA-B*07:02H HLA-B*07:04H
  REGION 1..10: note = CONT. FROM ABOVE: HLA-B*15:02M HLA-B*07:05M HLA-B*15:11H
  source 1..10: note = Severe acute respiratory syndrome coronavirus 2
LPFAMGIIAM

SEQ ID NO: 4606 - protein, 10 aa, Severe acute respiratory syndrome-related coronavirus
  REGION 1..10: note = Table A: HLA-B*54:01H
  source 1..10: note = Severe acute respiratory syndrome coronavirus 2
FAMGIIAMSA

SEQ ID NO: 4607 - protein, 10 aa, Severe acute respiratory syndrome-related coronavirus
  REGION 1..10: note = Table A: HLA-A*02:03H
  source 1..10: note = Severe acute respiratory syndrome coronavirus 2
AMSAFAMMFV

SEQ ID NO: 4608 - protein, 10 aa, Severe acute respiratory syndrome-related coronavirus
  REGION 1..10: note = Table A: HLA-A*34:02H
  source 1..10: note = Severe acute respiratory syndrome coronavirus 2
MSAFAMMFVK

SEQ ID NO: 4609 - protein, 10 aa, Severe acute respiratory syndrome-related coronavirus
  REGION 1..10: note = Table A: HLA-B*46:01H HLA-B*15:01H HLA-B*15:02H
  source 1..10: note = Severe acute respiratory syndrome coronavirus 2
LLPSLATVAY

SEQ ID NO: 4610 - protein, 10 aa, Severe acute respiratory syndrome-related coronavirus
  REGION 1..10: note = Table A: HLA-B*53:01H HLA-C*15:05H HLA-B*35:01H
  source 1..10: note = Severe acute respiratory syndrome coronavirus 2
LPSLATVAYF

SEQ ID NO: 4611 - protein, 10 aa, Severe acute respiratory syndrome-related coronavirus
  REGION 1..10: note = Table A: HLA-A*36:01H HLA-A*30:02H
  source 1..10: note = Severe acute respiratory syndrome coronavirus 2
ATVAYFNMVY

SEQ ID NO: 4612 - protein, 10 aa, Severe acute respiratory syndrome-related coronavirus
  REGION 1..10: note = Table A: HLA-A*25:01H
  source 1..10: note = Severe acute respiratory syndrome coronavirus 2
FNMVYMPASW

SEQ ID NO: 4613 - protein, 10 aa, Severe acute respiratory syndrome-related coronavirus
  REGION 1..10: note = Table A: HLA-A*33:03H HLA-A*31:01H
  source 1..10: note = Severe acute respiratory syndrome coronavirus 2
VYMPASWVMR

SEQ ID NO: 4614 - protein, 10 aa, Severe acute respiratory syndrome-related coronavirus
  REGION 1..10: note = Table A: HLA-C*15:05H HLA-B*35:07H HLA-B*07:04M
  source 1..10: note = Severe acute respiratory syndrome coronavirus 2
MPASWVMRIM

SEQ ID NO: 4615 - protein, 10 aa, Severe acute respiratory syndrome-related coronavirus
  REGION 1..10: note = Table A: HLA-B*57:03H
  source 1..10: note = Severe acute respiratory syndrome coronavirus 2
ASWVMRIMTW

SEQ ID NO: 4616 - protein, 10 aa, Severe acute respiratory syndrome-related coronavirus
  REGION 1..10: note = Table A: HLA-A*25:01M HLA-A*26:01M HLA-A*26:02H HLA-A*26:03H HLA-A*34:01H HLA-B*38:02M HLA-B*15:02H
  source 1..10: note = Severe acute respiratory syndrome coronavirus 2
DMVDTSLSGF

SEQ ID NO: 4617 - protein, 10 aa, Severe acute respiratory syndrome-related coronavirus
  REGION 1..10: note = Table A: HLA-A*36:01M HLA-A*34:02M
  source 1..10: note = Severe acute respiratory syndrome coronavirus 2
MVDTSLSGFK

SEQ ID NO: 4618 - protein, 10 aa, Severe acute respiratory syndrome-related coronavirus
  REGION 1..10: note = Table A: HLA-A*34:02M HLA-A*66:01H
  source 1..10: note = Severe acute respiratory syndrome coronavirus 2
DTSLSGFKLK

SEQ ID NO: 4619 - protein, 10 aa, Severe acute respiratory syndrome-related coronavirus
  REGION 1..10: note = Table A: HLA-B*56:01H HLA-B*55:02H HLA-B*40:06H
  source 1..10: note = Severe acute respiratory syndrome coronavirus 2
AVVLLILMTA

SEQ ID NO: 4620 - protein, 10 aa, Severe acute respiratory syndrome-related coronavirus
  REGION 1..10: note = Table A: HLA-A*74:01H
  source 1..10: note = Severe acute respiratory syndrome coronavirus 2
VVLLILMTAR

SEQ ID NO: 4621 - protein, 10 aa, Severe acute respiratory syndrome-related coronavirus
  REGION 1..10: note = Table A: HLA-A*02:11H HLA-A*68:02H HLA-A*02:05M HLA-A*02:06M HLA-A*02:08H HLA-A*02:02H HLA-A*02:03H HLA-A*34:01H HLA-B*38:02H
  source 1..10: note = Severe acute respiratory syndrome coronavirus 2
TVYDDGARRV

SEQ ID NO: 4622 - protein, 10 aa, Severe acute respiratory syndrome-related coronavirus
  REGION 1..10: note = Table A: HLA-A*24:07H HLA-C*08:01H HLA-A*23:01H
  source 1..10: note = Severe acute respiratory syndrome coronavirus 2
VYDDGARRVW

SEQ ID NO: 4623 - protein, 10 aa, Severe acute respiratory syndrome-related coronavirus
  REGION 1..10: note = Table A: HLA-B*27:05H
  source 1..10: note = Severe acute respiratory syndrome coronavirus 2
RRVWTLMNVL

SEQ ID NO: 4624 - protein, 10 aa, Severe acute respiratory syndrome-related coronavirus
  REGION 1..10: note = Table A: HLA-A*29:01M HLA-A*29:02H HLA-B*38:02M HLA-B*15:01H HLA-B*15:02H HLA-B*07:05H
  source 1..10: note = Severe acute respiratory syndrome coronavirus 2
TLMNVLTLVY

SEQ ID NO: 4625 - protein, 10 aa, Severe acute respiratory syndrome-related coronavirus
  REGION 1..10: note = Table A: HLA-C*14:02H HLA-C*14:03H HLA-A*24:02H HLA-A*24:07H
  source 1..10: note = Severe acute respiratory syndrome coronavirus 2
VYKVYYGNAL

SEQ ID NO: 4626 - protein, 10 aa, Severe acute respiratory syndrome-related coronavirus
  REGION 1..10: note = Table A: HLA-A*25:01M HLA-B*53:01H HLA-B*35:01H HLA-B*35:07H HLA-B*38:02H HLA-B*57:03H
  source 1..10: note = Severe acute respiratory syndrome coronavirus 2
NALDQAISMW

SEQ ID NO: 4627 - protein, 10 aa, Severe acute respiratory syndrome-related coronavirus
  REGION 1..10: note = Table A: HLA-A*11:303H HLA-B*46:01H HLA-A*29:01H HLA-B*27:02H HLA-A*30:02M HLA-B*38:02M HLA-B*15:01H HLA-B*15:03H
  source 1..10: note = Severe acute respiratory syndrome coronavirus 2
ALIISVTSNY

SEQ ID NO: 4628 - protein, 10 aa, Severe acute respiratory syndrome-related coronavirus
  REGION 1..10: note = Table A: HLA-A*68:02H HLA-A*02:01H HLA-A*02:02H HLA-A*02:03M HLA-B*38:02H
  source 1..10: note = Severe acute respiratory syndrome coronavirus 2
SNYSGVVTTV

SEQ ID NO: 4629 - protein, 10 aa, Severe acute respiratory syndrome-related coronavirus
  REGION 1..10: note = Table A: HLA-C*14:02H HLA-C*14:03H HLA-C*07:02H HLA-B*07:05H
  source 1..10: note = Severe acute respiratory syndrome coronavirus 2
NYSGVVTTVM

SEQ ID NO: 4630 - protein, 10 aa, Severe acute respiratory syndrome-related coronavirus
  REGION 1..10: note = Table A: HLA-C*14:03H
  source 1..10: note = Severe acute respiratory syndrome coronavirus 2
MFLARGIVFM

SEQ ID NO: 4631 - protein, 10 aa, Severe acute respiratory syndrome-related coronavirus
  REGION 1..10: note = Table A: HLA-A*30:02H
  source 1..10: note = Severe acute respiratory syndrome coronavirus 2
RYFRLTLGVY

SEQ ID NO: 4632 - protein, 10 aa, Severe acute respiratory syndrome-related coronavirus
  REGION 1..10: note = Table A: HLA-B*27:02H
  source 1..10: note = Severe acute respiratory syndrome coronavirus 2
FRLTLGVYDY

SEQ ID NO: 4633 - protein, 10 aa, Severe acute respiratory syndrome-related coronavirus
  REGION 1..10: note = Table A: HLA-A*02:02H HLA-B*13:01M
  source 1..10: note = Severe acute respiratory syndrome coronavirus 2
RLTLGVYDYL

SEQ ID NO: 4634 - protein, 10 aa, Severe acute respiratory syndrome-related coronavirus
  REGION 1..10: note = Table A: HLA-B*18:01H HLA-B*27:02H HLA-B*37:01H HLA-B*38:02H
  source 1..10: note = Severe acute respiratory syndrome coronavirus 2
YDYLVSTQEF

SEQ ID NO: 4635 - protein, 10 aa, Severe acute respiratory syndrome-related coronavirus
  REGION 1..10: note = Table A: HLA-A*33:01H HLA-A*33:03H
  source 1..10: note = Severe acute respiratory syndrome coronavirus 2
DYLVSTQEFR

SEQ ID NO: 4636 - protein, 10 aa, Severe acute respiratory syndrome-related coronavirus
  REGION 1..10: note = Table A: HLA-A*36:01H HLA-A*29:02M HLA-A*30:02H
  source 1..10: note = Severe acute respiratory syndrome coronavirus 2
YLVSTQEFRY

SEQ ID NO: 4637 - protein, 10 aa, Severe acute respiratory syndrome-related coronavirus
  REGION 1..10: note = Table A: HLA-A*33:03H
  source 1..10: note = Severe acute respiratory syndrome coronavirus 2
STQEFRYMNS

SEQ ID NO: 4638 - protein, 10 aa, Severe acute respiratory syndrome-related coronavirus
  REGION 1..10: note = Table A: HLA-A*11:01H HLA-A*11:02H HLA-A*68:01H HLA-A*34:02M
  source 1..10: note = Severe acute respiratory syndrome coronavirus 2
MNSQGLLPPK

SEQ ID NO: 4639 - protein, 10 aa, Severe acute respiratory syndrome-related coronavirus
  REGION 1..10: note = Table A: HLA-B*53:01H HLA-B*35:03H HLA-C*15:05M HLA-B*35:01H HLA-B*35:02H HLA-B*35:08M HLA-B*35:07M HLA-B*35:12H HLA-B*07:05M
  source 1..10: note = Severe acute respiratory syndrome coronavirus 2
LPPKNSIDAF

SEQ ID NO: 4640 - protein, 10 aa, Severe acute respiratory syndrome-related coronavirus
  REGION 1..10: note = Table A: HLA-A*03:02H
  source 1..10: note = Severe acute respiratory syndrome coronavirus 2
TVQSKMSDVK

SEQ ID NO: 4641 - protein, 10 aa, Severe acute respiratory syndrome-related coronavirus
  REGION 1..10: note = Table A: HLA-A*02:11M HLA-A*02:01H HLA-A*02:02M HLA-A*02:03M
  source 1..10: note = Severe acute respiratory syndrome coronavirus 2
KMSDVKCTSV

SEQ ID NO: 4642 - protein, 10 aa, Severe acute respiratory syndrome-related coronavirus
  REGION 1..10: note = Table A: HLA-A*03:01H HLA-A*03:02H
  source 1..10: note = Severe acute respiratory syndrome coronavirus 2
QLHNDILLAK

SEQ ID NO: 4643 - protein, 10 aa, Severe acute respiratory syndrome-related coronavirus
  REGION 1..10: note = Table A: HLA-B*15:01H HLA-B*13:01H
  source 1..10: note = Severe acute respiratory syndrome coronavirus 2
LLAKDTTEAF

SEQ ID NO: 4644 - protein, 10 aa, Severe acute respiratory syndrome-related coronavirus
  REGION 1..10: note = Table A: HLA-A*68:02M
  source 1..10: note = Severe acute respiratory syndrome coronavirus 2
DTTEAFEKMV

SEQ ID NO: 4645 - protein, 10 aa, Severe acute respiratory syndrome-related coronavirus
  REGION 1..10: note = Table A: HLA-B*44:05H HLA-B*40:01M HLA-B*40:02M HLA-B*41:02H
  source 1..10: note = Severe acute respiratory syndrome coronavirus 2
TEAFEKMVSL

SEQ ID NO: 4646 - protein, 10 aa, Severe acute respiratory syndrome-related coronavirus
  REGION 1..10: note = Table A: HLA-A*68:02H HLA-A*34:01H HLA-A*34:02H
  source 1..10: note = Severe acute respiratory syndrome coronavirus 2
EAFEKMVSLL

SEQ ID NO: 4647 - protein, 10 aa, Severe acute respiratory syndrome-related coronavirus
  REGION 1..10: note = Table A: HLA-A*02:11H HLA-B*57:03H
  source 1..10: note = Severe acute respiratory syndrome coronavirus 2
KMVSLLSVLL

SEQ ID NO: 4648 - protein, 10 aa, Severe acute respiratory syndrome-related coronavirus
  REGION 1..10: note = Table A: HLA-A*11:303H HLA-A*03:01H HLA-A*03:02H HLA-A*11:01M HLA-A*11:02M HLA-A*30:02H HLA-C*07:27H
  source 1..10: note = Severe acute respiratory syndrome coronavirus 2
SMQGAVDINK

SEQ ID NO: 4649 - protein, 10 aa, Severe acute respiratory syndrome-related coronavirus
  REGION 1..10: note = Table A: HLA-B*38:01H HLA-B*38:02H HLA-B*39:01H HLA-B*13:01H
  source 1..10: note = Severe acute respiratory syndrome coronavirus 2
MQGAVDINKL

SEQ ID NO: 4650 - protein, 10 aa, Severe acute respiratory syndrome-related coronavirus
  REGION 1..10: note = Table A: HLA-B*44:02M HLA-B*44:05H HLA-B*45:01H HLA-B*44:03M HLA-B*40:01H HLA-B*40:02M HLA-B*41:02M HLA-B*49:01H
  source 1..10: note = Severe acute respiratory syndrome coronavirus 2
EEMLDNRATL

SEQ ID NO: 4651 - protein, 10 aa, Severe acute respiratory syndrome-related coronavirus
  REGION 1..10: note = Table A: HLA-B*58:01H HLA-A*11:01H HLA-B*57:01H HLA-A*30:02H HLA-C*15:05H HLA-A*34:02H HLA-B*57:03M
  source 1..10: note = Severe acute respiratory syndrome coronavirus 2
ATLQAIASEF

SEQ ID NO: 4652 - protein, 10 aa, Severe acute respiratory syndrome-related coronavirus
  REGION 1..10: note = Table A: HLA-A*11:303H HLA-C*03:03H HLA-C*03:04H HLA-B*35:03H HLA-C*15:05H HLA-C*08:01H HLA-B*38:02M HLA-B*39:01H
  source 1..10: note = Severe acute respiratory syndrome coronavirus 2
QAIASEFSSL

SEQ ID NO: 4653 - protein, 10 aa, Severe acute respiratory syndrome-related coronavirus
  REGION 1..10: note = Table A: HLA-B*58:01H HLA-A*36:01H HLA-A*01:01H HLA-A*30:02H
  source 1..10: note = Severe acute respiratory syndrome coronavirus 2
ASEFSSLPSY

SEQ ID NO: 4654 - protein, 10 aa, Severe acute respiratory syndrome-related coronavirus
  REGION 1..10: note = Table A: HLA-B*45:01H HLA-B*40:06H HLA-B*49:01H HLA-B*50:01M
  source 1..10: note = Severe acute respiratory syndrome coronavirus 2
SEFSSLPSYA

SEQ ID NO: 4655 - protein, 10 aa, Severe acute respiratory syndrome-related coronavirus
  REGION 1..10: note = Table A: HLA-B*46:01H
  source 1..10: note = Severe acute respiratory syndrome coronavirus 2
FSSLPSYAAF

SEQ ID NO: 4656 - protein, 10 aa, Severe acute respiratory syndrome-related coronavirus
  REGION 1..10: note = Table A: HLA-B*56:01M HLA-B*55:02M HLA-B*54:01H
  source 1..10: note = Severe acute respiratory syndrome coronavirus 2
LPSYAAFATA

SEQ ID NO: 4657 - protein, 10 aa, Severe acute respiratory syndrome-related coronavirus
  REGION 1..10: note = Table A: HLA-C*16:04H HLA-B*46:01H HLA-B*27:02H HLA-B*35:01M HLA-B*35:07M HLA-B*38:02M HLA-B*15:01M HLA-B*15:02H HLA-B*15:03H HLA-B*07:05H HLA-B*15:11H
  source 1..10: note = Severe acute respiratory syndrome coronavirus 2
AAFATAQEAY

SEQ ID NO: 4658 - protein, 10 aa, Severe acute respiratory syndrome-related coronavirus
  REGION 1..10: note = Table A: HLA-A*02:05H HLA-A*02:08H
  source 1..10: note = Severe acute respiratory syndrome coronavirus 2
ATAQEAYEQA

SEQ ID NO: 4659 - protein, 10 aa, Severe acute respiratory syndrome-related coronavirus
  REGION 1..10: note = Table A: HLA-B*38:02H HLA-B*39:01H
  source 1..10: note = Severe acute respiratory syndrome coronavirus 2
TAQEAYEQAV

SEQ ID NO: 4660 - protein, 10 aa, Severe acute respiratory syndrome-related coronavirus
  REGION 1..10: note = Table A: HLA-B*39:01H
  source 1..10: note = Severe acute respiratory syndrome coronavirus 2
AQEAYEQAVA

SEQ ID NO: 4661 - protein, 10 aa, Severe acute respiratory syndrome-related coronavirus
  REGION 1..10: note = Table A: HLA-A*26:03H HLA-A*34:01H
  source 1..10: note = Severe acute respiratory syndrome coronavirus 2
EAYEQAVANG

SEQ ID NO: 4662 - protein, 10 aa, Severe acute respiratory syndrome-related coronavirus
  REGION 1..10: note = Table A: HLA-B*39:01H
  source 1..10: note = Severe acute respiratory syndrome coronavirus 2
EQAVANGDSE

SEQ ID NO: 4663 - protein, 10 aa, Severe acute respiratory syndrome-related coronavirus
  REGION 1..10: note = Table A: HLA-C*03:04H HLA-B*35:03M HLA-C*15:05H HLA-B*35:01H HLA-B*35:02M HLA-B*35:08H HLA-C*08:01M HLA-B*35:12M HLA-B*38:02H
  source 1..10: note = Severe acute respiratory syndrome coronavirus 2
VANGDSEVVL

SEQ ID NO: 4664 - protein, 10 aa, Severe acute respiratory syndrome-related coronavirus
  REGION 1..10: note = Table A: HLA-B*44:05H HLA-B*40:02H HLA-B*41:02H
  source 1..10: note = Severe acute respiratory syndrome coronavirus 2
GDSEVVLKKL

SEQ ID NO: 4665 - protein, 10 aa, Severe acute respiratory syndrome-related coronavirus
  REGION 1..10: note = Table A: HLA-A*74:01M HLA-A*03:01H HLA-A*30:01H
  source 1..10: note = Severe acute respiratory syndrome coronavirus 2
KLKKSLNVAK

SEQ ID NO: 4666 - protein, 10 aa, Severe acute respiratory syndrome-related coronavirus
  REGION 1..10: note = Table A: HLA-B*58:01M HLA-B*58:02M HLA-B*57:01M HLA-A*30:02H HLA-C*15:05H HLA-A*32:01H HLA-B*15:01H HLA-B*57:03H
  source 1..10: note = Severe acute respiratory syndrome coronavirus 2
KSLNVAKSEF

SEQ ID NO: 4667 - protein, 10 aa, Severe acute respiratory syndrome-related coronavirus
  REGION 1..10: note = Table A: HLA-A*33:03M
  source 1..10: note = Severe acute respiratory syndrome coronavirus 2
EFDRDAAMQR

SEQ ID NO: 4668 - protein, 10 aa, Severe acute respiratory syndrome-related coronavirus
  REGION 1..10: note = Table A: HLA-A*03:01H HLA-A*02:11H HLA-C*15:05M HLA-A*02:05H HLA-A*02:08M HLA-A*02:01H HLA-A*02:02H HLA-A*02:03M HLA-B*38:02H HLA-B*15:01M HLA-B*07:05H
  source 1..10: note = Severe acute respiratory syndrome coronavirus 2
KMADQAMTQM

SEQ ID NO: 4669 - protein, 10 aa, Severe acute respiratory syndrome-related coronavirus
  REGION 1..10: note = Table A: HLA-A*36:01H HLA-A*01:01H HLA-B*35:01M HLA-B*35:08M HLA-B*35:07H HLA-B*38:02M
  source 1..10: note = Severe acute respiratory syndrome coronavirus 2
MADQAMTQMY

SEQ ID NO: 4670 - protein, 10 aa, Severe acute respiratory syndrome-related coronavirus
  REGION 1..10: note = Table A: HLA-B*54:01H
  source 1..10: note = Severe acute respiratory syndrome coronavirus 2
QAMTQMYKQA

SEQ ID NO: 4671 - protein, 10 aa, Severe acute respiratory syndrome-related coronavirus
  REGION 1..10: note = Table A: HLA-A*74:01H
  source 1..10: note = Severe acute respiratory syndrome coronavirus 2
AMTQMYKQAR

SEQ ID NO: 4672 - protein, 10 aa, Severe acute respiratory syndrome-related coronavirus
  REGION 1..10: note = Table A: HLA-B*15:03H
  source 1..10: note = Severe acute respiratory syndrome coronavirus 2
AKVTSAMQTM

SEQ ID NO: 4673 - protein, 10 aa, Severe acute respiratory syndrome-related coronavirus
  REGION 1..10: note = Table A: HLA-A*02:08M
  source 1..10: note = Severe acute respiratory syndrome coronavirus 2
KVTSAMQTML

SEQ ID NO: 4674 - protein, 10 aa, Severe acute respiratory syndrome-related coronavirus
  REGION 1..10: note = Table A: HLA-B*57:03H
  source 1..10: note = Severe acute respiratory syndrome coronavirus 2
VTSAMQTMLF

SEQ ID NO: 4675 - protein, 10 aa, Severe acute respiratory syndrome-related coronavirus
  REGION 1..10: note = Table A: HLA-A*11:02H HLA-A*34:02H
  source 1..10: note = Severe acute respiratory syndrome coronavirus 2
QTMLFTMLRK

SEQ ID NO: 4676 - protein, 10 aa, Severe acute respiratory syndrome-related coronavirus
  REGION 1..10: note = Table A: HLA-A*02:02H HLA-B*38:02H
  source 1..10: note = Severe acute respiratory syndrome coronavirus 2
MLRKLDNDAL

SEQ ID NO: 4677 - protein, 10 aa, Severe acute respiratory syndrome-related coronavirus
  REGION 1..10: note = Table A: HLA-B*13:01H
  source 1..10: note = Severe acute respiratory syndrome coronavirus 2
KLDNDALNNI

SEQ ID NO: 4678 - protein, 10 aa, Severe acute respiratory syndrome-related coronavirus
  REGION 1..10: note = Table A: HLA-B*54:01H
  source 1..10: note = Severe acute respiratory syndrome coronavirus 2
DALNNIINNA

SEQ ID NO: 4679 - protein, 10 aa, Severe acute respiratory syndrome-related coronavirus
  REGION 1..10: note = Table A: HLA-A*74:01H HLA-A*03:01H HLA-A*03:02M HLA-A*11:01H HLA-A*11:02H HLA-A*26:03H HLA-A*30:02H HLA-A*68:01H HLA-A*02:02H HLA-A*34:01H HLA-A*31:01H
  source 1..10: note = Severe acute respiratory syndrome coronavirus 2
ALNNIINNAR

SEQ ID NO: 4680 - protein, 10 aa, Severe acute respiratory syndrome-related coronavirus
  REGION 1..10: note = Table A: HLA-B*56:01H HLA-B*55:02M HLA-C*15:05H HLA-B*54:01H
  source 1..10: note = Severe acute respiratory syndrome coronavirus 2
VPLNIIPLTT

SEQ ID NO: 4681 - protein, 10 aa, Severe acute respiratory syndrome-related coronavirus
  REGION 1..10: note = Table A: HLA-A*26:03H HLA-A*68:01H HLA-A*34:02H HLA-A*66:01H
  source 1..10: note = Severe acute respiratory syndrome coronavirus 2
NIIPLTTAAK

SEQ ID NO: 4682 - protein, 10 aa, Severe acute respiratory syndrome-related coronavirus
  REGION 1..10: note = Table A: HLA-B*15:03H
  source 1..10: note = Severe acute respiratory syndrome coronavirus 2
AKLMVVIPDY

SEQ ID NO: 4683 - protein, 10 aa, Severe acute respiratory syndrome-related coronavirus
  REGION 1..10: note = Table A: HLA-A*25:01M HLA-B*46:01H HLA-A*26:01H HLA-A*26:02H HLA-A*26:03H HLA-A*29:02H HLA-A*30:02H HLA-B*35:01H HLA-B*35:08M HLA-B*35:07M HLA-B*38:02M HLA-B*15:01H HLA-B*15:02H HLA-B*39:01H HLA-B*07:05H HLA-B*15:11H
  source 1..10: note = Severe acute respiratory syndrome coronavirus 2
MVVIPDYNTY

SEQ ID NO: 4684 - protein, 10 aa, Severe acute respiratory syndrome-related coronavirus
  REGION 1..10: note = Table A: HLA-A*11:303H HLA-A*74:01H HLA-A*03:01M HLA-A*03:02M HLA-A*11:01H HLA-A*11:02H HLA-A*36:01M HLA-B*57:01H HLA-C*03:03H HLA-B*27:02H HLA-A*30:02H HLA-A*68:01H HLA-A*02:05H HLA-A*34:02M HLA-C*07:27M
  REGION 1..10: note = CONT. FROM ABOVE: HLA-A*66:01H
  source 1..10: note = Severe acute respiratory syndrome coronavirus 2
VVIPDYNTYK

SEQ ID NO: 4685 - protein, 10 aa, Severe acute respiratory syndrome-related coronavirus
  REGION 1..10: note = Table A: HLA-B*15:03H
  source 1..10: note = Severe acute respiratory syndrome coronavirus 2
YKNTCDGTTF

SEQ ID NO: 4686 - protein, 10 aa, Severe acute respiratory syndrome-related coronavirus
  REGION 1..10: note = Table A: HLA-A*26:01H HLA-A*29:01H HLA-A*29:02H HLA-A*34:02H HLA-B*35:01M
  source 1..10: note = Severe acute respiratory syndrome coronavirus 2
NTCDGTTFTY

SEQ ID NO: 4687 - protein, 10 aa, Severe acute respiratory syndrome-related coronavirus
  REGION 1..10: note = Table A: HLA-B*58:01H HLA-B*57:01H HLA-B*57:03H
  source 1..10: note = Severe acute respiratory syndrome coronavirus 2
TTFTYASALW

SEQ ID NO: 4688 - protein, 10 aa, Severe acute respiratory syndrome-related coronavirus
  REGION 1..10: note = Table A: HLA-A*68:02H
  source 1..10: note = Severe acute respiratory syndrome coronavirus 2
FTYASALWEI

SEQ ID NO: 4689 - protein, 10 aa, Severe acute respiratory syndrome-related coronavirus
  REGION 1..10: note = Table A: HLA-B*13:01H
  source 1..10: note = Severe acute respiratory syndrome coronavirus 2
QQVVDADSKI

SEQ ID NO: 4690 - protein, 10 aa, Severe acute respiratory syndrome-related coronavirus
  REGION 1..10: note = Table A: HLA-B*37:01H HLA-B*40:02H HLA-B*41:02H
  source 1..10: note = Severe acute respiratory syndrome coronavirus 2
VDADSKIVQL

SEQ ID NO: 4691 - protein, 10 aa, Severe acute respiratory syndrome-related coronavirus
  REGION 1..10: note = Table A: HLA-B*58:01H HLA-A*36:01H HLA-B*38:02H HLA-B*13:01H
  source 1..10: note = Severe acute respiratory syndrome coronavirus 2
SMDNSPNLAW

SEQ ID NO: 4692 - protein, 10 aa, Severe acute respiratory syndrome-related coronavirus
  REGION 1..10: note = Table A: HLA-B*55:02H HLA-C*15:05H
  source 1..10: note = Severe acute respiratory syndrome coronavirus 2
SPNLAWPLIV

SEQ ID NO: 4693 - protein, 10 aa, Severe acute respiratory syndrome-related coronavirus
  REGION 1..10: note = Table A: HLA-A*02:02H
  source 1..10: note = Severe acute respiratory syndrome coronavirus 2
NLAWPLIVTA

SEQ ID NO: 4694 - protein, 10 aa, Severe acute respiratory syndrome-related coronavirus
  REGION 1..10: note = Table A: HLA-A*02:11H
  source 1..10: note = Severe acute respiratory syndrome coronavirus 2
LAWPLIVTAL

SEQ ID NO: 4695 - protein, 10 aa, Severe acute respiratory syndrome-related coronavirus
  REGION 1..10: note = Table A: HLA-A*11:303M HLA-B*44:05H HLA-C*03:03H HLA-C*12:05H HLA-C*03:04H HLA-A*68:02H HLA-B*35:03H HLA-C*15:05H HLA-A*02:05H HLA-A*02:08H HLA-A*02:02H HLA-B*35:01H HLA-B*35:02H HLA-C*17:01H HLA-C*08:01M
  REGION 1..10: note = CONT. FROM ABOVE: HLA-C*08:03H HLA-B*35:12H HLA-B*38:02M HLA- B*40:02H HLA-B*57:03M
  source 1..10: note = Severe acute respiratory syndrome coronavirus 2
SAVKLQNNEL

SEQ ID NO: 4696 - protein, 10 aa, Severe acute respiratory syndrome-related coronavirus
  REGION 1..10: note = Table A: HLA-C*08:03H
  source 1..10: note = Severe acute respiratory syndrome coronavirus 2
KLQNNELSPV

SEQ ID NO: 4697 - protein, 10 aa, Severe acute respiratory syndrome-related coronavirus
  REGION 1..10: note = Table A: HLA-C*15:05H HLA-B*39:01H
  source 1..10: note = Severe acute respiratory syndrome coronavirus 2
QNNELSPVAL

SEQ ID NO: 4698 - protein, 10 aa, Severe acute respiratory syndrome-related coronavirus
  REGION 1..10: note = Table A: HLA-A*68:01H
  source 1..10: note = Severe acute respiratory syndrome coronavirus 2
NNELSPVALR

SEQ ID NO: 4699 - protein, 10 aa, Severe acute respiratory syndrome-related coronavirus
  REGION 1..10: note = Table A: HLA-A*26:01H HLA-A*26:02M HLA-A*26:03M HLA-A*68:02H HLA-A*02:02H HLA-A*34:01M HLA-A*34:02H HLA-B*38:02H HLA-B*15:02H
  source 1..10: note = Severe acute respiratory syndrome coronavirus 2
ELSPVALRQM

SEQ ID NO: 4700 - protein, 10 aa, Severe acute respiratory syndrome-related coronavirus
  REGION 1..10: note = Table A: HLA-B*56:01M HLA-B*55:02M HLA-C*15:05M HLA-B*55:01H HLA-B*54:01H HLA-B*07:02H HLA-B*07:04H
  source 1..10: note = Severe acute respiratory syndrome coronavirus 2
SPVALRQMSC

SEQ ID NO: 4701 - protein, 10 aa, Severe acute respiratory syndrome-related coronavirus
  REGION 1..10: note = Table A: HLA-A*36:01H HLA-A*29:02H HLA-A*01:01H HLA-A*30:02H
  source 1..10: note = Severe acute respiratory syndrome coronavirus 2
CTDDNALAYY

SEQ ID NO: 4702 - protein, 10 aa, Severe acute respiratory syndrome-related coronavirus
  REGION 1..10: note = Table A: HLA-B*27:02H HLA-A*34:02M
  source 1..10: note = Severe acute respiratory syndrome coronavirus 2
NALAYYNTTK

SEQ ID NO: 4703 - protein, 10 aa, Severe acute respiratory syndrome-related coronavirus
  REGION 1..10: note = Table A: HLA-C*14:02H HLA-C*14:03H HLA-A*24:02H HLA-A*24:07M HLA-A*23:01H
  source 1..10: note = Severe acute respiratory syndrome coronavirus 2
YYNTTKGGRF

SEQ ID NO: 4704 - protein, 10 aa, Severe acute respiratory syndrome-related coronavirus
  REGION 1..10: note = Table A: HLA-A*30:01H HLA-B*55:01H
  source 1..10: note = Severe acute respiratory syndrome coronavirus 2
TTKGGRFVLA

SEQ ID NO: 4705 - protein, 10 aa, Severe acute respiratory syndrome-related coronavirus
  REGION 1..10: note = Table A: HLA-B*58:01H HLA-B*57:01H HLA-B*44:03H HLA-B*53:01M HLA-A*02:02H HLA-B*15:13H HLA-B*38:02H HLA-B*57:03M HLA-B*13:01M
  source 1..10: note = Severe acute respiratory syndrome coronavirus 2
LLSDLQDLKW

SEQ ID NO: 4706 - protein, 10 aa, Severe acute respiratory syndrome-related coronavirus
  REGION 1..10: note = Table A: HLA-A*33:01H
  source 1..10: note = Severe acute respiratory syndrome coronavirus 2
DLQDLKWARF

SEQ ID NO: 4707 - protein, 10 aa, Severe acute respiratory syndrome-related coronavirus
  REGION 1..10: note = Table A: HLA-B*53:01H HLA-C*15:05H HLA-B*51:01M HLA-B*07:04H
  source 1..10: note = Severe acute respiratory syndrome coronavirus 2
FPKSDGTGTI

SEQ ID NO: 4708 - protein, 10 aa, Severe acute respiratory syndrome-related coronavirus
  REGION 1..10: note = Table A: HLA-A*36:01H
  source 1..10: note = Severe acute respiratory syndrome coronavirus 2
KSDGTGTIYT

SEQ ID NO: 4709 - protein, 10 aa, Severe acute respiratory syndrome-related coronavirus
  REGION 1..10: note = Table A: HLA-C*04:03H
  source 1..10: note = Severe acute respiratory syndrome coronavirus 2
YTELEPPCRF

SEQ ID NO: 4710 - protein, 10 aa, Severe acute respiratory syndrome-related coronavirus
  REGION 1..10: note = Table A: HLA-B*49:01H
  source 1..10: note = Severe acute respiratory syndrome coronavirus 2
TELEPPCRFV

SEQ ID NO: 4711 - protein, 10 aa, Severe acute respiratory syndrome-related coronavirus
  REGION 1..10: note = Table A: HLA-A*26:03H HLA-A*34:01H HLA-A*34:02M HLA-A*66:01M
  source 1..10: note = Severe acute respiratory syndrome coronavirus 2
FVTDTPKGPK

SEQ ID NO: 4712 - protein, 10 aa, Severe acute respiratory syndrome-related coronavirus
  REGION 1..10: note = Table A: HLA-A*26:01H
  source 1..10: note = Severe acute respiratory syndrome coronavirus 2
DTPKGPKVKY

SEQ ID NO: 4713 - protein, 10 aa, Severe acute respiratory syndrome-related coronavirus
  REGION 1..10: note = Table A: HLA-B*42:01H HLA-B*07:04H
  source 1..10: note = Severe acute respiratory syndrome coronavirus 2
TPKGPKVKYL

SEQ ID NO: 4714 - protein, 10 aa, Severe acute respiratory syndrome-related coronavirus
  REGION 1..10: note = Table A: HLA-A*24:07H HLA-B*57:03H
  source 1..10: note = Severe acute respiratory syndrome coronavirus 2
KGPKVKYLYF

SEQ ID NO: 4715 - protein, 10 aa, Severe acute respiratory syndrome-related coronavirus
  REGION 1..10: note = Table A: HLA-C*14:03H HLA-A*02:02H HLA-A*24:02H HLA-A*23:01H
  source 1..10: note = Severe acute respiratory syndrome coronavirus 2
LYFIKGLNNL

SEQ ID NO: 4716 - protein, 10 aa, Severe acute respiratory syndrome-related coronavirus
  REGION 1..10: note = Table A: HLA-A*74:01H HLA-A*33:03H HLA-A*26:03H HLA-A*34:01H HLA-A*66:01H
  source 1..10: note = Severe acute respiratory syndrome coronavirus 2
FIKGLNNLNR

SEQ ID NO: 4717 - protein, 10 aa, Severe acute respiratory syndrome-related coronavirus
  REGION 1..10: note = Table A: HLA-B*55:02H
  source 1..10: note = Severe acute respiratory syndrome coronavirus 2
RGMVLGSLAA

SEQ ID NO: 4718 - protein, 10 aa, Severe acute respiratory syndrome-related coronavirus
  REGION 1..10: note = Table A: HLA-A*68:02H
  source 1..10: note = Severe acute respiratory syndrome coronavirus 2
MVLGSLAATV

SEQ ID NO: 4719 - protein, 10 aa, Severe acute respiratory syndrome-related coronavirus
  REGION 1..10: note = Table A: HLA-A*02:02H HLA-A*02:03H HLA-B*38:02H HLA-B*13:02H
  source 1..10: note = Severe acute respiratory syndrome coronavirus 2
SLAATVRLQA

SEQ ID NO: 4720 - protein, 10 aa, Severe acute respiratory syndrome-related coronavirus
  REGION 1..10: note = Table A: HLA-B*44:05M HLA-B*40:01H HLA-B*40:02M HLA-B*39:01H HLA-B*41:02M HLA-B*49:01M
  source 1..10: note = Severe acute respiratory syndrome coronavirus 2
TEVPANSTVL

SEQ ID NO: 4721 - protein, 10 aa, Severe acute respiratory syndrome-related coronavirus
  REGION 1..10: note = Table A: HLA-B*53:01H HLA-B*55:02H HLA-C*15:05M HLA-B*35:01M HLA-B*35:07H HLA-B*07:02H HLA-B*07:05M
  source 1..10: note = Severe acute respiratory syndrome coronavirus 2
VPANSTVLSF

SEQ ID NO: 4722 - protein, 10 aa, Severe acute respiratory syndrome-related coronavirus
  REGION 1..10: note = Table A: HLA-C*14:02H HLA-C*14:03M
  source 1..10: note = Severe acute respiratory syndrome coronavirus 2
AFAVDAAKAY

SEQ ID NO: 4723 - protein, 10 aa, Severe acute respiratory syndrome-related coronavirus
  REGION 1..10: note = Table A: HLA-A*26:03H HLA-A*68:01H HLA-A*34:01H HLA-A*34:02M HLA-A*66:01M
  source 1..10: note = Severe acute respiratory syndrome coronavirus 2
FAVDAAKAYK

SEQ ID NO: 4724 - protein, 10 aa, Severe acute respiratory syndrome-related coronavirus
  REGION 1..10: note = Table A: HLA-A*68:02H
  source 1..10: note = Severe acute respiratory syndrome coronavirus 2
DAAKAYKDYL

SEQ ID NO: 4725 - protein, 10 aa, Severe acute respiratory syndrome-related coronavirus
  REGION 1..10: note = Table A: HLA-B*07:04H
  source 1..10: note = Severe acute respiratory syndrome coronavirus 2
QPITNCVKML

SEQ ID NO: 4726 - protein, 10 aa, Severe acute respiratory syndrome-related coronavirus
  REGION 1..10: note = Table A: HLA-B*38:02H
  source 1..10: note = Severe acute respiratory syndrome coronavirus 2
CTHTGTGQAI

SEQ ID NO: 4727 - protein, 10 aa, Severe acute respiratory syndrome-related coronavirus
  REGION 1..10: note = Table A: HLA-A*68:02H
  source 1..10: note = Severe acute respiratory syndrome coronavirus 2
HTGTGQAITV

SEQ ID NO: 4728 - protein, 10 aa, Severe acute respiratory syndrome-related coronavirus
  REGION 1..10: note = Table A: HLA-B*13:02H
  source 1..10: note = Severe acute respiratory syndrome coronavirus 2
GQAITVTPEA

SEQ ID NO: 4729 - protein, 10 aa, Severe acute respiratory syndrome-related coronavirus
  REGION 1..10: note = Table A: HLA-B*39:01H
  source 1..10: note = Severe acute respiratory syndrome coronavirus 2
DQESFGGASC

SEQ ID NO: 4730 - protein, 10 aa, Severe acute respiratory syndrome-related coronavirus
  REGION 1..10: note = Table A: HLA-A*29:02H
  source 1..10: note = Severe acute respiratory syndrome coronavirus 2
SFGGASCCLY

SEQ ID NO: 4731 - protein, 10 aa, Severe acute respiratory syndrome-related coronavirus
  REGION 1..10: note = Table A: HLA-A*36:01H HLA-C*04:03H HLA-A*02:07H HLA-C*08:02H HLA-B*38:02H HLA-C*05:01H
  source 1..10: note = Severe acute respiratory syndrome coronavirus 2
HIDHPNPKGF

SEQ ID NO: 4732 - protein, 10 aa, Severe acute respiratory syndrome-related coronavirus
  REGION 1..10: note = Table A: HLA-B*42:01H HLA-B*08:01H HLA-B*35:03H HLA-C*15:05H HLA-B*07:02H HLA-B*07:04M
  source 1..10: note = Severe acute respiratory syndrome coronavirus 2
HPNPKGFCDL

SEQ ID NO: 4733 - protein, 10 aa, Severe acute respiratory syndrome-related coronavirus
  REGION 1..10: note = Table A: HLA-A*30:02H
  source 1..10: note = Severe acute respiratory syndrome coronavirus 2
KGFCDLKGKY

SEQ ID NO: 4734 - protein, 10 aa, Severe acute respiratory syndrome-related coronavirus
  REGION 1..10: note = Table A: HLA-A*11:303H HLA-C*16:04H HLA-C*03:03H HLA-C*03:02H HLA-C*03:04M HLA-B*35:03H HLA-C*15:05H HLA-C*12:02H HLA-C*07:27H HLA-C*08:01H
  source 1..10: note = Severe acute respiratory syndrome coronavirus 2
CANDPVGFTL

SEQ ID NO: 4735 - protein, 10 aa, Severe acute respiratory syndrome-related coronavirus
  REGION 1..10: note = Table A: HLA-A*11:01H HLA-A*36:01M HLA-C*03:03H HLA-A*34:02H
  source 1..10: note = Severe acute respiratory syndrome coronavirus 2
ANDPVGFTLK

SEQ ID NO: 4736 - protein, 10 aa, Severe acute respiratory syndrome-related coronavirus
  REGION 1..10: note = Table A: HLA-B*55:01H HLA-A*02:02H HLA-A*02:03H HLA-B*38:02M
  source 1..10: note = Severe acute respiratory syndrome coronavirus 2
QLREPMLQSA

SEQ ID NO: 4737 - protein, 10 aa, Severe acute respiratory syndrome-related coronavirus
  REGION 1..10: note = Table A: HLA-B*50:01H
  source 1..10: note = Severe acute respiratory syndrome coronavirus 2
REPMLQSADA

SEQ ID NO: 4738 - protein, 10 aa, Severe acute respiratory syndrome-related coronavirus
  REGION 1..10: note = Table A: HLA-B*38:02H HLA-B*15:02H
  source 1..10: note = Severe acute respiratory syndrome coronavirus 2
MLQSADAQSF

SEQ ID NO: 4739 - protein, 10 aa, Severe acute respiratory syndrome-related coronavirus
  REGION 1..10: note = Table A: HLA-A*02:08H
  source 1..10: note = Severe acute respiratory syndrome coronavirus 2
LQSADAQSFL

SEQ ID NO: 4740 - protein, 10 aa, Severe acute respiratory syndrome-related coronavirus
  REGION 1..10: note = Table A: HLA-A*33:03H HLA-A*68:01H HLA-A*34:02H
  source 1..10: note = Severe acute respiratory syndrome coronavirus 2
SADAQSFLNR

SEQ ID NO: 4741 - protein, 10 aa, Severe acute respiratory syndrome-related coronavirus
  REGION 1..10: note = Table A: HLA-B*54:01H
  source 1..10: note = Severe acute respiratory syndrome coronavirus 2
FLNRVCGVSA

SEQ ID NO: 4742 - protein, 10 aa, Severe acute respiratory syndrome-related coronavirus
  REGION 1..10: note = Table A: HLA-A*68:01M
  source 1..10: note = Severe acute respiratory syndrome coronavirus 2
TGTSTDVVYR

SEQ ID NO: 4743 - protein, 10 aa, Severe acute respiratory syndrome-related coronavirus
  REGION 1..10: note = Table A: HLA-A*02:05H HLA-A*02:08H
  source 1..10: note = Severe acute respiratory syndrome coronavirus 2
GTSTDVVYRA

SEQ ID NO: 4744 - protein, 10 aa, Severe acute respiratory syndrome-related coronavirus
  REGION 1..10: note = Table A: HLA-B*58:02H HLA-C*16:01H HLA-B*57:01H HLA-A*25:01H HLA-A*68:02H HLA-B*57:03H
  source 1..10: note = Severe acute respiratory syndrome coronavirus 2
TSTDVVYRAF

SEQ ID NO: 4745 - protein, 10 aa, Severe acute respiratory syndrome-related coronavirus
  REGION 1..10: note = Table A: HLA-C*16:04H HLA-A*36:01H HLA-A*02:11H HLA-A*30:02H HLA-A*68:02M HLA-C*15:02H HLA-A*02:04H HLA-A*02:05H HLA-A*02:06M HLA-A*02:07H HLA-A*02:08M HLA-A*02:02H HLA-A*02:03H HLA-C*08:01H HLA-C*08:03H HLA-B*38:02H
  REGION 1..10: note = CONT. FROM ABOVE: HLA-B*40:06H HLA-B*57:03H HLA-B*13:01H HLA- B*13:02M
  source 1..10: note = Severe acute respiratory syndrome coronavirus 2
RAFDIYNDKV

SEQ ID NO: 4746 - protein, 10 aa, Severe acute respiratory syndrome-related coronavirus
  REGION 1..10: note = Table A: HLA-A*25:01H HLA-A*26:01H HLA-A*26:02H HLA-A*26:03H HLA-A*68:01H HLA-A*68:02H HLA-A*34:01M HLA-A*34:02H HLA-B*38:02M HLA-B*15:02M HLA-B*39:01H HLA-A*66:01M
  source 1..10: note = Severe acute respiratory syndrome coronavirus 2
DIYNDKVAGF

SEQ ID NO: 4747 - protein, 10 aa, Severe acute respiratory syndrome-related coronavirus
  REGION 1..10: note = Table A: HLA-A*74:01H HLA-A*03:01H HLA-A*03:02H HLA-A*11:01M HLA-A*11:02M HLA-A*36:01H HLA-A*30:01H HLA-A*30:02H HLA-A*34:02H
  source 1..10: note = Severe acute respiratory syndrome coronavirus 2
KVAGFAKFLK

SEQ ID NO: 4748 - protein, 10 aa, Severe acute respiratory syndrome-related coronavirus
  REGION 1..10: note = Table A: HLA-B*49:01H
  source 1..10: note = Severe acute respiratory syndrome coronavirus 2
QEKDEDDNLI

SEQ ID NO: 4749 - protein, 10 aa, Severe acute respiratory syndrome-related coronavirus
  REGION 1..10: note = Table A: HLA-B*44:03H HLA-B*18:01H HLA-B*39:01H HLA-B*07:05H
  source 1..10: note = Severe acute respiratory syndrome coronavirus 2
DEDDNLIDSY

SEQ ID NO: 4750 - protein, 10 aa, Severe acute respiratory syndrome-related coronavirus
  REGION 1..10: note = Table A: HLA-A*34:02H
  source 1..10: note = Severe acute respiratory syndrome coronavirus 2
NLIDSYFVVK

SEQ ID NO: 4751 - protein, 10 aa, Severe acute respiratory syndrome-related coronavirus
  REGION 1..10: note = Table A: HLA-C*14:02H HLA-C*14:03H HLA-A*30:02H HLA-A*24:02H HLA-A*24:07H HLA-C*08:01H HLA-A*23:01M
  source 1..10: note = Severe acute respiratory syndrome coronavirus 2
SYFVVKRHTF

SEQ ID NO: 4752 - protein, 10 aa, Severe acute respiratory syndrome-related coronavirus
  REGION 1..10: note = Table A: HLA-A*30:02M
  source 1..10: note = Severe acute respiratory syndrome coronavirus 2
VVKRHTFSNY

SEQ ID NO: 4753 - protein, 10 aa, Severe acute respiratory syndrome-related coronavirus
  REGION 1..10: note = Table A: HLA-A*68:02H
  source 1..10: note = Severe acute respiratory syndrome coronavirus 2
HTFSNYQHEE

SEQ ID NO: 4754 - protein, 10 aa, Severe acute respiratory syndrome-related coronavirus
  REGION 1..10: note = Table A: HLA-A*02:11M HLA-A*02:04M HLA-A*02:05M HLA-A*02:06H HLA-A*02:08H HLA-A*02:02H HLA-C*08:01H HLA-B*38:01H HLA-B*38:02M HLA-B*13:01M
  source 1..10: note = Severe acute respiratory syndrome coronavirus 2
YQHEETIYNL

SEQ ID NO: 4755 - protein, 10 aa, Severe acute respiratory syndrome-related coronavirus
  REGION 1..10: note = Table A: HLA-B*38:01H HLA-B*38:02H HLA-B*39:01M HLA-B*15:10M
  source 1..10: note = Severe acute respiratory syndrome coronavirus 2
QHEETIYNLL

SEQ ID NO: 4756 - protein, 10 aa, Severe acute respiratory syndrome-related coronavirus
  REGION 1..10: note = Table A: HLA-A*36:01H
  source 1..10: note = Severe acute respiratory syndrome coronavirus 2
HEETIYNLLK

SEQ ID NO: 4757 - protein, 10 aa, Severe acute respiratory syndrome-related coronavirus
  REGION 1..10: note = Table A: HLA-B*57:03H
  source 1..10: note = Severe acute respiratory syndrome coronavirus 2
AVAKHDFFKF

SEQ ID NO: 4758 - protein, 10 aa, Severe acute respiratory syndrome-related coronavirus
  REGION 1..10: note = Table A: HLA-A*02:07H HLA-B*13:01H
  source 1..10: note = Severe acute respiratory syndrome coronavirus 2
RIDGDMVPHI

SEQ ID NO: 4759 - protein, 10 aa, Severe acute respiratory syndrome-related coronavirus
  REGION 1..10: note = Table A: HLA-A*33:01M HLA-A*33:03H HLA-A*68:01H
  source 1..10: note = Severe acute respiratory syndrome coronavirus 2
DGDMVPHISR

SEQ ID NO: 4760 - protein, 10 aa, Severe acute respiratory syndrome-related coronavirus
  REGION 1..10: note = Table A: HLA-A*33:01H HLA-A*33:03H HLA-A*26:03H HLA-A*34:01H HLA-A*66:01H
  source 1..10: note = Severe acute respiratory syndrome coronavirus 2
DMVPHISRQR

SEQ ID NO: 4761 - protein, 10 aa, Severe acute respiratory syndrome-related coronavirus
  REGION 1..10: note = Table A: HLA-A*34:01H HLA-A*34:02H
  source 1..10: note = Severe acute respiratory syndrome coronavirus 2
MVPHISRQRL

SEQ ID NO: 4762 - protein, 10 aa, Severe acute respiratory syndrome-related coronavirus
  REGION 1..10: note = Table A: HLA-B*15:03M
  source 1..10: note = Severe acute respiratory syndrome coronavirus 2
TKYTMADLVY

SEQ ID NO: 4763 - protein, 10 aa, Severe acute respiratory syndrome-related coronavirus
  REGION 1..10: note = Table A: HLA-A*68:02H
  source 1..10: note = Severe acute respiratory syndrome coronavirus 2
YTMADLVYAL

SEQ ID NO: 4764 - protein, 10 aa, Severe acute respiratory syndrome-related coronavirus
  REGION 1..10: note = Table A: HLA-A*74:01M HLA-A*26:03H HLA-A*68:01H HLA-A*34:01M
  source 1..10: note = Severe acute respiratory syndrome coronavirus 2
TMADLVYALR

SEQ ID NO: 4765 - protein, 10 aa, Severe acute respiratory syndrome-related coronavirus
  REGION 1..10: note = Table A: HLA-B*39:01H
  source 1..10: note = Severe acute respiratory syndrome coronavirus 2
RHFDEGNCDT

SEQ ID NO: 4766 - protein, 10 aa, Severe acute respiratory syndrome-related coronavirus
  REGION 1..10: note = Table A: HLA-C*04:01H HLA-C*08:02H HLA-B*38:02H HLA-B*39:01H
  source 1..10: note = Severe acute respiratory syndrome coronavirus 2
HFDEGNCDTL

SEQ ID NO: 4767 - protein, 10 aa, Severe acute respiratory syndrome-related coronavirus
  REGION 1..10: note = Table A: HLA-B*57:01H HLA-A*25:01M HLA-A*26:01M HLA-A*26:02H HLA-A*34:02H HLA-B*35:01M HLA-B*35:07H HLA-B*38:02H HLA-B*15:02H HLA-B*57:03H
  source 1..10: note = Severe acute respiratory syndrome coronavirus 2
DTLKEILVTY

SEQ ID NO: 4768 - protein, 10 aa, Severe acute respiratory syndrome-related coronavirus
  REGION 1..10: note = Table A: HLA-A*24:07H
  source 1..10: note = Severe acute respiratory syndrome coronavirus 2
YFNKKDWYDF

SEQ ID NO: 4769 - protein, 10 aa, Severe acute respiratory syndrome-related coronavirus
  REGION 1..10: note = Table A: HLA-A*33:01H HLA-A*33:03H HLA-B*27:02H HLA-A*68:01H HLA-A*34:01H HLA-A*66:01H
  source 1..10: note = Severe acute respiratory syndrome coronavirus 2
DFVENPDILR

SEQ ID NO: 4770 - protein, 10 aa, Severe acute respiratory syndrome-related coronavirus
  REGION 1..10: note = Table A: HLA-C*04:03H HLA-A*02:11H HLA-A*68:02H HLA-A*02:04H HLA-A*02:05H HLA-A*02:06H HLA-A*02:07H
  source 1..10: note = Severe acute respiratory syndrome coronavirus 2
FVENPDILRV

SEQ ID NO: 4771 - protein, 10 aa, Severe acute respiratory syndrome-related coronavirus
  REGION 1..10: note = Table A: HLA-B*44:02H HLA-B*44:05H HLA-B*57:01H HLA-B*46:01H HLA-B*44:03H HLA-B*18:01M HLA-C*07:01H HLA-C*03:02H HLA-A*30:02M HLA-B*15:01H HLA-B*07:05H
  source 1..10: note = Severe acute respiratory syndrome coronavirus 2
VENPDILRVY

SEQ ID NO: 4772 - protein, 10 aa, Severe acute respiratory syndrome-related coronavirus
  REGION 1..10: note = Table A: HLA-A*68:02H
  source 1..10: note = Severe acute respiratory syndrome coronavirus 2
ENPDILRVYA

SEQ ID NO: 4773 - protein, 10 aa, Severe acute respiratory syndrome-related coronavirus
  REGION 1..10: note = Table A: HLA-A*02:11H HLA-A*02:05H HLA-A*02:08M HLA-B*13:02H
  source 1..10: note = Severe acute respiratory syndrome coronavirus 2
RVYANLGERV

SEQ ID NO: 4774 - protein, 10 aa, Severe acute respiratory syndrome-related coronavirus
  REGION 1..10: note = Table A: HLA-A*02:02H
  source 1..10: note = Severe acute respiratory syndrome coronavirus 2
NLGERVRQAL

SEQ ID NO: 4775 - protein, 10 aa, Severe acute respiratory syndrome-related coronavirus
  REGION 1..10: note = Table A: HLA-B*07:04M
  source 1..10: note = Severe acute respiratory syndrome coronavirus 2
RVRQALLKTV

SEQ ID NO: 4776 - protein, 10 aa, Severe acute respiratory syndrome-related coronavirus
  REGION 1..10: note = Table A: HLA-B*15:01M HLA-B*15:03M HLA-B*57:03H HLA-B*13:01H
  source 1..10: note = Severe acute respiratory syndrome coronavirus 2
RQALLKTVQF

SEQ ID NO: 4777 - protein, 10 aa, Severe acute respiratory syndrome-related coronavirus
  REGION 1..10: note = Table A: HLA-A*02:03H
  source 1..10: note = Severe acute respiratory syndrome coronavirus 2
LLKTVQFCDA

SEQ ID NO: 4778 - protein, 10 aa, Severe acute respiratory syndrome-related coronavirus
  REGION 1..10: note = Table A: HLA-A*74:01H
  source 1..10: note = Severe acute respiratory syndrome coronavirus 2
KTVQFCDAMR

SEQ ID NO: 4779 - protein, 10 aa, Severe acute respiratory syndrome-related coronavirus
  REGION 1..10: note = Table A: HLA-A*02:11H HLA-A*30:01H HLA-A*02:01H HLA-A*02:02H HLA-A*02:03M HLA-B*38:02H
  source 1..10: note = Severe acute respiratory syndrome coronavirus 2
AMRNAGIVGV

SEQ ID NO: 4780 - protein, 10 aa, Severe acute respiratory syndrome-related coronavirus
  REGION 1..10: note = Table A: HLA-A*36:01H
  source 1..10: note = Severe acute respiratory syndrome coronavirus 2
GSGVPVVDSY

SEQ ID NO: 4781 - protein, 10 aa, Severe acute respiratory syndrome-related coronavirus
  REGION 1..10: note = Table A: HLA-A*30:02H
  source 1..10: note = Severe acute respiratory syndrome coronavirus 2
SGVPVVDSYY

SEQ ID NO: 4782 - protein, 10 aa, Severe acute respiratory syndrome-related coronavirus
  REGION 1..10: note = Table A: HLA-B*35:03H HLA-C*15:05H
  source 1..10: note = Severe acute respiratory syndrome coronavirus 2
VPVVDSYYSL

SEQ ID NO: 4783 - protein, 10 aa, Severe acute respiratory syndrome-related coronavirus
  REGION 1..10: note = Table A: HLA-A*74:01H
  source 1..10: note = Severe acute respiratory syndrome coronavirus 2
LLMPILTLTR

SEQ ID NO: 4784 - protein, 10 aa, Severe acute respiratory syndrome-related coronavirus
  REGION 1..10: note = Table A: HLA-B*42:01H HLA-B*56:01H HLA-B*55:02H HLA-B*35:03M HLA-C*15:05M HLA-B*55:01H HLA-B*35:07H HLA-B*54:01H HLA-B*07:02M HLA-B*07:04H HLA-B*07:05H
  source 1..10: note = Severe acute respiratory syndrome coronavirus 2
MPILTLTRAL

SEQ ID NO: 4785 - protein, 10 aa, Severe acute respiratory syndrome-related coronavirus
  REGION 1..10: note = Table A: HLA-A*34:02H
  source 1..10: note = Severe acute respiratory syndrome coronavirus 2
ESHVDTDLTK

SEQ ID NO: 4786 - protein, 10 aa, Severe acute respiratory syndrome-related coronavirus
  REGION 1..10: note = Table A: HLA-B*38:02H HLA-B*39:01H
  source 1..10: note = Severe acute respiratory syndrome coronavirus 2
SHVDTDLTKP

SEQ ID NO: 4787 - protein, 10 aa, Severe acute respiratory syndrome-related coronavirus
  REGION 1..10: note = Table A: HLA-A*36:01H HLA-B*35:08H
  source 1..10: note = Severe acute respiratory syndrome coronavirus 2
HVDTDLTKPY

SEQ ID NO: 4788 - protein, 10 aa, Severe acute respiratory syndrome-related coronavirus
  REGION 1..10: note = Table A: HLA-A*36:01H HLA-A*34:02H
  source 1..10: note = Severe acute respiratory syndrome coronavirus 2
DTDLTKPYIK

SEQ ID NO: 4789 - protein, 10 aa, Severe acute respiratory syndrome-related coronavirus
  REGION 1..10: note = Table A: HLA-A*02:02H HLA-B*38:02H HLA-B*15:03H
  source 1..10: note = Severe acute respiratory syndrome coronavirus 2
LKYDFTEERL

SEQ ID NO: 4790 - protein, 10 aa, Severe acute respiratory syndrome-related coronavirus
  REGION 1..10: note = Table A: HLA-A*36:01H
  source 1..10: note = Severe acute respiratory syndrome coronavirus 2
KYDFTEERLK

SEQ ID NO: 4791 - protein, 10 aa, Severe acute respiratory syndrome-related coronavirus
  REGION 1..10: note = Table A: HLA-A*74:01H
  source 1..10: note = Severe acute respiratory syndrome coronavirus 2
RLKLFDRYFK

SEQ ID NO: 4792 - protein, 10 aa, Severe acute respiratory syndrome-related coronavirus
  REGION 1..10: note = Table A: HLA-A*32:01H
  source 1..10: note = Severe acute respiratory syndrome coronavirus 2
KLFDRYFKYW

SEQ ID NO: 4793 - protein, 10 aa, Severe acute respiratory syndrome-related coronavirus
  REGION 1..10: note = Table A: HLA-C*14:02H HLA-C*14:03M HLA-A*30:02M HLA-A*24:07H HLA-A*23:01H
  source 1..10: note = Severe acute respiratory syndrome coronavirus 2
RYFKYWDQTY

SEQ ID NO: 4794 - protein, 10 aa, Severe acute respiratory syndrome-related coronavirus
  REGION 1..10: note = Table A: HLA-C*16:01H HLA-B*46:01H HLA-C*03:03H HLA-C*03:02H HLA-C*03:04H HLA-B*57:03H
  source 1..10: note = Severe acute respiratory syndrome coronavirus 2
FSTVFPPTSF

SEQ ID NO: 4795 - protein, 10 aa, Severe acute respiratory syndrome-related coronavirus
  REGION 1..10: note = Table A: HLA-A*34:01H HLA-A*34:02H HLA-A*66:01M
  source 1..10: note = Severe acute respiratory syndrome coronavirus 2
STVFPPTSFG

SEQ ID NO: 4796 - protein, 10 aa, Severe acute respiratory syndrome-related coronavirus
  REGION 1..10: note = Table A: HLA-C*14:02M HLA-C*14:03M HLA-C*01:02H
  source 1..10: note = Severe acute respiratory syndrome coronavirus 2
VFPPTSFGPL

SEQ ID NO: 4797 - protein, 10 aa, Severe acute respiratory syndrome-related coronavirus
  REGION 1..10: note = Table A: HLA-A*11:01H HLA-A*34:02H
  source 1..10: note = Severe acute respiratory syndrome coronavirus 2
PTSFGPLVRK

SEQ ID NO: 4798 - protein, 10 aa, Severe acute respiratory syndrome-related coronavirus
  REGION 1..10: note = Table A: HLA-B*15:03M
  source 1..10: note = Severe acute respiratory syndrome coronavirus 2
RKIFVDGVPF

SEQ ID NO: 4799 - protein, 10 aa, Severe acute respiratory syndrome-related coronavirus
  REGION 1..10: note = Table A: HLA-A*02:11M HLA-A*02:04H HLA-A*02:05M HLA-A*02:06M HLA-A*02:08H HLA-A*02:01M HLA-A*02:02M HLA-A*02:03H
  source 1..10: note = Severe acute respiratory syndrome coronavirus 2
KIFVDGVPFV

SEQ ID NO: 4800 - protein, 10 aa, Severe acute respiratory syndrome-related coronavirus
  REGION 1..10: note = Table A: HLA-A*02:07H
  source 1..10: note = Severe acute respiratory syndrome coronavirus 2
FVDGVPFVVS

SEQ ID NO: 4801 - protein, 10 aa, Severe acute respiratory syndrome-related coronavirus
  REGION 1..10: note = Table A: HLA-A*26:01H HLA-A*29:01H HLA-A*29:02H HLA-A*30:02H HLA-B*15:01H
  source 1..10: note = Severe acute respiratory syndrome coronavirus 2
GVPFVVSTGY

SEQ ID NO: 4802 - protein, 10 aa, Severe acute respiratory syndrome-related coronavirus
  REGION 1..10: note = Table A: HLA-A*24:07H HLA-A*23:01H
  source 1..10: note = Severe acute respiratory syndrome coronavirus 2
PFVVSTGYHF

SEQ ID NO: 4803 - protein, 10 aa, Severe acute respiratory syndrome-related coronavirus
  REGION 1..10: note = Table A: HLA-A*26:03H HLA-A*68:01H HLA-A*34:01M HLA-A*34:02H HLA-A*66:01M
  source 1..10: note = Severe acute respiratory syndrome coronavirus 2
FVVSTGYHFR

SEQ ID NO: 4804 - protein, 10 aa, Severe acute respiratory syndrome-related coronavirus
  REGION 1..10: note = Table A: HLA-A*02:03H
  source 1..10: note = Severe acute respiratory syndrome coronavirus 2
TGYHFRELGV

SEQ ID NO: 4805 - protein, 10 aa, Severe acute respiratory syndrome-related coronavirus
  REGION 1..10: note = Table A: HLA-A*02:08H
  source 1..10: note = Severe acute respiratory syndrome coronavirus 2
GVVHNQDVNL

SEQ ID NO: 4806 - protein, 10 aa, Severe acute respiratory syndrome-related coronavirus
  REGION 1..10: note = Table A: HLA-A*36:01M
  source 1..10: note = Severe acute respiratory syndrome coronavirus 2
RLSFKELLVY

SEQ ID NO: 4807 - protein, 10 aa, Severe acute respiratory syndrome-related coronavirus
  REGION 1..10: note = Table A: HLA-A*02:05H HLA-A*02:02H
  source 1..10: note = Severe acute respiratory syndrome coronavirus 2
LSFKELLVYA

SEQ ID NO: 4808 - protein, 10 aa, Severe acute respiratory syndrome-related coronavirus
  REGION 1..10: note = Table A: HLA-A*03:01H HLA-A*03:02H HLA-A*34:02H
  source 1..10: note = Severe acute respiratory syndrome coronavirus 2
LVYAADPAMH

SEQ ID NO: 4809 - protein, 10 aa, Severe acute respiratory syndrome-related coronavirus
  REGION 1..10: note = Table A: HLA-C*14:03H
  source 1..10: note = Severe acute respiratory syndrome coronavirus 2
VYAADPAMHA

SEQ ID NO: 4810 - protein, 10 aa, Severe acute respiratory syndrome-related coronavirus
  REGION 1..10: note = Table A: HLA-A*11:303M HLA-C*16:01H HLA-C*16:04M HLA-B*46:01M HLA-B*56:01M HLA-A*26:03H HLA-C*03:03H HLA-C*12:05H HLA-A*02:11M HLA-B*55:02M HLA-C*03:02M HLA-C*03:04M HLA-A*68:01H HLA-A*68:02M HLA-B*35:03H
  REGION 1..10: note = CONT. FROM ABOVE: HLA-B*55:01H HLA-C*12:02H HLA-C*12:03H HLA- A*02:05H HLA-A*02:06M HLA-A*02:08M HLA-A*02:01H HLA-A*02:02M HLA-A*02:03M HLA-A*34:01H HLA-B*35:01H HLA-B*35:02H HLA-B*35 :07H HLA-C*08:01M HLA-B*38:02M HLA-B*39:06H HLA-B*54:01H
  REGION 1..10: note = CONT. FROM ABOVE: HLA-B*39:01H HLA-A*66:01H HLA-B*50:01H
  source 1..10: note = Severe acute respiratory syndrome coronavirus 2
YAADPAMHAA

SEQ ID NO: 4811 - protein, 10 aa, Severe acute respiratory syndrome-related coronavirus
  REGION 1..10: note = Table A: HLA-A*02:02H HLA-B*38:02H
  source 1..10: note = Severe acute respiratory syndrome coronavirus 2
AMHAASGNLL

SEQ ID NO: 4812 - protein, 10 aa, Severe acute respiratory syndrome-related coronavirus
  REGION 1..10: note = Table A: HLA-B*38:01H HLA-B*38:02M HLA-B*15:10M
  source 1..10: note = Severe acute respiratory syndrome coronavirus 2
MHAASGNLLL

SEQ ID NO: 4813 - protein, 10 aa, Severe acute respiratory syndrome-related coronavirus
  REGION 1..10: note = Table A: HLA-A*11:01H HLA-A*36:01H HLA-B*27:02H HLA-A*34:02H
  source 1..10: note = Severe acute respiratory syndrome coronavirus 2
AASGNLLLDK

SEQ ID NO: 4814 - protein, 10 aa, Severe acute respiratory syndrome-related coronavirus
  REGION 1..10: note = Table A: HLA-A*02:08H
  source 1..10: note = Severe acute respiratory syndrome coronavirus 2
RTTCFSVAAL

SEQ ID NO: 4815 - protein, 10 aa, Severe acute respiratory syndrome-related coronavirus
  REGION 1..10: note = Table A: HLA-A*68:02H
  source 1..10: note = Severe acute respiratory syndrome coronavirus 2
FSVAALTNNV

SEQ ID NO: 4816 - protein, 10 aa, Severe acute respiratory syndrome-related coronavirus
  REGION 1..10: note = Table A: HLA-B*55:02H HLA-A*02:08H
  source 1..10: note = Severe acute respiratory syndrome coronavirus 2
SVAALTNNVA

SEQ ID NO: 4817 - protein, 10 aa, Severe acute respiratory syndrome-related coronavirus
  REGION 1..10: note = Table A: HLA-B*46:01H HLA-C*15:05H HLA-B*35:01H HLA-B*15:01H HLA-B*07:05H HLA-B*57:03H
  source 1..10: note = Severe acute respiratory syndrome coronavirus 2
VAALTNNVAF

SEQ ID NO: 4818 - protein, 10 aa, Severe acute respiratory syndrome-related coronavirus
  REGION 1..10: note = Table A: HLA-A*68:02M HLA-C*08:03H
  source 1..10: note = Severe acute respiratory syndrome coronavirus 2
LTNNVAFQTV

SEQ ID NO: 4819 - protein, 10 aa, Severe acute respiratory syndrome-related coronavirus
  REGION 1..10: note = Table A: HLA-C*14:02H HLA-C*14:03H HLA-A*24:07H HLA-A*23:01H
  source 1..10: note = Severe acute respiratory syndrome coronavirus 2
AFQTVKPGNF

SEQ ID NO: 4820 - protein, 10 aa, Severe acute respiratory syndrome-related coronavirus
  REGION 1..10: note = Table A: HLA-A*11:303H HLA-A*03:02M HLA-A*11:01M HLA-A*11:02M HLA-A*68:01H HLA-A*34:02M HLA-C*07:27M
  source 1..10: note = Severe acute respiratory syndrome coronavirus 2
QTVKPGNFNK

SEQ ID NO: 4821 - protein, 10 aa, Severe acute respiratory syndrome-related coronavirus
  REGION 1..10: note = Table A: HLA-A*36:01M HLA-A*30:02M HLA-B*35:01H
  source 1..10: note = Severe acute respiratory syndrome coronavirus 2
KPGNFNKDFY

SEQ ID NO: 4822 - protein, 10 aa, Severe acute respiratory syndrome-related coronavirus
  REGION 1..10: note = Table A: HLA-A*36:01H
  source 1..10: note = Severe acute respiratory syndrome coronavirus 2
KDFYDFAVSK

SEQ ID NO: 4823 - protein, 10 aa, Severe acute respiratory syndrome-related coronavirus
  REGION 1..10: note = Table A: HLA-C*04:01H HLA-C*04:03M
  source 1..10: note = Severe acute respiratory syndrome coronavirus 2
FYDFAVSKGF

SEQ ID NO: 4824 - protein, 10 aa, Severe acute respiratory syndrome-related coronavirus
  REGION 1..10: note = Table A: HLA-A*34:02H
  source 1..10: note = Severe acute respiratory syndrome coronavirus 2
DFAVSKGFFK

SEQ ID NO: 4825 - protein, 10 aa, Severe acute respiratory syndrome-related coronavirus
  REGION 1..10: note = Table A: HLA-C*08:03H
  source 1..10: note = Severe acute respiratory syndrome coronavirus 2
KGFFKEGSSV

SEQ ID NO: 4826 - protein, 10 aa, Severe acute respiratory syndrome-related coronavirus
  REGION 1..10: note = Table A: HLA-C*14:02M HLA-C*14:03H HLA-B*08:01H HLA-A*02:02H HLA-A*24:07H HLA-B*38:02H
  source 1..10: note = Severe acute respiratory syndrome coronavirus 2
FFKEGSSVEL

SEQ ID NO: 4827 - protein, 10 aa, Severe acute respiratory syndrome-related coronavirus
  REGION 1..10: note = Table A: HLA-B*57:03H
  source 1..10: note = Severe acute respiratory syndrome coronavirus 2
GSSVELKHFF

SEQ ID NO: 4828 - protein, 10 aa, Severe acute respiratory syndrome-related coronavirus
  REGION 1..10: note = Table A: HLA-B*57:03M
  source 1..10: note = Severe acute respiratory syndrome coronavirus 2
SSVELKHFFF

SEQ ID NO: 4829 - protein, 10 aa, Severe acute respiratory syndrome-related coronavirus
  REGION 1..10: note = Table A: HLA-C*14:02H HLA-C*14:03H
  source 1..10: note = Severe acute respiratory syndrome coronavirus 2
FFFAQDGNAA

SEQ ID NO: 4830 - protein, 10 aa, Severe acute respiratory syndrome-related coronavirus
  REGION 1..10: note = Table A: HLA-B*35:01H HLA-B*35:08M HLA-B*35:07H
  source 1..10: note = Severe acute respiratory syndrome coronavirus 2
NAAISDYDYY

SEQ ID NO: 4831 - protein, 10 aa, Severe acute respiratory syndrome-related coronavirus
  REGION 1..10: note = Table A: HLA-A*36:01H HLA-A*30:02H
  source 1..10: note = Severe acute respiratory syndrome coronavirus 2
AISDYDYYRY

SEQ ID NO: 4832 - protein, 10 aa, Severe acute respiratory syndrome-related coronavirus
  REGION 1..10: note = Table A: HLA-A*24:07H
  source 1..10: note = Severe acute respiratory syndrome coronavirus 2
TMCDIRQLLF

SEQ ID NO: 4833 - protein, 10 aa, Severe acute respiratory syndrome-related coronavirus
  REGION 1..10: note = Table A: HLA-A*29:02H
  source 1..10: note = Severe acute respiratory syndrome coronavirus 2
LFVVEVVDKY

SEQ ID NO: 4834 - protein, 10 aa, Severe acute respiratory syndrome-related coronavirus
  REGION 1..10: note = Table A: HLA-A*25:01H HLA-A*26:01H HLA-A*26:02M HLA-A*26:03H HLA-B*35:01H
  source 1..10: note = Severe acute respiratory syndrome coronavirus 2
EVVDKYFDCY

SEQ ID NO: 4835 - protein, 10 aa, Severe acute respiratory syndrome-related coronavirus
  REGION 1..10: note = Table A: HLA-B*27:02H
  source 1..10: note = Severe acute respiratory syndrome coronavirus 2
NQVIVNNLDK

SEQ ID NO: 4836 - protein, 10 aa, Severe acute respiratory syndrome-related coronavirus
  REGION 1..10: note = Table A: HLA-A*02:05M HLA-A*02:08M HLA-B*38:02H
  source 1..10: note = Severe acute respiratory syndrome coronavirus 2
QVIVNNLDKS

SEQ ID NO: 4837 - protein, 10 aa, Severe acute respiratory syndrome-related coronavirus
  REGION 1..10: note = Table A: HLA-B*38:02H
  source 1..10: note = Severe acute respiratory syndrome coronavirus 2
NLDKSAGFPF

SEQ ID NO: 4838 - protein, 10 aa, Severe acute respiratory syndrome-related coronavirus
  REGION 1..10: note = Table A: HLA-B*58:01H HLA-B*58:02H HLA-A*36:01H HLA-B*57:01H HLA-B*44:03H HLA-A*30:02H HLA-A*32:01M HLA-B*57:03H HLA-B*13:01H
  source 1..10: note = Severe acute respiratory syndrome coronavirus 2
KSAGFPFNKW

SEQ ID NO: 4839 - protein, 10 aa, Severe acute respiratory syndrome-related coronavirus
  REGION 1..10: note = Table A: HLA-A*74:01H HLA-A*11:01H HLA-A*11:02M HLA-A*36:01M HLA-B*27:05H HLA-A*30:01M HLA-A*30:02H HLA-A*31:01H
  source 1..10: note = Severe acute respiratory syndrome coronavirus 2
AGFPFNKWGK

SEQ ID NO: 4840 - protein, 10 aa, Severe acute respiratory syndrome-related coronavirus
  REGION 1..10: note = Table A: HLA-A*34:01H HLA-A*66:01H
  source 1..10: note = Severe acute respiratory syndrome coronavirus 2
FPFNKWGKAR

SEQ ID NO: 4841 - protein, 10 aa, Severe acute respiratory syndrome-related coronavirus
  REGION 1..10: note = Table A: HLA-B*27:05H HLA-B*27:02H
  source 1..10: note = Severe acute respiratory syndrome coronavirus 2
ARLYYDSMSY

SEQ ID NO: 4842 - protein, 10 aa, Severe acute respiratory syndrome-related coronavirus
  REGION 1..10: note = Table A: HLA-B*58:01H HLA-A*68:02H HLA-B*38:02H HLA-B*57:03H
  source 1..10: note = Severe acute respiratory syndrome coronavirus 2
MSYEDQDALF

SEQ ID NO: 4843 - protein, 10 aa, Severe acute respiratory syndrome-related coronavirus
  REGION 1..10: note = Table A: HLA-A*36:01H HLA-B*27:02H
  source 1..10: note = Severe acute respiratory syndrome coronavirus 2
YEDQDALFAY

SEQ ID NO: 4844 - protein, 10 aa, Severe acute respiratory syndrome-related coronavirus
  REGION 1..10: note = Table A: HLA-A*02:11H HLA-A*02:02H HLA-A*02:03H
  source 1..10: note = Severe acute respiratory syndrome coronavirus 2
ALFAYTKRNV

SEQ ID NO: 4845 - protein, 10 aa, Severe acute respiratory syndrome-related coronavirus
  REGION 1..10: note = Table A: HLA-B*58:02H HLA-B*57:03M
  source 1..10: note = Severe acute respiratory syndrome coronavirus 2
YTKRNVIPTI

SEQ ID NO: 4846 - protein, 10 aa, Severe acute respiratory syndrome-related coronavirus
  REGION 1..10: note = Table A: HLA-C*01:02H
  source 1..10: note = Severe acute respiratory syndrome coronavirus 2
VIPTITQMNL

SEQ ID NO: 4847 - protein, 10 aa, Severe acute respiratory syndrome-related coronavirus
  REGION 1..10: note = Table A: HLA-A*36:01H HLA-A*26:01H HLA-A*29:02H HLA-A*01:01M
  source 1..10: note = Severe acute respiratory syndrome coronavirus 2
PTITQMNLKY

SEQ ID NO: 4848 - protein, 10 aa, Severe acute respiratory syndrome-related coronavirus
  REGION 1..10: note = Table A: HLA-A*34:02H
  source 1..10: note = Severe acute respiratory syndrome coronavirus 2
MNLKYAISAK

SEQ ID NO: 4849 - protein, 10 aa, Severe acute respiratory syndrome-related coronavirus
  REGION 1..10: note = Table A: HLA-A*33:03H HLA-A*26:03M HLA-A*34:01M HLA-A*34:02H HLA-A*66:01M
  source 1..10: note = Severe acute respiratory syndrome coronavirus 2
YAISAKNRAR

SEQ ID NO: 4850 - protein, 10 aa, Severe acute respiratory syndrome-related coronavirus
  REGION 1..10: note = Table A: HLA-B*58:02H HLA-C*15:05H HLA-B*07:04H HLA-B*57:03M
  source 1..10: note = Severe acute respiratory syndrome coronavirus 2
RARTVAGVSI

SEQ ID NO: 4851 - protein, 10 aa, Severe acute respiratory syndrome-related coronavirus
  REGION 1..10: note = Table A: HLA-A*68:02H HLA-A*02:05H HLA-A*02:08H HLA-C*08:03H HLA-B*38:02H HLA-B*39:01H
  source 1..10: note = Severe acute respiratory syndrome coronavirus 2
TVAGVSICST

SEQ ID NO: 4852 - protein, 10 aa, Severe acute respiratory syndrome-related coronavirus
  REGION 1..10: note = Table A: HLA-B*08:01H HLA-B*39:06H
  source 1..10: note = Severe acute respiratory syndrome coronavirus 2
HQKLLKSIAA

SEQ ID NO: 4853 - protein, 10 aa, Severe acute respiratory syndrome-related coronavirus
  REGION 1..10: note = Table A: HLA-A*74:01H
  source 1..10: note = Severe acute respiratory syndrome coronavirus 2
KLLKSIAATR

SEQ ID NO: 4854 - protein, 10 aa, Severe acute respiratory syndrome-related coronavirus
  REGION 1..10: note = Table A: HLA-C*15:05H HLA-A*02:03H
  source 1..10: note = Severe acute respiratory syndrome coronavirus 2
SIAATRGATV

SEQ ID NO: 4855 - protein, 10 aa, Severe acute respiratory syndrome-related coronavirus
  REGION 1..10: note = Table A: HLA-A*03:01H HLA-A*03:02H HLA-A*11:01H HLA-A*36:01H HLA-B*27:02H
  source 1..10: note = Severe acute respiratory syndrome coronavirus 2
GATVVIGTSK

SEQ ID NO: 4856 - protein, 10 aa, Severe acute respiratory syndrome-related coronavirus
  REGION 1..10: note = Table A: HLA-B*58:01M HLA-B*44:05M HLA-B*57:01M HLA-A*25:01H HLA-A*26:01H HLA-A*26:02H HLA-A*26:03H HLA-B*27:02H HLA-A*30:02H HLA-A*68:01H HLA-C*15:05H HLA-A*34:01H HLA-A*34:02H HLA-B*15:01H HLA-B*57:03H HLA-A*66:01H
  source 1..10: note = Severe acute respiratory syndrome coronavirus 2
ATVVIGTSKF

SEQ ID NO: 4857 - protein, 10 aa, Severe acute respiratory syndrome-related coronavirus
  REGION 1..10: note = Table A: HLA-A*30:02H
  source 1..10: note = Severe acute respiratory syndrome coronavirus 2
TVVIGTSKFY

SEQ ID NO: 4858 - protein, 10 aa, Severe acute respiratory syndrome-related coronavirus
  REGION 1..10: note = Table A: HLA-C*14:02H HLA-C*14:03H HLA-A*02:02H HLA-A*24:07M HLA-A*23:01H
  source 1..10: note = Severe acute respiratory syndrome coronavirus 2
KFYGGWHNML

SEQ ID NO: 4859 - protein, 10 aa, Severe acute respiratory syndrome-related coronavirus
  REGION 1..10: note = Table A: HLA-A*30:02H
  source 1..10: note = Severe acute respiratory syndrome coronavirus 2
GWHNMLKTVY

SEQ ID NO: 4860 - protein, 10 aa, Severe acute respiratory syndrome-related coronavirus
  REGION 1..10: note = Table A: HLA-C*14:02H HLA-C*14:03H HLA-A*02:01H HLA-A*02:02M HLA-A*24:02H HLA-A*24:07H HLA-C*08:01H HLA-A*23:01H
  source 1..10: note = Severe acute respiratory syndrome coronavirus 2
VYSDVENPHL

SEQ ID NO: 4861 - protein, 10 aa, Severe acute respiratory syndrome-related coronavirus
  REGION 1..10: note = Table A: HLA-A*36:01H HLA-A*01:01M HLA-C*04:03M HLA-C*08:02H HLA-C*05:01H
  source 1..10: note = Severe acute respiratory syndrome coronavirus 2
YSDVENPHLM

SEQ ID NO: 4862 - protein, 10 aa, Severe acute respiratory syndrome-related coronavirus
  REGION 1..10: note = Table A: HLA-A*25:01M
  source 1..10: note = Severe acute respiratory syndrome coronavirus 2
DVENPHLMGW

SEQ ID NO: 4863 - protein, 10 aa, Severe acute respiratory syndrome-related coronavirus
  REGION 1..10: note = Table A: HLA-B*58:02H HLA-C*03:02H HLA-B*07:04M HLA-B*57:03H
  source 1..10: note = Severe acute respiratory syndrome coronavirus 2
RAMPNMLRIM

SEQ ID NO: 4864 - protein, 10 aa, Severe acute respiratory syndrome-related coronavirus
  REGION 1..10: note = Table A: HLA-B*54:01H
  source 1..10: note = Severe acute respiratory syndrome coronavirus 2
MPNMLRIMAS

SEQ ID NO: 4865 - protein, 10 aa, Severe acute respiratory syndrome-related coronavirus
  REGION 1..10: note = Table A: HLA-A*74:01M
  source 1..10: note = Severe acute respiratory syndrome coronavirus 2
RIMASLVLAR

SEQ ID NO: 4866 - protein, 10 aa, Severe acute respiratory syndrome-related coronavirus
  REGION 1..10: note = Table A: HLA-A*02:02H HLA-B*13:01H
  source 1..10: note = Severe acute respiratory syndrome coronavirus 2
RLANECAQVL

SEQ ID NO: 4867 - protein, 10 aa, Severe acute respiratory syndrome-related coronavirus
  REGION 1..10: note = Table A: HLA-A*68:02H
  source 1..10: note = Severe acute respiratory syndrome coronavirus 2
ECAQVLSEMV

SEQ ID NO: 4868 - protein, 10 aa, Severe acute respiratory syndrome-related coronavirus
  REGION 1..10: note = Table A: HLA-A*02:06H HLA-A*02:01H
  source 1..10: note = Severe acute respiratory syndrome coronavirus 2
QVLSEMVMCG

SEQ ID NO: 4869 - protein, 10 aa, Severe acute respiratory syndrome-related coronavirus
  REGION 1..10: note = Table A: HLA-B*44:05H
  source 1..10: note = Severe acute respiratory syndrome coronavirus 2
SEMVMCGGSL

SEQ ID NO: 4870 - protein, 10 aa, Severe acute respiratory syndrome-related coronavirus
  REGION 1..10: note = Table A: HLA-A*68:02H
  source 1..10: note = Severe acute respiratory syndrome coronavirus 2
MVMCGGSLYV

SEQ ID NO: 4871 - protein, 10 aa, Severe acute respiratory syndrome-related coronavirus
  REGION 1..10: note = Table A: HLA-C*08:03H
  source 1..10: note = Severe acute respiratory syndrome coronavirus 2
GSLYVKPGGT

SEQ ID NO: 4872 - protein, 10 aa, Severe acute respiratory syndrome-related coronavirus
  REGION 1..10: note = Table A: HLA-A*03:01H
  source 1..10: note = Severe acute respiratory syndrome coronavirus 2
SLYVKPGGTS

SEQ ID NO: 4873 - protein, 10 aa, Severe acute respiratory syndrome-related coronavirus
  REGION 1..10: note = Table A: HLA-A*33:03H HLA-B*46:01H HLA-A*26:03M HLA-B*55:01H HLA-A*34:01H HLA-B*38:02H HLA-A*66:01M
  source 1..10: note = Severe acute respiratory syndrome coronavirus 2
YVKPGGTSSG

SEQ ID NO: 4874 - protein, 10 aa, Severe acute respiratory syndrome-related coronavirus
  REGION 1..10: note = Table A: HLA-A*36:01H HLA-B*35:01H HLA-B*35:08H HLA-B*38:02H HLA-B*15:01H HLA-B*39:01H
  source 1..10: note = Severe acute respiratory syndrome coronavirus 2
TSSGDATTAY

SEQ ID NO: 4875 - protein, 10 aa, Severe acute respiratory syndrome-related coronavirus
  REGION 1..10: note = Table A: HLA-B*57:03H
  source 1..10: note = Severe acute respiratory syndrome coronavirus 2
ATTAYANSVF

SEQ ID NO: 4876 - protein, 10 aa, Severe acute respiratory syndrome-related coronavirus
  REGION 1..10: note = Table A: HLA-B*38:02H
  source 1..10: note = Severe acute respiratory syndrome coronavirus 2
QAVTANVNAL

SEQ ID NO: 4877 - protein, 10 aa, Severe acute respiratory syndrome-related coronavirus
  REGION 1..10: note = Table A: HLA-A*02:08H
  source 1..10: note = Severe acute respiratory syndrome coronavirus 2
AVTANVNALL

SEQ ID NO: 4878 - protein, 10 aa, Severe acute respiratory syndrome-related coronavirus
  REGION 1..10: note = Table A: HLA-B*38:02H HLA-B*13:01H HLA-B*13:02H
  source 1..10: note = Severe acute respiratory syndrome coronavirus 2
ALLSTDGNKI

SEQ ID NO: 4879 - protein, 10 aa, Severe acute respiratory syndrome-related coronavirus
  REGION 1..10: note = Table A: HLA-A*03:02H HLA-A*11:01H HLA-A*36:01H HLA-A*34:02H
  source 1..10: note = Severe acute respiratory syndrome coronavirus 2
STDGNKIADK

SEQ ID NO: 4880 - protein, 10 aa, Severe acute respiratory syndrome-related coronavirus
  REGION 1..10: note = Table A: HLA-A*02:08H HLA-A*02:02M HLA-B*07:04H
  source 1..10: note = Severe acute respiratory syndrome coronavirus 2
KIADKYVRNL

SEQ ID NO: 4881 - protein, 10 aa, Severe acute respiratory syndrome-related coronavirus
  REGION 1..10: note = Table A: HLA-A*74:01M
  source 1..10: note = Severe acute respiratory syndrome coronavirus 2
RLYECLYRNR

SEQ ID NO: 4882 - protein, 10 aa, Severe acute respiratory syndrome-related coronavirus
  REGION 1..10: note = Table A: HLA-A*36:01H HLA-A*29:02H HLA-B*27:02H
  source 1..10: note = Severe acute respiratory syndrome coronavirus 2
VDTDFVNEFY

SEQ ID NO: 4883 - protein, 10 aa, Severe acute respiratory syndrome-related coronavirus
  REGION 1..10: note = Table A: HLA-A*68:02H
  source 1..10: note = Severe acute respiratory syndrome coronavirus 2
DTDFVNEFYA

SEQ ID NO: 4884 - protein, 10 aa, Severe acute respiratory syndrome-related coronavirus
  REGION 1..10: note = Table A: HLA-A*74:01H HLA-A*34:01H HLA-A*66:01H
  source 1..10: note = Severe acute respiratory syndrome coronavirus 2
FVNEFYAYLR

SEQ ID NO: 4885 - protein, 10 aa, Severe acute respiratory syndrome-related coronavirus
  REGION 1..10: note = Table A: HLA-B*08:01H
  source 1..10: note = Severe acute respiratory syndrome coronavirus 2
YAYLRKHFSM

SEQ ID NO: 4886 - protein, 10 aa, Severe acute respiratory syndrome-related coronavirus
  REGION 1..10: note = Table A: HLA-A*02:04H HLA-A*02:01H HLA-A*02:02M HLA-B*38:02M HLA-B*15:01H HLA-B*15:02H HLA-B*13:01H
  source 1..10: note = Severe acute respiratory syndrome coronavirus 2
ILSDDAVVCF

SEQ ID NO: 4887 - protein, 10 aa, Severe acute respiratory syndrome-related coronavirus
  REGION 1..10: note = Table A: HLA-A*26:01H HLA-B*35:01M HLA-B*15:02H
  source 1..10: note = Severe acute respiratory syndrome coronavirus 2
DAVVCFNSTY

SEQ ID NO: 4888 - protein, 10 aa, Severe acute respiratory syndrome-related coronavirus
  REGION 1..10: note = Table A: HLA-A*03:01H HLA-A*11:01H HLA-B*55:02H HLA-C*15:05H HLA-A*34:02H HLA-B*54:01H
  source 1..10: note = Severe acute respiratory syndrome coronavirus 2
STYASQGLVA

SEQ ID NO: 4889 - protein, 10 aa, Severe acute respiratory syndrome-related coronavirus
  REGION 1..10: note = Table A: HLA-C*12:05H HLA-A*68:02M HLA-C*15:05H HLA-B*51:01H HLA-B*38:02H
  source 1..10: note = Severe acute respiratory syndrome coronavirus 2
YASQGLVASI

SEQ ID NO: 4890 - protein, 10 aa, Severe acute respiratory syndrome-related coronavirus
  REGION 1..10: note = Table A: HLA-A*11:303H HLA-A*03:02M HLA-A*11:01M HLA-A*11:02M HLA-C*07:27H
  source 1..10: note = Severe acute respiratory syndrome coronavirus 2
ASQGLVASIK

SEQ ID NO: 4891 - protein, 10 aa, Severe acute respiratory syndrome-related coronavirus
  REGION 1..10: note = Table A: HLA-B*46:01H HLA-A*30:02H HLA-B*15:01H HLA-C*02:02H
  source 1..10: note = Severe acute respiratory syndrome coronavirus 2
SIKNFKSVLY

SEQ ID NO: 4892 - protein, 10 aa, Severe acute respiratory syndrome-related coronavirus
  REGION 1..10: note = Table A: HLA-B*15:03H
  source 1..10: note = Severe acute respiratory syndrome coronavirus 2
IKNFKSVLYY

SEQ ID NO: 4893 - protein, 10 aa, Severe acute respiratory syndrome-related coronavirus
  REGION 1..10: note = Table A: HLA-B*38:02H HLA-B*39:06H
  source 1..10: note = Severe acute respiratory syndrome coronavirus 2
YQNNVFMSEA

SEQ ID NO: 4894 - protein, 10 aa, Severe acute respiratory syndrome-related coronavirus
  REGION 1..10: note = Table A: HLA-B*37:01H
  source 1..10: note = Severe acute respiratory syndrome coronavirus 2
TDLTKGPHEF

SEQ ID NO: 4895 - protein, 10 aa, Severe acute respiratory syndrome-related coronavirus
  REGION 1..10: note = Table A: HLA-A*30:02H HLA-B*38:02H HLA-B*15:01H HLA-B*15:02H
  source 1..10: note = Severe acute respiratory syndrome coronavirus 2
LVKQGDDYVY

SEQ ID NO: 4896 - protein, 10 aa, Severe acute respiratory syndrome-related coronavirus
  REGION 1..10: note = Table A: HLA-A*30:02H HLA-A*23:01H
  source 1..10: note = Severe acute respiratory syndrome coronavirus 2
VYLPYPDPSR

SEQ ID NO: 4897 - protein, 10 aa, Severe acute respiratory syndrome-related coronavirus
  REGION 1..10: note = Table A: HLA-C*04:03H HLA-A*02:11H HLA-A*02:07H
  source 1..10: note = Severe acute respiratory syndrome coronavirus 2
YLPYPDPSRI

SEQ ID NO: 4898 - protein, 10 aa, Severe acute respiratory syndrome-related coronavirus
  REGION 1..10: note = Table A: HLA-B*42:01M HLA-B*56:01H HLA-B*53:01H HLA-B*55:02H HLA-B*35:03M HLA-C*15:05M HLA-B*55:01H HLA-B*35:01H HLA-B*35:02H HLA-B*51:01M HLA-B*35:07M HLA-B*35:12H HLA-B*54:01H HLA-B*07:02M HLA-B*07:04H HLA-B*07:05H
  REGION 1..10: note = CONT. FROM ABOVE: HLA-B*15:10H HLA-B*15:11H
  source 1..10: note = Severe acute respiratory syndrome coronavirus 2
LPYPDPSRIL

SEQ ID NO: 4899 - protein, 10 aa, Severe acute respiratory syndrome-related coronavirus
  REGION 1..10: note = Table A: HLA-A*24:07H
  source 1..10: note = Severe acute respiratory syndrome coronavirus 2
PYPDPSRILG

SEQ ID NO: 4900 - protein, 10 aa, Severe acute respiratory syndrome-related coronavirus
  REGION 1..10: note = Table A: HLA-B*56:01M HLA-B*55:02M HLA-C*15:05H HLA-B*55:01H HLA-B*54:01M
  source 1..10: note = Severe acute respiratory syndrome coronavirus 2
YPDPSRILGA

SEQ ID NO: 4901 - protein, 10 aa, Severe acute respiratory syndrome-related coronavirus
  REGION 1..10: note = Table A: HLA-C*04:03H HLA-A*02:07M
  source 1..10: note = Severe acute respiratory syndrome coronavirus 2
FVDDIVKTDG

SEQ ID NO: 4902 - protein, 10 aa, Severe acute respiratory syndrome-related coronavirus
  REGION 1..10: note = Table A: HLA-A*74:01H HLA-A*11:01H HLA-A*36:01H
  source 1..10: note = Severe acute respiratory syndrome coronavirus 2
KTDGTLMIER

SEQ ID NO: 4903 - protein, 10 aa, Severe acute respiratory syndrome-related coronavirus
  REGION 1..10: note = Table A: HLA-B*08:01M HLA-A*02:11H HLA-A*02:04M HLA-A*02:06H HLA-A*02:02H
  source 1..10: note = Severe acute respiratory syndrome coronavirus 2
TLMIERFVSL

SEQ ID NO: 4904 - protein, 10 aa, Severe acute respiratory syndrome-related coronavirus
  REGION 1..10: note = Table A: HLA-A*30:02H
  source 1..10: note = Severe acute respiratory syndrome coronavirus 2
RFVSLAIDAY

SEQ ID NO: 4905 - protein, 10 aa, Severe acute respiratory syndrome-related coronavirus
  REGION 1..10: note = Table A: HLA-A*11:01H HLA-A*11:02H HLA-A*36:01H HLA-B*27:02H HLA-A*68:01H HLA-A*34:02M HLA-A*66:01H
  source 1..10: note = Severe acute respiratory syndrome coronavirus 2
LAIDAYPLTK

SEQ ID NO: 4906 - protein, 10 aa, Severe acute respiratory syndrome-related coronavirus
  REGION 1..10: note = Table A: HLA-A*33:01H HLA-A*34:01H HLA-A*66:01H
  source 1..10: note = Severe acute respiratory syndrome coronavirus 2
DAYPLTKHPN

SEQ ID NO: 4907 - protein, 10 aa, Severe acute respiratory syndrome-related coronavirus
  REGION 1..10: note = Table A: HLA-B*53:01M HLA-B*35:03M HLA-B*35:01H HLA-B*35:02M HLA-B*35:08H HLA-B*35:07H HLA-B*35:12M HLA-B*38:02H
  source 1..10: note = Severe acute respiratory syndrome coronavirus 2
HPNQEYADVF

SEQ ID NO: 4908 - protein, 10 aa, Severe acute respiratory syndrome-related coronavirus
  REGION 1..10: note = Table A: HLA-B*44:02H HLA-B*44:03M
  source 1..10: note = Severe acute respiratory syndrome coronavirus 2
QEYADVFHLY

SEQ ID NO: 4909 - protein, 10 aa, Severe acute respiratory syndrome-related coronavirus
  REGION 1..10: note = Table A: HLA-A*24:02H HLA-A*24:07M HLA-A*23:01H
  source 1..10: note = Severe acute respiratory syndrome coronavirus 2
EYADVFHLYL

SEQ ID NO: 4910 - protein, 10 aa, Severe acute respiratory syndrome-related coronavirus
  REGION 1..10: note = Table A: HLA-A*68:02M
  source 1..10: note = Severe acute respiratory syndrome coronavirus 2
DVFHLYLQYI

SEQ ID NO: 4911 - protein, 10 aa, Severe acute respiratory syndrome-related coronavirus
  REGION 1..10: note = Table A: HLA-A*02:04H HLA-A*02:02H
  source 1..10: note = Severe acute respiratory syndrome coronavirus 2
HLYLQYIRKL

SEQ ID NO: 4912 - protein, 10 aa, Severe acute respiratory syndrome-related coronavirus
  REGION 1..10: note = Table A: HLA-A*02:02M
  source 1..10: note = Severe acute respiratory syndrome coronavirus 2
KLHDELTGHM

SEQ ID NO: 4913 - protein, 10 aa, Severe acute respiratory syndrome-related coronavirus
  REGION 1..10: note = Table A: HLA-B*38:01H HLA-B*38:02H HLA-B*39:01M HLA-B*15:10M
  source 1..10: note = Severe acute respiratory syndrome coronavirus 2
LHDELTGHML

SEQ ID NO: 4914 - protein, 10 aa, Severe acute respiratory syndrome-related coronavirus
  REGION 1..10: note = Table A: HLA-A*02:11H HLA-A*02:04H
  source 1..10: note = Severe acute respiratory syndrome coronavirus 2
HMLDMYSVML

SEQ ID NO: 4915 - protein, 10 aa, Severe acute respiratory syndrome-related coronavirus
  REGION 1..10: note = Table A: HLA-B*58:01H HLA-B*58:02H HLA-B*57:01H HLA-A*25:01H HLA-B*57:03H
  source 1..10: note = Severe acute respiratory syndrome coronavirus 2
LTNDNTSRYW

SEQ ID NO: 4916 - protein, 10 aa, Severe acute respiratory syndrome-related coronavirus
  REGION 1..10: note = Table A: HLA-A*02:11H HLA-C*08:01H HLA-B*40:06H
  source 1..10: note = Severe acute respiratory syndrome coronavirus 2
RYWEPEFYEA

SEQ ID NO: 4917 - protein, 10 aa, Severe acute respiratory syndrome-related coronavirus
  REGION 1..10: note = Table A: HLA-B*45:01H HLA-B*40:02H HLA-B*41:02H HLA-B*49:01M HLA-B*50:01H
  source 1..10: note = Severe acute respiratory syndrome coronavirus 2
YEAMYTPHTV

SEQ ID NO: 4918 - protein, 10 aa, Severe acute respiratory syndrome-related coronavirus
  REGION 1..10: note = Table A: HLA-A*68:02M HLA-B*35:03H HLA-A*34:01M HLA-A*34:02H HLA-A*66:01H
  source 1..10: note = Severe acute respiratory syndrome coronavirus 2
EAMYTPHTVL

SEQ ID NO: 4919 - protein, 10 aa, Severe acute respiratory syndrome-related coronavirus
  REGION 1..10: note = Table A: HLA-A*02:11H HLA-A*68:02M HLA-A*02:05H HLA-A*02:06H HLA-A*02:07H HLA-A*02:02H
  source 1..10: note = Severe acute respiratory syndrome coronavirus 2
YTPHTVLQAV

SEQ ID NO: 4920 - protein, 10 aa, Severe acute respiratory syndrome-related coronavirus
  REGION 1..10: note = Table A: HLA-B*56:01H HLA-B*55:02M HLA-B*54:01H
  source 1..10: note = Severe acute respiratory syndrome coronavirus 2
TPHTVLQAVG

SEQ ID NO: 4921 - protein, 10 aa, Severe acute respiratory syndrome-related coronavirus
  REGION 1..10: note = Table A: HLA-B*38:01H HLA-B*38:02M HLA-B*39:01H HLA-B*15:10H
  source 1..10: note = Severe acute respiratory syndrome coronavirus 2
DHVISTSHKL

SEQ ID NO: 4922 - protein, 10 aa, Severe acute respiratory syndrome-related coronavirus
  REGION 1..10: note = Table A: HLA-A*68:02H
  source 1..10: note = Severe acute respiratory syndrome coronavirus 2
HVISTSHKLV

SEQ ID NO: 4923 - protein, 10 aa, Severe acute respiratory syndrome-related coronavirus
  REGION 1..10: note = Table A: HLA-B*07:04H
  source 1..10: note = Severe acute respiratory syndrome coronavirus 2
VISTSHKLVL

SEQ ID NO: 4924 - protein, 10 aa, Severe acute respiratory syndrome-related coronavirus
  REGION 1..10: note = Table A: HLA-A*68:02H
  source 1..10: note = Severe acute respiratory syndrome coronavirus 2
STSHKLVLSV

SEQ ID NO: 4925 - protein, 10 aa, Severe acute respiratory syndrome-related coronavirus
  REGION 1..10: note = Table A: HLA-B*15:03H
  source 1..10: note = Severe acute respiratory syndrome coronavirus 2
HKLVLSVNPY

SEQ ID NO: 4926 - protein, 10 aa, Severe acute respiratory syndrome-related coronavirus
  REGION 1..10: note = Table A: HLA-A*02:11H
  source 1..10: note = Severe acute respiratory syndrome coronavirus 2
KLVLSVNPYV

SEQ ID NO: 4927 - protein, 10 aa, Severe acute respiratory syndrome-related coronavirus
  REGION 1..10: note = Table A: HLA-C*04:03H HLA-C*08:02H
  source 1..10: note = Severe acute respiratory syndrome coronavirus 2
GCDVTDVTQL

SEQ ID NO: 4928 - protein, 10 aa, Severe acute respiratory syndrome-related coronavirus
  REGION 1..10: note = Table A: HLA-A*68:01H HLA-A*68:02M HLA-A*34:02H HLA-A*66:01H
  source 1..10: note = Severe acute respiratory syndrome coronavirus 2
DVTDVTQLYL

SEQ ID NO: 4929 - protein, 10 aa, Severe acute respiratory syndrome-related coronavirus
  REGION 1..10: note = Table A: HLA-A*36:01H HLA-C*04:03H
  source 1..10: note = Severe acute respiratory syndrome coronavirus 2
VTDVTQLYLG

SEQ ID NO: 4930 - protein, 10 aa, Severe acute respiratory syndrome-related coronavirus
  REGION 1..10: note = Table A: HLA-A*26:02H
  source 1..10: note = Severe acute respiratory syndrome coronavirus 2
DVTQLYLGGM

SEQ ID NO: 4931 - protein, 10 aa, Severe acute respiratory syndrome-related coronavirus
  REGION 1..10: note = Table A: HLA-B*27:02H HLA-A*30:02H HLA-B*38:02H HLA-B*15:01H HLA-B*15:02M HLA-B*15:03H
  source 1..10: note = Severe acute respiratory syndrome coronavirus 2
TQLYLGGMSY

SEQ ID NO: 4932 - protein, 10 aa, Severe acute respiratory syndrome-related coronavirus
  REGION 1..10: note = Table A: HLA-A*36:01H HLA-B*46:01H HLA-A*26:01H HLA-A*29:02H HLA-A*30:02H HLA-B*38:02M HLA-B*15:01H HLA-B*15:02M
  source 1..10: note = Severe acute respiratory syndrome coronavirus 2
QLYLGGMSYY

SEQ ID NO: 4933 - protein, 10 aa, Severe acute respiratory syndrome-related coronavirus
  REGION 1..10: note = Table A: HLA-B*38:02H HLA-B*15:10H
  source 1..10: note = Severe acute respiratory syndrome coronavirus 2
SHKPPISFPL

SEQ ID NO: 4934 - protein, 10 aa, Severe acute respiratory syndrome-related coronavirus
  REGION 1..10: note = Table A: HLA-B*56:01H HLA-B*55:02H
  source 1..10: note = Severe acute respiratory syndrome coronavirus 2
KPPISFPLCA

SEQ ID NO: 4935 - protein, 10 aa, Severe acute respiratory syndrome-related coronavirus
  REGION 1..10: note = Table A: HLA-C*15:05H HLA-B*35:01H HLA-B*35:07H HLA-B*15:02H HLA-B*07:05H
  source 1..10: note = Severe acute respiratory syndrome coronavirus 2
FPLCANGQVF

SEQ ID NO: 4936 - protein, 10 aa, Severe acute respiratory syndrome-related coronavirus
  REGION 1..10: note = Table A: HLA-A*30:02H
  source 1..10: note = Severe acute respiratory syndrome coronavirus 2
CANGQVFGLY

SEQ ID NO: 4937 - protein, 10 aa, Severe acute respiratory syndrome-related coronavirus
  REGION 1..10: note = Table A: HLA-A*11:01H
  source 1..10: note = Severe acute respiratory syndrome coronavirus 2
ANGQVFGLYK

SEQ ID NO: 4938 - protein, 10 aa, Severe acute respiratory syndrome-related coronavirus
  REGION 1..10: note = Table A: HLA-C*08:03H
  source 1..10: note = Severe acute respiratory syndrome coronavirus 2
NVTDFNAIAT

SEQ ID NO: 4939 - protein, 10 aa, Severe acute respiratory syndrome-related coronavirus
  REGION 1..10: note = Table A: HLA-A*02:02M
  source 1..10: note = Severe acute respiratory syndrome coronavirus 2
ILANTCTERL

SEQ ID NO: 4940 - protein, 10 aa, Severe acute respiratory syndrome-related coronavirus
  REGION 1..10: note = Table A: HLA-A*02:02H HLA-B*07:04H HLA-B*15:01H
  source 1..10: note = Severe acute respiratory syndrome coronavirus 2
RLKLFAAETL

SEQ ID NO: 4941 - protein, 10 aa, Severe acute respiratory syndrome-related coronavirus
  REGION 1..10: note = Table A: HLA-A*02:11H HLA-A*02:05H HLA-A*02:08H HLA-A*02:02M HLA-A*02:03H HLA-B*13:02H
  source 1..10: note = Severe acute respiratory syndrome coronavirus 2
KLFAAETLKA

SEQ ID NO: 4942 - protein, 10 aa, Severe acute respiratory syndrome-related coronavirus
  REGION 1..10: note = Table A: HLA-A*68:02H
  source 1..10: note = Severe acute respiratory syndrome coronavirus 2
FAAETLKATE

SEQ ID NO: 4943 - protein, 10 aa, Severe acute respiratory syndrome-related coronavirus
  REGION 1..10: note = Table A: HLA-B*57:01H HLA-A*25:01H HLA-A*26:03H HLA-B*38:02H HLA-B*57:03M
  source 1..10: note = Severe acute respiratory syndrome coronavirus 2
ETLKATEETF

SEQ ID NO: 4944 - protein, 10 aa, Severe acute respiratory syndrome-related coronavirus
  REGION 1..10: note = Table A: HLA-B*58:01H HLA-A*11:01M HLA-A*11:02H HLA-A*36:01H HLA-A*26:01H HLA-A*29:01H HLA-A*29:02M HLA-A*01:01H HLA-B*44:03H HLA-A*30:02M HLA-A*34:02H HLA-C*07:27H
  source 1..10: note = Severe acute respiratory syndrome coronavirus 2
ATEETFKLSY

SEQ ID NO: 4945 - protein, 10 aa, Severe acute respiratory syndrome-related coronavirus
  REGION 1..10: note = Table A: HLA-A*74:01H
  source 1..10: note = Severe acute respiratory syndrome coronavirus 2
KLSYGIATVR

SEQ ID NO: 4946 - protein, 10 aa, Severe acute respiratory syndrome-related coronavirus
  REGION 1..10: note = Table A: HLA-B*38:02H
  source 1..10: note = Severe acute respiratory syndrome coronavirus 2
YGIATVREVL

SEQ ID NO: 4947 - protein, 10 aa, Severe acute respiratory syndrome-related coronavirus
  REGION 1..10: note = Table A: HLA-A*68:02H HLA-A*34:02H
  source 1..10: note = Severe acute respiratory syndrome coronavirus 2
EVLSDRELHL

SEQ ID NO: 4948 - protein, 10 aa, Severe acute respiratory syndrome-related coronavirus
  REGION 1..10: note = Table A: HLA-A*02:02H
  source 1..10: note = Severe acute respiratory syndrome coronavirus 2
VLSDRELHLS

SEQ ID NO: 4949 - protein, 10 aa, Severe acute respiratory syndrome-related coronavirus
  REGION 1..10: note = Table A: HLA-B*58:01M HLA-A*36:01H HLA-B*57:01H HLA-B*57:03M
  source 1..10: note = Severe acute respiratory syndrome coronavirus 2
LSDRELHLSW

SEQ ID NO: 4950 - protein, 10 aa, Severe acute respiratory syndrome-related coronavirus
  REGION 1..10: note = Table A: HLA-A*74:01H HLA-A*34:01H HLA-A*66:01H
  source 1..10: note = Severe acute respiratory syndrome coronavirus 2
HLSWEVGKPR

SEQ ID NO: 4951 - protein, 10 aa, Severe acute respiratory syndrome-related coronavirus
  REGION 1..10: note = Table A: HLA-B*40:02H
  source 1..10: note = Severe acute respiratory syndrome coronavirus 2
WEVGKPRPPL

SEQ ID NO: 4952 - protein, 10 aa, Severe acute respiratory syndrome-related coronavirus
  REGION 1..10: note = Table A: HLA-A*74:01H HLA-A*33:03H HLA-A*31:01M
  source 1..10: note = Severe acute respiratory syndrome coronavirus 2
VGKPRPPLNR

SEQ ID NO: 4953 - protein, 10 aa, Severe acute respiratory syndrome-related coronavirus
  REGION 1..10: note = Table A: HLA-A*30:02H HLA-B*07:04H
  source 1..10: note = Severe acute respiratory syndrome coronavirus 2
KPRPPLNRNY

SEQ ID NO: 4954 - protein, 10 aa, Severe acute respiratory syndrome-related coronavirus
  REGION 1..10: note = Table A: HLA-B*42:01H HLA-C*15:05H HLA-B*07:02H HLA-B*07:04M
  source 1..10: note = Severe acute respiratory syndrome coronavirus 2
RPPLNRNYVF

SEQ ID NO: 4955 - protein, 10 aa, Severe acute respiratory syndrome-related coronavirus
  REGION 1..10: note = Table A: HLA-A*74:01H HLA-A*03:01H HLA-A*03:02H HLA-A*11:01M HLA-A*11:02M HLA-A*36:01H HLA-A*30:01M HLA-A*30:02H HLA-A*68:01H HLA-A*68:02H HLA-A*34:02H HLA-C*07:27H HLA-A*66:01H
  source 1..10: note = Severe acute respiratory syndrome coronavirus 2
YVFTGYRVTK

SEQ ID NO: 4956 - protein, 10 aa, Severe acute respiratory syndrome-related coronavirus
  REGION 1..10: note = Table A: HLA-B*57:03H
  source 1..10: note = Severe acute respiratory syndrome coronavirus 2
RVTKNSKVQI

SEQ ID NO: 4957 - protein, 10 aa, Severe acute respiratory syndrome-related coronavirus
  REGION 1..10: note = Table A: HLA-A*36:01H HLA-A*30:02H
  source 1..10: note = Severe acute respiratory syndrome coronavirus 2
KNSKVQIGEY

SEQ ID NO: 4958 - protein, 10 aa, Severe acute respiratory syndrome-related coronavirus
  REGION 1..10: note = Table A: HLA-B*38:01H HLA-B*38:02H HLA-B*15:03M
  source 1..10: note = Severe acute respiratory syndrome coronavirus 2
SKVQIGEYTF

SEQ ID NO: 4959 - protein, 10 aa, Severe acute respiratory syndrome-related coronavirus
  REGION 1..10: note = Table A: HLA-A*11:01H HLA-A*11:02H
  source 1..10: note = Severe acute respiratory syndrome coronavirus 2
VQIGEYTFEK

SEQ ID NO: 4960 - protein, 10 aa, Severe acute respiratory syndrome-related coronavirus
  REGION 1..10: note = Table A: HLA-B*44:03M HLA-B*18:01H HLA-B*27:02H HLA-A*30:02H HLA-B*15:01H
  source 1..10: note = Severe acute respiratory syndrome coronavirus 2
GEYTFEKGDY

SEQ ID NO: 4961 - protein, 10 aa, Severe acute respiratory syndrome-related coronavirus
  REGION 1..10: note = Table A: HLA-B*40:02H HLA-B*49:01H
  source 1..10: note = Severe acute respiratory syndrome coronavirus 2
FEKGDYGDAV

SEQ ID NO: 4962 - protein, 10 aa, Severe acute respiratory syndrome-related coronavirus
  REGION 1..10: note = Table A: HLA-A*36:01H
  source 1..10: note = Severe acute respiratory syndrome coronavirus 2
KGDYGDAVVY

SEQ ID NO: 4963 - protein, 10 aa, Severe acute respiratory syndrome-related coronavirus
  REGION 1..10: note = Table A: HLA-B*27:02H HLA-A*68:01H HLA-A*68:02H
  source 1..10: note = Severe acute respiratory syndrome coronavirus 2
GDYGDAVVYR

SEQ ID NO: 4964 - protein, 10 aa, Severe acute respiratory syndrome-related coronavirus
  REGION 1..10: note = Table A: HLA-A*25:01H HLA-B*46:01H HLA-A*26:01H HLA-A*30:02H HLA-B*38:02H HLA-B*15:01M HLA-B*15:02H HLA-B*15:03H
  source 1..10: note = Severe acute respiratory syndrome coronavirus 2
AVVYRGTTTY

SEQ ID NO: 4965 - protein, 10 aa, Severe acute respiratory syndrome-related coronavirus
  REGION 1..10: note = Table A: HLA-A*11:303H HLA-A*03:01M HLA-A*03:02M HLA-A*11:01M HLA-A*11:02M HLA-A*30:02H HLA-A*34:02M HLA-C*07:27H
  source 1..10: note = Severe acute respiratory syndrome coronavirus 2
VVYRGTTTYK

SEQ ID NO: 4966 - protein, 10 aa, Severe acute respiratory syndrome-related coronavirus
  REGION 1..10: note = Table A: HLA-A*24:07H
  source 1..10: note = Severe acute respiratory syndrome coronavirus 2
VYRGTTTYKL

SEQ ID NO: 4967 - protein, 10 aa, Severe acute respiratory syndrome-related coronavirus
  REGION 1..10: note = Table A: HLA-A*36:01H HLA-A*26:01M HLA-A*30:02H
  source 1..10: note = Severe acute respiratory syndrome coronavirus 2
TTYKLNVGDY

SEQ ID NO: 4968 - protein, 10 aa, Severe acute respiratory syndrome-related coronavirus
  REGION 1..10: note = Table A: HLA-A*29:02H HLA-A*30:02H HLA-A*24:02M HLA-A*24:07H HLA-C*08:01H HLA-A*23:01M
  source 1..10: note = Severe acute respiratory syndrome coronavirus 2
TYKLNVGDYF

SEQ ID NO: 4969 - protein, 10 aa, Severe acute respiratory syndrome-related coronavirus
  REGION 1..10: note = Table A: HLA-A*02:02H
  source 1..10: note = Severe acute respiratory syndrome coronavirus 2
KLNVGDYFVL

SEQ ID NO: 4970 - protein, 10 aa, Severe acute respiratory syndrome-related coronavirus
  REGION 1..10: note = Table A: HLA-C*14:02H HLA-C*14:03H
  source 1..10: note = Severe acute respiratory syndrome coronavirus 2
YFVLTSHTVM

SEQ ID NO: 4971 - protein, 10 aa, Severe acute respiratory syndrome-related coronavirus
  REGION 1..10: note = Table A: HLA-A*02:03H
  source 1..10: note = Severe acute respiratory syndrome coronavirus 2
VLTSHTVMPL

SEQ ID NO: 4972 - protein, 10 aa, Severe acute respiratory syndrome-related coronavirus
  REGION 1..10: note = Table A: HLA-B*39:06H
  source 1..10: note = Severe acute respiratory syndrome coronavirus 2
TSHTVMPLSA

SEQ ID NO: 4973 - protein, 10 aa, Severe acute respiratory syndrome-related coronavirus
  REGION 1..10: note = Table A: HLA-A*02:11H HLA-A*68:02H HLA-B*35:03M HLA-C*15:05H HLA-A*02:04H HLA-A*02:05H HLA-A*02:06H HLA-A*02:08H HLA-A*02:01H HLA-A*02:02H HLA-B*35:01H HLA-B*35:12H HLA-B*38:02H HLA-B*07:05H HLA-B*57:03H
  source 1..10: note = Severe acute respiratory syndrome coronavirus 2
TVMPLSAPTL

SEQ ID NO: 4974 - protein, 10 aa, Severe acute respiratory syndrome-related coronavirus
  REGION 1..10: note = Table A: HLA-B*35:01M HLA-B*07:05H
  source 1..10: note = Severe acute respiratory syndrome coronavirus 2
APTLVPQEHY

SEQ ID NO: 4975 - protein, 10 aa, Severe acute respiratory syndrome-related coronavirus
  REGION 1..10: note = Table A: HLA-B*27:05H
  source 1..10: note = Severe acute respiratory syndrome coronavirus 2
VRITGLYPTL

SEQ ID NO: 4976 - protein, 10 aa, Severe acute respiratory syndrome-related coronavirus
  REGION 1..10: note = Table A: HLA-B*27:02H HLA-B*53:01M HLA-B*35:03M HLA-C*15:05H HLA-B*35:01H HLA-B*35:02M HLA-B*35:08M HLA-B*35:07H HLA-B*35:12M HLA-B*38:02H HLA-B*39:01H HLA-B*07:05H
  source 1..10: note = Severe acute respiratory syndrome coronavirus 2
YPTLNISDEF

SEQ ID NO: 4977 - protein, 10 aa, Severe acute respiratory syndrome-related coronavirus
  REGION 1..10: note = Table A: HLA-B*44:05H HLA-A*25:01H HLA-A*26:01H HLA-B*44:03M HLA-B*18:01H HLA-B*27:02M HLA-B*35:01H HLA-B*07:05H
  source 1..10: note = Severe acute respiratory syndrome coronavirus 2
DEFSSNVANY

SEQ ID NO: 4978 - protein, 10 aa, Severe acute respiratory syndrome-related coronavirus
  REGION 1..10: note = Table A: HLA-A*03:02H HLA-A*11:01H HLA-A*11:02H HLA-A*36:01H HLA-B*27:02H HLA-A*68:01M HLA-A*68:02H HLA-A*34:02M
  source 1..10: note = Severe acute respiratory syndrome coronavirus 2
FSSNVANYQK

SEQ ID NO: 4979 - protein, 10 aa, Severe acute respiratory syndrome-related coronavirus
  REGION 1..10: note = Table A: HLA-A*34:01H
  source 1..10: note = Severe acute respiratory syndrome coronavirus 2
NVANYQKVGM

SEQ ID NO: 4980 - protein, 10 aa, Severe acute respiratory syndrome-related coronavirus
  REGION 1..10: note = Table A: HLA-A*11:303H HLA-A*03:01M HLA-A*03:02H HLA-A*11:01H HLA-A*11:02H HLA-A*34:02H
  source 1..10: note = Severe acute respiratory syndrome coronavirus 2
ANYQKVGMQK

SEQ ID NO: 4981 - protein, 10 aa, Severe acute respiratory syndrome-related coronavirus
  REGION 1..10: note = Table A: HLA-A*29:02H HLA-A*30:02M HLA-A*23:01H
  source 1..10: note = Severe acute respiratory syndrome coronavirus 2
NYQKVGMQKY

SEQ ID NO: 4982 - protein, 10 aa, Severe acute respiratory syndrome-related coronavirus
  REGION 1..10: note = Table A: HLA-A*11:303H HLA-A*03:01M HLA-A*03:02H HLA-A*11:01H HLA-A*11:02H HLA-A*30:02H HLA-A*34:02H
  source 1..10: note = Severe acute respiratory syndrome coronavirus 2
TLQGPPGTGK

SEQ ID NO: 4983 - protein, 10 aa, Severe acute respiratory syndrome-related coronavirus
  REGION 1..10: note = Table A: HLA-C*15:05H HLA-B*07:05H
  source 1..10: note = Severe acute respiratory syndrome coronavirus 2
GPPGTGKSHF

SEQ ID NO: 4984 - protein, 10 aa, Severe acute respiratory syndrome-related coronavirus
  REGION 1..10: note = Table A: HLA-B*58:02H HLA-B*57:03H
  source 1..10: note = Severe acute respiratory syndrome coronavirus 2
KSHFAIGLAL

SEQ ID NO: 4985 - protein, 10 aa, Severe acute respiratory syndrome-related coronavirus
  REGION 1..10: note = Table A: HLA-B*38:02M
  source 1..10: note = Severe acute respiratory syndrome coronavirus 2
SHFAIGLALY

SEQ ID NO: 4986 - protein, 10 aa, Severe acute respiratory syndrome-related coronavirus
  REGION 1..10: note = Table A: HLA-A*29:02M
  source 1..10: note = Severe acute respiratory syndrome coronavirus 2
HFAIGLALYY

SEQ ID NO: 4987 - protein, 10 aa, Severe acute respiratory syndrome-related coronavirus
  REGION 1..10: note = Table A: HLA-A*02:03H
  source 1..10: note = Severe acute respiratory syndrome coronavirus 2
ALYYPSARIV

SEQ ID NO: 4988 - protein, 10 aa, Severe acute respiratory syndrome-related coronavirus
  REGION 1..10: note = Table A: HLA-C*14:02M HLA-C*14:03H HLA-A*29:02H HLA-A*30:02H
  source 1..10: note = Severe acute respiratory syndrome coronavirus 2
LYYPSARIVY

SEQ ID NO: 4989 - protein, 10 aa, Severe acute respiratory syndrome-related coronavirus
  REGION 1..10: note = Table A: HLA-C*14:03H HLA-C*06:02H
  source 1..10: note = Severe acute respiratory syndrome coronavirus 2
YYPSARIVYT

SEQ ID NO: 4990 - protein, 10 aa, Severe acute respiratory syndrome-related coronavirus
  REGION 1..10: note = Table A: HLA-B*56:01M HLA-B*55:02H HLA-B*55:01M HLA-B*54:01H HLA-B*07:04H
  source 1..10: note = Severe acute respiratory syndrome coronavirus 2
YPSARIVYTA

SEQ ID NO: 4991 - protein, 10 aa, Severe acute respiratory syndrome-related coronavirus
  REGION 1..10: note = Table A: HLA-B*39:01H
  source 1..10: note = Severe acute respiratory syndrome coronavirus 2
ACSHAAVDAL

SEQ ID NO: 4992 - protein, 10 aa, Severe acute respiratory syndrome-related coronavirus
  REGION 1..10: note = Table A: HLA-A*36:01H HLA-A*34:02H
  source 1..10: note = Severe acute respiratory syndrome coronavirus 2
HAAVDALCEK

SEQ ID NO: 4993 - protein, 10 aa, Severe acute respiratory syndrome-related coronavirus
  REGION 1..10: note = Table A: HLA-A*02:02H HLA-A*02:03H
  source 1..10: note = Severe acute respiratory syndrome coronavirus 2
ALCEKALKYL

SEQ ID NO: 4994 - protein, 10 aa, Severe acute respiratory syndrome-related coronavirus
  REGION 1..10: note = Table A: HLA-A*31:01H
  source 1..10: note = Severe acute respiratory syndrome coronavirus 2
KYLPIDKCSR

SEQ ID NO: 4995 - protein, 10 aa, Severe acute respiratory syndrome-related coronavirus
  REGION 1..10: note = Table A: HLA-B*15:03M
  source 1..10: note = Severe acute respiratory syndrome coronavirus 2
FKVNSTLEQY

SEQ ID NO: 4996 - protein, 10 aa, Severe acute respiratory syndrome-related coronavirus
  REGION 1..10: note = Table A: HLA-A*02:11H HLA-A*02:08H
  source 1..10: note = Severe acute respiratory syndrome coronavirus 2
KVNSTLEQYV

SEQ ID NO: 4997 - protein, 10 aa, Severe acute respiratory syndrome-related coronavirus
  REGION 1..10: note = Table A: HLA-A*02:05H
  source 1..10: note = Severe acute respiratory syndrome coronavirus 2
IVVFDEISMA

SEQ ID NO: 4998 - protein, 10 aa, Severe acute respiratory syndrome-related coronavirus
  REGION 1..10: note = Table A: HLA-A*68:02H
  source 1..10: note = Severe acute respiratory syndrome coronavirus 2
TNYDLSVVNA

SEQ ID NO: 4999 - protein, 10 aa, Severe acute respiratory syndrome-related coronavirus
  REGION 1..10: note = Table A: HLA-A*33:01H HLA-A*26:03H HLA-A*68:01H HLA-A*34:01M HLA-A*66:01H
  source 1..10: note = Severe acute respiratory syndrome coronavirus 2
DLSVVNARLR

SEQ ID NO: 5000 - protein, 10 aa, Severe acute respiratory syndrome-related coronavirus
  REGION 1..10: note = Table A: HLA-A*11:01H HLA-A*11:02H HLA-A*34:02H
  source 1..10: note = Severe acute respiratory syndrome coronavirus 2
SVVNARLRAK

SEQ ID NO: 5001 - protein, 10 aa, Severe acute respiratory syndrome-related coronavirus
  REGION 1..10: note = Table A: HLA-C*14:03H HLA-A*11:303H HLA-A*25:01H HLA-B*46:01H HLA-A*26:01M HLA-A*26:02M HLA-A*26:03M HLA-C*04:03H HLA-C*03:03H HLA-A*02:11M HLA-C*03:04H HLA-A*68:01H HLA-A*68:02M HLA-B*35:03H HLA-C*15:05M
  REGION 1..10: note = CONT. FROM ABOVE: HLA-C*01:02H HLA-C*12:02H HLA-A*02:04M HLA- A*02:05H HLA-A*02:06M HLA-A*02:07H HLA-A*02:08H HLA-A*02:01H HLA-A*02:02M HLA-A*02:03M HLA-A*34:01H HLA-A*34:02H HLA-C*07 :27H HLA-C*17:01M HLA-C*08:01H HLA-C*08:03H HLA-B*38:02M
  REGION 1..10: note = CONT. FROM ABOVE: HLA-B*39:01H HLA-A*66:01H
  source 1..10: note = Severe acute respiratory syndrome coronavirus 2
YVYIGDPAQL

SEQ ID NO: 5002 - protein, 10 aa, Severe acute respiratory syndrome-related coronavirus
  REGION 1..10: note = Table A: HLA-A*34:02H
  source 1..10: note = Severe acute respiratory syndrome coronavirus 2
LPAPRTLLTK

SEQ ID NO: 5003 - protein, 10 aa, Severe acute respiratory syndrome-related coronavirus
  REGION 1..10: note = Table A: HLA-A*30:02M
  source 1..10: note = Severe acute respiratory syndrome coronavirus 2
LTKGTLEPEY

SEQ ID NO: 5004 - protein, 10 aa, Severe acute respiratory syndrome-related coronavirus
  REGION 1..10: note = Table A: HLA-B*50:01H
  source 1..10: note = Severe acute respiratory syndrome coronavirus 2
LEPEYFNSVC

SEQ ID NO: 5005 - protein, 10 aa, Severe acute respiratory syndrome-related coronavirus
  REGION 1..10: note = Table A: HLA-A*34:01H
  source 1..10: note = Severe acute respiratory syndrome coronavirus 2
EPEYFNSVCR

SEQ ID NO: 5006 - protein, 10 aa, Severe acute respiratory syndrome-related coronavirus
  REGION 1..10: note = Table A: HLA-B*13:01H
  source 1..10: note = Severe acute respiratory syndrome coronavirus 2
RLMKTIGPDM

SEQ ID NO: 5007 - protein, 10 aa, Severe acute respiratory syndrome-related coronavirus
  REGION 1..10: note = Table A: HLA-B*38:02H
  source 1..10: note = Severe acute respiratory syndrome coronavirus 2
LMKTIGPDMF

SEQ ID NO: 5008 - protein, 10 aa, Severe acute respiratory syndrome-related coronavirus
  REGION 1..10: note = Table A: HLA-A*36:01H
  source 1..10: note = Severe acute respiratory syndrome coronavirus 2
KTIGPDMFLG

SEQ ID NO: 5009 - protein, 10 aa, Severe acute respiratory syndrome-related coronavirus
  REGION 1..10: note = Table A: HLA-B*44:05H HLA-B*44:03H HLA-B*40:01H HLA-B*40:02M HLA-B*41:02M HLA-B*49:01H
  source 1..10: note = Severe acute respiratory syndrome coronavirus 2
AEIVDTVSAL

SEQ ID NO: 5010 - protein, 10 aa, Severe acute respiratory syndrome-related coronavirus
  REGION 1..10: note = Table A: HLA-A*68:02M
  source 1..10: note = Severe acute respiratory syndrome coronavirus 2
EIVDTVSALV

SEQ ID NO: 5011 - protein, 10 aa, Severe acute respiratory syndrome-related coronavirus
  REGION 1..10: note = Table A: HLA-B*58:01H HLA-A*36:01M HLA-A*29:01H HLA-A*29:02H HLA-A*01:01M HLA-B*38:02H HLA-B*07:05H
  source 1..10: note = Severe acute respiratory syndrome coronavirus 2
IVDTVSALVY

SEQ ID NO: 5012 - protein, 10 aa, Severe acute respiratory syndrome-related coronavirus
  REGION 1..10: note = Table A: HLA-A*03:02M HLA-A*11:01H HLA-A*68:01H HLA-A*68:02H
  source 1..10: note = Severe acute respiratory syndrome coronavirus 2
TVSALVYDNK

SEQ ID NO: 5013 - protein, 10 aa, Severe acute respiratory syndrome-related coronavirus
  REGION 1..10: note = Table A: HLA-B*57:03H
  source 1..10: note = Severe acute respiratory syndrome coronavirus 2
VSALVYDNKL

SEQ ID NO: 5014 - protein, 10 aa, Severe acute respiratory syndrome-related coronavirus
  REGION 1..10: note = Table A: HLA-A*11:01H HLA-A*34:02H
  source 1..10: note = Severe acute respiratory syndrome coronavirus 2
SALVYDNKLK

SEQ ID NO: 5015 - protein, 10 aa, Severe acute respiratory syndrome-related coronavirus
  REGION 1..10: note = Table A: HLA-B*46:01H HLA-A*34:01H HLA-A*34:02H
  source 1..10: note = Severe acute respiratory syndrome coronavirus 2
LVYDNKLKAH

SEQ ID NO: 5016 - protein, 10 aa, Severe acute respiratory syndrome-related coronavirus
  REGION 1..10: note = Table A: HLA-B*38:02H
  source 1..10: note = Severe acute respiratory syndrome coronavirus 2
AHKDKSAQCF

SEQ ID NO: 5017 - protein, 10 aa, Severe acute respiratory syndrome-related coronavirus
  REGION 1..10: note = Table A: HLA-A*36:01H HLA-A*30:02H
  source 1..10: note = Severe acute respiratory syndrome coronavirus 2
KSAQCFKMFY

SEQ ID NO: 5018 - protein, 10 aa, Severe acute respiratory syndrome-related coronavirus
  REGION 1..10: note = Table A: HLA-A*74:01H HLA-A*03:01H HLA-B*15:01H
  source 1..10: note = Severe acute respiratory syndrome coronavirus 2
KMFYKGVITH

SEQ ID NO: 5019 - protein, 10 aa, Severe acute respiratory syndrome-related coronavirus
  REGION 1..10: note = Table A: HLA-A*26:03H HLA-A*02:05M HLA-A*02:06H HLA-A*02:08H HLA-A*02:03H
  source 1..10: note = Severe acute respiratory syndrome coronavirus 2
GVITHDVSSA

SEQ ID NO: 5020 - protein, 10 aa, Severe acute respiratory syndrome-related coronavirus
  REGION 1..10: note = Table A: HLA-A*68:02H
  source 1..10: note = Severe acute respiratory syndrome coronavirus 2
DVSSAINRPQ

SEQ ID NO: 5021 - protein, 10 aa, Severe acute respiratory syndrome-related coronavirus
  REGION 1..10: note = Table A: HLA-B*58:02H HLA-B*57:03H
  source 1..10: note = Severe acute respiratory syndrome coronavirus 2
VSSAINRPQI

SEQ ID NO: 5022 - protein, 10 aa, Severe acute respiratory syndrome-related coronavirus
  REGION 1..10: note = Table A: HLA-C*12:05H HLA-A*68:02H HLA-A*02:06H
  source 1..10: note = Severe acute respiratory syndrome coronavirus 2
SAINRPQIGV

SEQ ID NO: 5023 - protein, 10 aa, Severe acute respiratory syndrome-related coronavirus
  REGION 1..10: note = Table A: HLA-A*74:01H HLA-A*33:01H HLA-A*33:03H HLA-A*31:01H
  source 1..10: note = Severe acute respiratory syndrome coronavirus 2
INRPQIGVVR

SEQ ID NO: 5024 - protein, 10 aa, Severe acute respiratory syndrome-related coronavirus
  REGION 1..10: note = Table A: HLA-B*42:01H HLA-C*15:05H HLA-B*07:02H HLA-B*07:04H HLA-B*07:05H
  source 1..10: note = Severe acute respiratory syndrome coronavirus 2
RPQIGVVREF

SEQ ID NO: 5025 - protein, 10 aa, Severe acute respiratory syndrome-related coronavirus
  REGION 1..10: note = Table A: HLA-B*44:02H HLA-B*44:03M
  source 1..10: note = Severe acute respiratory syndrome coronavirus 2
REFLTRNPAW

SEQ ID NO: 5026 - protein, 10 aa, Severe acute respiratory syndrome-related coronavirus
  REGION 1..10: note = Table A: HLA-A*33:01H HLA-A*33:03M
  source 1..10: note = Severe acute respiratory syndrome coronavirus 2
EFLTRNPAWR

SEQ ID NO: 5027 - protein, 10 aa, Severe acute respiratory syndrome-related coronavirus
  REGION 1..10: note = Table A: HLA-A*02:05H
  source 1..10: note = Severe acute respiratory syndrome coronavirus 2
FISPYNSQNA

SEQ ID NO: 5028 - protein, 10 aa, Severe acute respiratory syndrome-related coronavirus
  REGION 1..10: note = Table A: HLA-B*56:01H HLA-B*55:02H HLA-C*15:05M HLA-B*55:01M HLA-B*39:06H HLA-B*54:01M HLA-B*07:05H
  source 1..10: note = Severe acute respiratory syndrome coronavirus 2
SPYNSQNAVA

SEQ ID NO: 5029 - protein, 10 aa, Severe acute respiratory syndrome-related coronavirus
  REGION 1..10: note = Table A: HLA-B*27:02H HLA-A*68:01H HLA-A*34:02H
  source 1..10: note = Severe acute respiratory syndrome coronavirus 2
YNSQNAVASK

SEQ ID NO: 5030 - protein, 10 aa, Severe acute respiratory syndrome-related coronavirus
  REGION 1..10: note = Table A: HLA-A*02:11M HLA-A*02:06H HLA-A*02:08H HLA-A*02:01H HLA-A*02:03H HLA-B*38:02H HLA-B*13:02M
  source 1..10: note = Severe acute respiratory syndrome coronavirus 2
KILGLPTQTV

SEQ ID NO: 5031 - protein, 10 aa, Severe acute respiratory syndrome-related coronavirus
  REGION 1..10: note = Table A: HLA-A*36:01M HLA-A*01:01M HLA-B*35:08H HLA-B*38:02H
  source 1..10: note = Severe acute respiratory syndrome coronavirus 2
TVDSSQGSEY

SEQ ID NO: 5032 - protein, 10 aa, Severe acute respiratory syndrome-related coronavirus
  REGION 1..10: note = Table A: HLA-A*68:02H HLA-A*02:08H
  source 1..10: note = Severe acute respiratory syndrome coronavirus 2
YVIFTQTTET

SEQ ID NO: 5033 - protein, 10 aa, Severe acute respiratory syndrome-related coronavirus
  REGION 1..10: note = Table A: HLA-A*02:05H HLA-A*02:08H HLA-A*02:03H HLA-B*38:02H
  source 1..10: note = Severe acute respiratory syndrome coronavirus 2
VIFTQTTETA

SEQ ID NO: 5034 - protein, 10 aa, Severe acute respiratory syndrome-related coronavirus
  REGION 1..10: note = Table A: HLA-A*33:03M HLA-A*26:03H HLA-A*68:01H HLA-A*34:01M HLA-A*34:02M HLA-A*66:01M
  source 1..10: note = Severe acute respiratory syndrome coronavirus 2
ETAHSCNVNR

SEQ ID NO: 5035 - protein, 10 aa, Severe acute respiratory syndrome-related coronavirus
  REGION 1..10: note = Table A: HLA-A*68:02H
  source 1..10: note = Severe acute respiratory syndrome coronavirus 2
HSCNVNRFNV

SEQ ID NO: 5036 - protein, 10 aa, Severe acute respiratory syndrome-related coronavirus
  REGION 1..10: note = Table A: HLA-B*39:06H
  source 1..10: note = Severe acute respiratory syndrome coronavirus 2
NRFNVAITRA

SEQ ID NO: 5037 - protein, 10 aa, Severe acute respiratory syndrome-related coronavirus
  REGION 1..10: note = Table A: HLA-B*07:04H
  source 1..10: note = Severe acute respiratory syndrome coronavirus 2
RAKVGILCIM

SEQ ID NO: 5038 - protein, 10 aa, Severe acute respiratory syndrome-related coronavirus
  REGION 1..10: note = Table A: HLA-C*04:03H HLA-C*08:01H
  source 1..10: note = Severe acute respiratory syndrome coronavirus 2
LYDKLQFTSL

SEQ ID NO: 5039 - protein, 10 aa, Severe acute respiratory syndrome-related coronavirus
  REGION 1..10: note = Table A: HLA-A*74:01H
  source 1..10: note = Severe acute respiratory syndrome coronavirus 2
LQFTSLEIPR

SEQ ID NO: 5040 - protein, 10 aa, Severe acute respiratory syndrome-related coronavirus
  REGION 1..10: note = Table A: HLA-A*02:11H
  source 1..10: note = Severe acute respiratory syndrome coronavirus 2
TSLEIPRRNV

SEQ ID NO: 5041 - protein, 10 aa, Severe acute respiratory syndrome-related coronavirus
  REGION 1..10: note = Table A: HLA-A*25:01H HLA-A*26:03H HLA-A*34:01H
  source 1..10: note = Severe acute respiratory syndrome coronavirus 2
EIPRRNVATL

SEQ ID NO: 5042 - protein, 10 aa, Severe acute respiratory syndrome-related coronavirus
  REGION 1..10: note = Table A: HLA-A*68:02H
  source 1..10: note = Severe acute respiratory syndrome coronavirus 2
NVATLQAENV

SEQ ID NO: 5043 - protein, 10 aa, Severe acute respiratory syndrome-related coronavirus
  REGION 1..10: note = Table A: HLA-A*02:04H HLA-B*38:02H
  source 1..10: note = Severe acute respiratory syndrome coronavirus 2
TLQAENVTGL

SEQ ID NO: 5044 - protein, 10 aa, Severe acute respiratory syndrome-related coronavirus
  REGION 1..10: note = Table A: HLA-B*38:02H HLA-B*15:01H
  source 1..10: note = Severe acute respiratory syndrome coronavirus 2
LQAENVTGLF

SEQ ID NO: 5045 - protein, 10 aa, Severe acute respiratory syndrome-related coronavirus
  REGION 1..10: note = Table A: HLA-A*03:02H HLA-A*11:01H HLA-A*36:01M HLA-B*27:02H HLA-A*68:01H HLA-A*34:02M
  source 1..10: note = Severe acute respiratory syndrome coronavirus 2
QAENVTGLFK

SEQ ID NO: 5046 - protein, 10 aa, Severe acute respiratory syndrome-related coronavirus
  REGION 1..10: note = Table A: HLA-A*30:02H HLA-B*57:03H
  source 1..10: note = Severe acute respiratory syndrome coronavirus 2
KVITGLHPTQ

SEQ ID NO: 5047 - protein, 10 aa, Severe acute respiratory syndrome-related coronavirus
  REGION 1..10: note = Table A: HLA-A*02:03H
  source 1..10: note = Severe acute respiratory syndrome coronavirus 2
VITGLHPTQA

SEQ ID NO: 5048 - protein, 10 aa, Severe acute respiratory syndrome-related coronavirus
  REGION 1..10: note = Table A: HLA-C*08:03H
  source 1..10: note = Severe acute respiratory syndrome coronavirus 2
TGLHPTQAPT

SEQ ID NO: 5049 - protein, 10 aa, Severe acute respiratory syndrome-related coronavirus
  REGION 1..10: note = Table A: HLA-B*38:02H
  source 1..10: note = Severe acute respiratory syndrome coronavirus 2
LHPTQAPTHL

SEQ ID NO: 5050 - protein, 10 aa, Severe acute respiratory syndrome-related coronavirus
  REGION 1..10: note = Table A: HLA-B*57:03H
  source 1..10: note = Severe acute respiratory syndrome coronavirus 2
PTHLSVDTKF

SEQ ID NO: 5051 - protein, 10 aa, Severe acute respiratory syndrome-related coronavirus
  REGION 1..10: note = Table A: HLA-B*35:01H HLA-B*35:08H HLA-B*35:07H
  source 1..10: note = Severe acute respiratory syndrome coronavirus 2
IPGIPKDMTY

SEQ ID NO: 5052 - protein, 10 aa, Severe acute respiratory syndrome-related coronavirus
  REGION 1..10: note = Table A: HLA-B*07:04H
  source 1..10: note = Severe acute respiratory syndrome coronavirus 2
IPKDMTYRRL

SEQ ID NO: 5053 - protein, 10 aa, Severe acute respiratory syndrome-related coronavirus
  REGION 1..10: note = Table A: HLA-B*58:01H HLA-A*36:01H HLA-A*30:02H
  source 1..10: note = Severe acute respiratory syndrome coronavirus 2
ISMMGFKMNY

SEQ ID NO: 5054 - protein, 10 aa, Severe acute respiratory syndrome-related coronavirus
  REGION 1..10: note = Table A: HLA-B*15:03H
  source 1..10: note = Severe acute respiratory syndrome coronavirus 2
FKMNYQVNGY

SEQ ID NO: 5055 - protein, 10 aa, Severe acute respiratory syndrome-related coronavirus
  REGION 1..10: note = Table A: HLA-A*68:01H HLA-A*34:02H HLA-A*66:01H
  source 1..10: note = Severe acute respiratory syndrome coronavirus 2
NGYPNMFITR

SEQ ID NO: 5056 - protein, 10 aa, Severe acute respiratory syndrome-related coronavirus
  REGION 1..10: note = Table A: HLA-A*30:01H HLA-A*02:03H
  source 1..10: note = Severe acute respiratory syndrome coronavirus 2
ITREEAIRHV

SEQ ID NO: 5057 - protein, 10 aa, Severe acute respiratory syndrome-related coronavirus
  REGION 1..10: note = Table A: HLA-B*44:03H
  source 1..10: note = Severe acute respiratory syndrome coronavirus 2
EEAIRHVRAW

SEQ ID NO: 5058 - protein, 10 aa, Severe acute respiratory syndrome-related coronavirus
  REGION 1..10: note = Table A: HLA-B*57:03H
  source 1..10: note = Severe acute respiratory syndrome coronavirus 2
RAWIGFDVEG

SEQ ID NO: 5059 - protein, 10 aa, Severe acute respiratory syndrome-related coronavirus
  REGION 1..10: note = Table A: HLA-A*02:11H HLA-A*68:02H HLA-A*02:05H HLA-A*02:02H
  source 1..10: note = Severe acute respiratory syndrome coronavirus 2
IGFDVEGCHA

SEQ ID NO: 5060 - protein, 10 aa, Severe acute respiratory syndrome-related coronavirus
  REGION 1..10: note = Table A: HLA-A*03:01H HLA-A*30:01H HLA-C*15:05H HLA-B*57:03M
  source 1..10: note = Severe acute respiratory syndrome coronavirus 2
ATREAVGTNL

SEQ ID NO: 5061 - protein, 10 aa, Severe acute respiratory syndrome-related coronavirus
  REGION 1..10: note = Table A: HLA-B*40:01M HLA-B*40:02H
  source 1..10: note = Severe acute respiratory syndrome coronavirus 2
REAVGTNLPL

SEQ ID NO: 5062 - protein, 10 aa, Severe acute respiratory syndrome-related coronavirus
  REGION 1..10: note = Table A: HLA-B*58:01H HLA-A*03:01H HLA-A*11:01H HLA-B*57:01H HLA-B*27:02H HLA-B*57:03H
  source 1..10: note = Severe acute respiratory syndrome coronavirus 2
GTNLPLQLGF

SEQ ID NO: 5063 - protein, 10 aa, Severe acute respiratory syndrome-related coronavirus
  REGION 1..10: note = Table A: HLA-A*68:02H
  source 1..10: note = Severe acute respiratory syndrome coronavirus 2
FSTGVNLVAV

SEQ ID NO: 5064 - protein, 10 aa, Severe acute respiratory syndrome-related coronavirus
  REGION 1..10: note = Table A: HLA-A*36:01H HLA-A*01:01M HLA-C*04:03M HLA-A*02:07M HLA-B*35:08H HLA-C*08:02M HLA-B*38:02H HLA-B*39:01H HLA-C*05:01M
  source 1..10: note = Severe acute respiratory syndrome coronavirus 2
YVDTPNNTDF

SEQ ID NO: 5065 - protein, 10 aa, Severe acute respiratory syndrome-related coronavirus
  REGION 1..10: note = Table A: HLA-A*26:03H HLA-A*68:01M HLA-A*34:01H HLA-A*66:01H
  source 1..10: note = Severe acute respiratory syndrome coronavirus 2
DTPNNTDFSR

SEQ ID NO: 5066 - protein, 10 aa, Severe acute respiratory syndrome-related coronavirus
  REGION 1..10: note = Table A: HLA-B*56:01H HLA-B*55:02H HLA-C*15:05H HLA-B*55:01H
  source 1..10: note = Severe acute respiratory syndrome coronavirus 2
TPNNTDFSRV

SEQ ID NO: 5067 - protein, 10 aa, Severe acute respiratory syndrome-related coronavirus
  REGION 1..10: note = Table A: HLA-B*39:06H
  source 1..10: note = Severe acute respiratory syndrome coronavirus 2
NNTDFSRVSA

SEQ ID NO: 5068 - protein, 10 aa, Severe acute respiratory syndrome-related coronavirus
  REGION 1..10: note = Table A: HLA-A*34:02H
  source 1..10: note = Severe acute respiratory syndrome coronavirus 2
NTDFSRVSAK

SEQ ID NO: 5069 - protein, 10 aa, Severe acute respiratory syndrome-related coronavirus
  REGION 1..10: note = Table A: HLA-B*42:01H HLA-A*11:303M HLA-C*16:01H HLA-C*16:04H HLA-B*57:01H HLA-B*46:01M HLA-B*53:01H HLA-C*03:02M HLA-C*03:04H HLA-A*30:02H HLA-C*15:05H HLA-B*55:01H HLA-C*12:02H HLA-A*34:01H HLA-C*07:27H
  REGION 1..10: note = CONT. FROM ABOVE: HLA-B*35:01H HLA-B*35:08H HLA-B*35:07M HLA- C*08:01H HLA-B*38:02M HLA-B*07:02H HLA-B*07:04M HLA-B*15:01M HLA-B*15:02M HLA-B*15:03H HLA-B*07:05H HLA-B*57:03M HLA-C*02 :02M HLA-B*15:11M
  source 1..10: note = Severe acute respiratory syndrome coronavirus 2
SAKPPPGDQF

SEQ ID NO: 5070 - protein, 10 aa, Severe acute respiratory syndrome-related coronavirus
  REGION 1..10: note = Table A: HLA-A*29:02H
  source 1..10: note = Severe acute respiratory syndrome coronavirus 2
QFKHLIPLMY

SEQ ID NO: 5071 - protein, 10 aa, Severe acute respiratory syndrome-related coronavirus
  REGION 1..10: note = Table A: HLA-B*53:01H
  source 1..10: note = Severe acute respiratory syndrome coronavirus 2
IPLMYKGLPW

SEQ ID NO: 5072 - protein, 10 aa, Severe acute respiratory syndrome-related coronavirus
  REGION 1..10: note = Table A: HLA-A*02:11M HLA-A*02:02H HLA-A*02:03H
  source 1..10: note = Severe acute respiratory syndrome coronavirus 2
LMYKGLPWNV

SEQ ID NO: 5073 - protein, 10 aa, Severe acute respiratory syndrome-related coronavirus
  REGION 1..10: note = Table A: HLA-B*58:02M HLA-B*57:01H HLA-A*02:04H HLA-B*57:03M
  source 1..10: note = Severe acute respiratory syndrome coronavirus 2
KGLPWNVVRI

SEQ ID NO: 5074 - protein, 10 aa, Severe acute respiratory syndrome-related coronavirus
  REGION 1..10: note = Table A: HLA-A*02:08H HLA-C*08:03H
  source 1..10: note = Severe acute respiratory syndrome coronavirus 2
KIVQMLSDTL

SEQ ID NO: 5075 - protein, 10 aa, Severe acute respiratory syndrome-related coronavirus
  REGION 1..10: note = Table A: HLA-A*03:02H
  source 1..10: note = Severe acute respiratory syndrome coronavirus 2
IVQMLSDTLK

SEQ ID NO: 5076 - protein, 10 aa, Severe acute respiratory syndrome-related coronavirus
  REGION 1..10: note = Table A: HLA-A*02:04H HLA-A*02:02M
  source 1..10: note = Severe acute respiratory syndrome coronavirus 2
NLSDRVVFVL

SEQ ID NO: 5077 - protein, 10 aa, Severe acute respiratory syndrome-related coronavirus
  REGION 1..10: note = Table A: HLA-B*58:01M HLA-B*57:01H HLA-B*57:03H
  source 1..10: note = Severe acute respiratory syndrome coronavirus 2
LSDRVVFVLW

SEQ ID NO: 5078 - protein, 10 aa, Severe acute respiratory syndrome-related coronavirus
  REGION 1..10: note = Table A: HLA-A*02:04H
  source 1..10: note = Severe acute respiratory syndrome coronavirus 2
FVLWAHGFEL

SEQ ID NO: 5079 - protein, 10 aa, Severe acute respiratory syndrome-related coronavirus
  REGION 1..10: note = Table A: HLA-A*02:11H
  source 1..10: note = Severe acute respiratory syndrome coronavirus 2
VLWAHGFELT

SEQ ID NO: 5080 - protein, 10 aa, Severe acute respiratory syndrome-related coronavirus
  REGION 1..10: note = Table A: HLA-B*46:01H HLA-C*03:02H HLA-C*03:04H HLA-B*35:07H HLA-B*38:02H
  source 1..10: note = Severe acute respiratory syndrome coronavirus 2
WAHGFELTSM

SEQ ID NO: 5081 - protein, 10 aa, Severe acute respiratory syndrome-related coronavirus
  REGION 1..10: note = Table A: HLA-A*36:01H HLA-A*30:02H HLA-B*35:01H HLA-B*35:07H HLA-B*38:02H HLA-B*15:02H
  source 1..10: note = Severe acute respiratory syndrome coronavirus 2
HGFELTSMKY

SEQ ID NO: 5082 - protein, 10 aa, Severe acute respiratory syndrome-related coronavirus
  REGION 1..10: note = Table A: HLA-A*74:01M HLA-A*30:01H HLA-A*31:01H
  source 1..10: note = Severe acute respiratory syndrome coronavirus 2
KYFVKIGPER

SEQ ID NO: 5083 - protein, 10 aa, Severe acute respiratory syndrome-related coronavirus
  REGION 1..10: note = Table A: HLA-B*35:01M HLA-B*35:07H HLA-B*38:02M HLA-B*15:01H HLA-B*15:02H HLA-B*39:01H
  source 1..10: note = Severe acute respiratory syndrome coronavirus 2
TCFSTASDTY

SEQ ID NO: 5084 - protein, 10 aa, Severe acute respiratory syndrome-related coronavirus
  REGION 1..10: note = Table A: HLA-B*58:01M HLA-B*57:01H HLA-A*25:01M HLA-B*57:03M
  source 1..10: note = Severe acute respiratory syndrome coronavirus 2
STASDTYACW

SEQ ID NO: 5085 - protein, 10 aa, Severe acute respiratory syndrome-related coronavirus
  REGION 1..10: note = Table A: HLA-B*38:02H
  source 1..10: note = Severe acute respiratory syndrome coronavirus 2
WHHSIGFDYV

SEQ ID NO: 5086 - protein, 10 aa, Severe acute respiratory syndrome-related coronavirus
  REGION 1..10: note = Table A: HLA-B*38:02M
  source 1..10: note = Severe acute respiratory syndrome coronavirus 2
HHSIGFDYVY

SEQ ID NO: 5087 - protein, 10 aa, Severe acute respiratory syndrome-related coronavirus
  REGION 1..10: note = Table A: HLA-A*68:02H
  source 1..10: note = Severe acute respiratory syndrome coronavirus 2
YVYNPFMIDV

SEQ ID NO: 5088 - protein, 10 aa, Severe acute respiratory syndrome-related coronavirus
  REGION 1..10: note = Table A: HLA-B*53:01H HLA-B*35:01H HLA-B*35:07M
  source 1..10: note = Severe acute respiratory syndrome coronavirus 2
NPFMIDVQQW

SEQ ID NO: 5089 - protein, 10 aa, Severe acute respiratory syndrome-related coronavirus
  REGION 1..10: note = Table A: HLA-A*02:11H HLA-A*02:04H HLA-A*02:07H HLA-A*02:02H HLA-B*38:02H
  source 1..10: note = Severe acute respiratory syndrome coronavirus 2
FMIDVQQWGF

SEQ ID NO: 5090 - protein, 10 aa, Severe acute respiratory syndrome-related coronavirus
  REGION 1..10: note = Table A: HLA-A*36:01H HLA-A*29:02H
  source 1..10: note = Severe acute respiratory syndrome coronavirus 2
GNLQSNHDLY

SEQ ID NO: 5091 - protein, 10 aa, Severe acute respiratory syndrome-related coronavirus
  REGION 1..10: note = Table A: HLA-A*68:01H
  source 1..10: note = Severe acute respiratory syndrome coronavirus 2
VASCDAIMTR

SEQ ID NO: 5092 - protein, 10 aa, Severe acute respiratory syndrome-related coronavirus
  REGION 1..10: note = Table A: HLA-B*15:03H
  source 1..10: note = Severe acute respiratory syndrome coronavirus 2
VKRVDWTIEY

SEQ ID NO: 5093 - protein, 10 aa, Severe acute respiratory syndrome-related coronavirus
  REGION 1..10: note = Table A: HLA-B*44:05M HLA-B*18:01H HLA-A*68:02H HLA-A*02:02H HLA-C*08:01H HLA-B*38:01H HLA-B*38:02H HLA-B*40:01H HLA-B*40:02H HLA-B*40:06H HLA-B*07:05H HLA-B*41:02H HLA-B*49:01M HLA-B*50:01H
  source 1..10: note = Severe acute respiratory syndrome coronavirus 2
IEYPIIGDEL

SEQ ID NO: 5094 - protein, 10 aa, Severe acute respiratory syndrome-related coronavirus
  REGION 1..10: note = Table A: HLA-B*53:01M HLA-B*35:03H HLA-C*15:05H HLA-B*51:01H
  source 1..10: note = Severe acute respiratory syndrome coronavirus 2
YPIIGDELKI

SEQ ID NO: 5095 - protein, 10 aa, Severe acute respiratory syndrome-related coronavirus
  REGION 1..10: note = Table A: HLA-A*02:08H
  source 1..10: note = Severe acute respiratory syndrome coronavirus 2
KVQHMVVKAA

SEQ ID NO: 5096 - protein, 10 aa, Severe acute respiratory syndrome-related coronavirus
  REGION 1..10: note = Table A: HLA-B*15:01H
  source 1..10: note = Severe acute respiratory syndrome coronavirus 2
VQHMVVKAAL

SEQ ID NO: 5097 - protein, 10 aa, Severe acute respiratory syndrome-related coronavirus
  REGION 1..10: note = Table A: HLA-B*38:01H HLA-B*38:02M HLA-B*15:10M
  source 1..10: note = Severe acute respiratory syndrome coronavirus 2
QHMVVKAALL

SEQ ID NO: 5098 - protein, 10 aa, Severe acute respiratory syndrome-related coronavirus
  REGION 1..10: note = Table A: HLA-A*02:11H HLA-A*02:04M HLA-A*02:06H HLA-A*02:07H HLA-B*40:06H HLA-B*13:01H
  source 1..10: note = Severe acute respiratory syndrome coronavirus 2
ALLADKFPVL

SEQ ID NO: 5099 - protein, 10 aa, Severe acute respiratory syndrome-related coronavirus
  REGION 1..10: note = Table A: HLA-A*11:02H HLA-A*34:02H
  source 1..10: note = Severe acute respiratory syndrome coronavirus 2
PVLHDIGNPK

SEQ ID NO: 5100 - protein, 10 aa, Severe acute respiratory syndrome-related coronavirus
  REGION 1..10: note = Table A: HLA-A*02:11H HLA-A*02:01H HLA-A*02:02M HLA-A*02:03H
  source 1..10: note = Severe acute respiratory syndrome coronavirus 2
VLHDIGNPKA

SEQ ID NO: 5101 - protein, 10 aa, Severe acute respiratory syndrome-related coronavirus
  REGION 1..10: note = Table A: HLA-B*38:02M
  source 1..10: note = Severe acute respiratory syndrome coronavirus 2
LHDIGNPKAI

SEQ ID NO: 5102 - protein, 10 aa, Severe acute respiratory syndrome-related coronavirus
  REGION 1..10: note = Table A: HLA-A*34:02H
  source 1..10: note = Severe acute respiratory syndrome coronavirus 2
HDIGNPKAIK

SEQ ID NO: 5103 - protein, 10 aa, Severe acute respiratory syndrome-related coronavirus
  REGION 1..10: note = Table A: HLA-B*58:01M HLA-B*57:01H HLA-B*57:03M
  source 1..10: note = Severe acute respiratory syndrome coronavirus 2
KCVPQADVEW

SEQ ID NO: 5104 - protein, 10 aa, Severe acute respiratory syndrome-related coronavirus
  REGION 1..10: note = Table A: HLA-B*53:01M HLA-B*35:01M HLA-B*35:02H HLA-B*35:08H HLA-B*35:07H HLA-B*35:12H
  source 1..10: note = Severe acute respiratory syndrome coronavirus 2
VPQADVEWKF

SEQ ID NO: 5105 - protein, 10 aa, Severe acute respiratory syndrome-related coronavirus
  REGION 1..10: note = Table A: HLA-B*40:06H HLA-B*50:01H
  source 1..10: note = Severe acute respiratory syndrome coronavirus 2
VEWKFYDAQP

SEQ ID NO: 5106 - protein, 10 aa, Severe acute respiratory syndrome-related coronavirus
  REGION 1..10: note = Table A: HLA-B*58:01M HLA-B*58:02H HLA-A*36:01H HLA-B*57:01H HLA-A*29:02H HLA-A*30:02M HLA-C*15:02H HLA-B*15:03H HLA-B*57:03M
  source 1..10: note = Severe acute respiratory syndrome coronavirus 2
KAYKIEELFY

SEQ ID NO: 5107 - protein, 10 aa, Severe acute respiratory syndrome-related coronavirus
  REGION 1..10: note = Table A: HLA-B*15:03H
  source 1..10: note = Severe acute respiratory syndrome coronavirus 2
YKIEELFYSY

SEQ ID NO: 5108 - protein, 10 aa, Severe acute respiratory syndrome-related coronavirus
  REGION 1..10: note = Table A: HLA-B*58:01H HLA-A*36:01H HLA-A*34:02H HLA-B*38:02H HLA-B*57:03M HLA-A*66:01H
  source 1..10: note = Severe acute respiratory syndrome coronavirus 2
YSYATHSDKF

SEQ ID NO: 5109 - protein, 10 aa, Severe acute respiratory syndrome-related coronavirus
  REGION 1..10: note = Table A: HLA-B*38:02M HLA-B*39:01H
  source 1..10: note = Severe acute respiratory syndrome coronavirus 2
THSDKFTDGV

SEQ ID NO: 5110 - protein, 10 aa, Severe acute respiratory syndrome-related coronavirus
  REGION 1..10: note = Table A: HLA-A*24:02H HLA-A*24:07M HLA-A*23:01H HLA-B*57:03H
  source 1..10: note = Severe acute respiratory syndrome coronavirus 2
KFTDGVCLFW

SEQ ID NO: 5111 - protein, 10 aa, Severe acute respiratory syndrome-related coronavirus
  REGION 1..10: note = Table A: HLA-C*08:02H
  source 1..10: note = Severe acute respiratory syndrome coronavirus 2
NVDRYPANSI

SEQ ID NO: 5112 - protein, 10 aa, Severe acute respiratory syndrome-related coronavirus
  REGION 1..10: note = Table A: HLA-B*14:02H HLA-B*14:01H
  source 1..10: note = Severe acute respiratory syndrome coronavirus 2
DRYPANSIVC

SEQ ID NO: 5113 - protein, 10 aa, Severe acute respiratory syndrome-related coronavirus
  REGION 1..10: note = Table A: HLA-B*53:01M HLA-C*15:05H HLA-A*34:01H HLA-B*35:01H HLA-B*35:07M
  source 1..10: note = Severe acute respiratory syndrome coronavirus 2
YPANSIVCRF

SEQ ID NO: 5114 - protein, 10 aa, Severe acute respiratory syndrome-related coronavirus
  REGION 1..10: note = Table A: HLA-C*04:03H
  source 1..10: note = Severe acute respiratory syndrome coronavirus 2
RFDTRVLSNL

SEQ ID NO: 5115 - protein, 10 aa, Severe acute respiratory syndrome-related coronavirus
  REGION 1..10: note = Table A: HLA-A*02:01H
  source 1..10: note = Severe acute respiratory syndrome coronavirus 2
VLSNLNLPGC

SEQ ID NO: 5116 - protein, 10 aa, Severe acute respiratory syndrome-related coronavirus
  REGION 1..10: note = Table A: HLA-B*35:01H
  source 1..10: note = Severe acute respiratory syndrome coronavirus 2
LPGCDGGSLY

SEQ ID NO: 5117 - protein, 10 aa, Severe acute respiratory syndrome-related coronavirus
  REGION 1..10: note = Table A: HLA-A*30:02H HLA-B*57:03M
  source 1..10: note = Severe acute respiratory syndrome coronavirus 2
GSLYVNKHAF

SEQ ID NO: 5118 - protein, 10 aa, Severe acute respiratory syndrome-related coronavirus
  REGION 1..10: note = Table A: HLA-A*11:01H HLA-A*11:02H HLA-A*36:01H HLA-A*34:02M
  source 1..10: note = Severe acute respiratory syndrome coronavirus 2
HAFHTPAFDK

SEQ ID NO: 5119 - protein, 10 aa, Severe acute respiratory syndrome-related coronavirus
  REGION 1..10: note = Table A: HLA-B*39:06H
  source 1..10: note = Severe acute respiratory syndrome coronavirus 2
FHTPAFDKSA

SEQ ID NO: 5120 - protein, 10 aa, Severe acute respiratory syndrome-related coronavirus
  REGION 1..10: note = Table A: HLA-C*14:03H HLA-A*25:01M HLA-B*46:01M HLA-A*26:01M HLA-A*26:02M HLA-A*26:03M HLA-A*30:02H HLA-A*68:01H HLA-A*68:02H HLA-C*12:02H HLA-A*34:01H HLA-A*34:02M HLA-B*38:02H HLA-B*15:01H HLA-B*15:02H HLA-B*57:03M
  REGION 1..10: note = CONT. FROM ABOVE: HLA-A*66:01M
  source 1..10: note = Severe acute respiratory syndrome coronavirus 2
HTPAFDKSAF

SEQ ID NO: 5121 - protein, 10 aa, Severe acute respiratory syndrome-related coronavirus
  REGION 1..10: note = Table A: HLA-C*04:01H HLA-C*04:03H
  source 1..10: note = Severe acute respiratory syndrome coronavirus 2
AFDKSAFVNL

SEQ ID NO: 5122 - protein, 10 aa, Severe acute respiratory syndrome-related coronavirus
  REGION 1..10: note = Table A: HLA-B*57:03H
  source 1..10: note = Severe acute respiratory syndrome coronavirus 2
KSAFVNLKQL

SEQ ID NO: 5123 - protein, 10 aa, Severe acute respiratory syndrome-related coronavirus
  REGION 1..10: note = Table A: HLA-C*14:03H HLA-A*24:07H
  source 1..10: note = Severe acute respiratory syndrome coronavirus 2
AFVNLKQLPF

SEQ ID NO: 5124 - protein, 10 aa, Severe acute respiratory syndrome-related coronavirus
  REGION 1..10: note = Table A: HLA-A*29:02H
  source 1..10: note = Severe acute respiratory syndrome coronavirus 2
VNLKQLPFFY

SEQ ID NO: 5125 - protein, 10 aa, Severe acute respiratory syndrome-related coronavirus
  REGION 1..10: note = Table A: HLA-B*56:01H HLA-B*55:02H HLA-C*15:05H HLA-B*55:01H HLA-B*07:04M
  source 1..10: note = Severe acute respiratory syndrome coronavirus 2
SPCESHGKQV

SEQ ID NO: 5126 - protein, 10 aa, Severe acute respiratory syndrome-related coronavirus
  REGION 1..10: note = Table A: HLA-B*15:03H
  source 1..10: note = Severe acute respiratory syndrome coronavirus 2
GKQVVSDIDY

SEQ ID NO: 5127 - protein, 10 aa, Severe acute respiratory syndrome-related coronavirus
  REGION 1..10: note = Table A: HLA-A*02:05H HLA-A*02:08H HLA-B*13:01H
  source 1..10: note = Severe acute respiratory syndrome coronavirus 2
KQVVSDIDYV

SEQ ID NO: 5128 - protein, 10 aa, Severe acute respiratory syndrome-related coronavirus
  REGION 1..10: note = Table A: HLA-A*68:02H
  source 1..10: note = Severe acute respiratory syndrome coronavirus 2
VVSDIDYVPL

SEQ ID NO: 5129 - protein, 10 aa, Severe acute respiratory syndrome-related coronavirus
  REGION 1..10: note = Table A: HLA-A*36:01H
  source 1..10: note = Severe acute respiratory syndrome coronavirus 2
VSDIDYVPLK

SEQ ID NO: 5130 - protein, 10 aa, Severe acute respiratory syndrome-related coronavirus
  REGION 1..10: note = Table A: HLA-B*38:01M HLA-B*38:02H HLA-B*15:10M
  source 1..10: note = Severe acute respiratory syndrome coronavirus 2
HHANEYRLYL

SEQ ID NO: 5131 - protein, 10 aa, Severe acute respiratory syndrome-related coronavirus
  REGION 1..10: note = Table A: HLA-B*44:03H HLA-B*18:01M HLA-B*07:05H
  source 1..10: note = Severe acute respiratory syndrome coronavirus 2
NEYRLYLDAY

SEQ ID NO: 5132 - protein, 10 aa, Severe acute respiratory syndrome-related coronavirus
  REGION 1..10: note = Table A: HLA-A*02:02H HLA-B*13:01H
  source 1..10: note = Severe acute respiratory syndrome coronavirus 2
RLYLDAYNMM

SEQ ID NO: 5133 - protein, 10 aa, Severe acute respiratory syndrome-related coronavirus
  REGION 1..10: note = Table A: HLA-A*23:01H
  source 1..10: note = Severe acute respiratory syndrome coronavirus 2
LYLDAYNMMI

SEQ ID NO: 5134 - protein, 10 aa, Severe acute respiratory syndrome-related coronavirus
  REGION 1..10: note = Table A: HLA-B*38:02H
  source 1..10: note = Severe acute respiratory syndrome coronavirus 2
MMISAGFSLW

SEQ ID NO: 5135 - protein, 10 aa, Severe acute respiratory syndrome-related coronavirus
  REGION 1..10: note = Table A: HLA-A*36:01H HLA-B*46:01H HLA-A*30:02H
  source 1..10: note = Severe acute respiratory syndrome coronavirus 2
ISAGFSLWVY

SEQ ID NO: 5136 - protein, 10 aa, Severe acute respiratory syndrome-related coronavirus
  REGION 1..10: note = Table A: HLA-A*11:01H HLA-A*34:02H
  source 1..10: note = Severe acute respiratory syndrome coronavirus 2
SAGFSLWVYK

SEQ ID NO: 5137 - protein, 10 aa, Severe acute respiratory syndrome-related coronavirus
  REGION 1..10: note = Table A: HLA-A*24:02H HLA-A*24:07H HLA-A*23:01H
  source 1..10: note = Severe acute respiratory syndrome coronavirus 2
VYKQFDTYNL

SEQ ID NO: 5138 - protein, 10 aa, Severe acute respiratory syndrome-related coronavirus
  REGION 1..10: note = Table A: HLA-B*39:06H
  source 1..10: note = Severe acute respiratory syndrome coronavirus 2
TRLQSLENVA

SEQ ID NO: 5139 - protein, 10 aa, Severe acute respiratory syndrome-related coronavirus
  REGION 1..10: note = Table A: HLA-B*44:05H HLA-A*02:11H HLA-A*30:02H HLA-A*02:04H HLA-B*38:02H HLA-A*32:01M HLA-B*15:01M HLA-B*15:03H HLA-B*57:03M HLA-B*13:01M
  source 1..10: note = Severe acute respiratory syndrome coronavirus 2
RLQSLENVAF

SEQ ID NO: 5140 - protein, 10 aa, Severe acute respiratory syndrome-related coronavirus
  REGION 1..10: note = Table A: HLA-B*38:02H
  source 1..10: note = Severe acute respiratory syndrome coronavirus 2
SLENVAFNVV

SEQ ID NO: 5141 - protein, 10 aa, Severe acute respiratory syndrome-related coronavirus
  REGION 1..10: note = Table A: HLA-A*33:03H HLA-A*26:03H HLA-B*27:02H HLA-A*68:01M HLA-A*34:02M
  source 1..10: note = Severe acute respiratory syndrome coronavirus 2
ENVAFNVVNK

SEQ ID NO: 5142 - protein, 10 aa, Severe acute respiratory syndrome-related coronavirus
  REGION 1..10: note = Table A: HLA-A*68:01H
  source 1..10: note = Severe acute respiratory syndrome coronavirus 2
NVAFNVVNKG

SEQ ID NO: 5143 - protein, 10 aa, Severe acute respiratory syndrome-related coronavirus
  REGION 1..10: note = Table A: HLA-C*14:03H HLA-A*24:07H
  source 1..10: note = Severe acute respiratory syndrome coronavirus 2
AFNVVNKGHF

SEQ ID NO: 5144 - protein, 10 aa, Severe acute respiratory syndrome-related coronavirus
  REGION 1..10: note = Table A: HLA-C*08:03H HLA-B*38:02M HLA-B*39:06H HLA-B*39:01H HLA-B*15:10M
  source 1..10: note = Severe acute respiratory syndrome coronavirus 2
GHFDGQQGEV

SEQ ID NO: 5145 - protein, 10 aa, Severe acute respiratory syndrome-related coronavirus
  REGION 1..10: note = Table A: HLA-B*13:01H HLA-B*13:02M
  source 1..10: note = Severe acute respiratory syndrome coronavirus 2
GQQGEVPVSI

SEQ ID NO: 5146 - protein, 10 aa, Severe acute respiratory syndrome-related coronavirus
  REGION 1..10: note = Table A: HLA-B*56:01M HLA-B*55:02M HLA-C*15:05M HLA-B*55:01H HLA-B*51:01M HLA-B*54:01H HLA-B*07:05H
  source 1..10: note = Severe acute respiratory syndrome coronavirus 2
VPVSIINNTV

SEQ ID NO: 5147 - protein, 10 aa, Severe acute respiratory syndrome-related coronavirus
  REGION 1..10: note = Table A: HLA-A*11:303M HLA-A*03:01M HLA-A*03:02H HLA-A*11:01H HLA-A*11:02H HLA-A*68:01H HLA-A*34:02H HLA-C*07:27M
  source 1..10: note = Severe acute respiratory syndrome coronavirus 2
SIINNTVYTK

SEQ ID NO: 5148 - protein, 10 aa, Severe acute respiratory syndrome-related coronavirus
  REGION 1..10: note = Table A: HLA-A*68:02H
  source 1..10: note = Severe acute respiratory syndrome coronavirus 2
NTVYTKVDGV

SEQ ID NO: 5149 - protein, 10 aa, Severe acute respiratory syndrome-related coronavirus
  REGION 1..10: note = Table A: HLA-B*48:01H HLA-B*38:01H HLA-B*38:02H HLA-B*39:01H
  source 1..10: note = Severe acute respiratory syndrome coronavirus 2
TKVDGVDVEL

SEQ ID NO: 5150 - protein, 10 aa, Severe acute respiratory syndrome-related coronavirus
  REGION 1..10: note = Table A: HLA-A*36:01H HLA-C*04:03H HLA-A*02:07H HLA-B*57:03M HLA-B*13:01H
  source 1..10: note = Severe acute respiratory syndrome coronavirus 2
KVDGVDVELF

SEQ ID NO: 5151 - protein, 10 aa, Severe acute respiratory syndrome-related coronavirus
  REGION 1..10: note = Table A: HLA-A*36:01H
  source 1..10: note = Severe acute respiratory syndrome coronavirus 2
GVDVELFENK

SEQ ID NO: 5152 - protein, 10 aa, Severe acute respiratory syndrome-related coronavirus
  REGION 1..10: note = Table A: HLA-B*44:05H HLA-B*40:01M HLA-B*40:02H HLA-B*41:02H HLA-B*49:01H
  source 1..10: note = Severe acute respiratory syndrome coronavirus 2
VELFENKTTL

SEQ ID NO: 5153 - protein, 10 aa, Severe acute respiratory syndrome-related coronavirus
  REGION 1..10: note = Table A: HLA-B*58:01M HLA-B*58:02M HLA-C*16:01H HLA-A*36:01H HLA-B*57:01M HLA-C*15:05H HLA-A*32:01H HLA-B*57:03H
  source 1..10: note = Severe acute respiratory syndrome coronavirus 2
KTTLPVNVAF

SEQ ID NO: 5154 - protein, 10 aa, Severe acute respiratory syndrome-related coronavirus
  REGION 1..10: note = Table A: HLA-B*53:01H HLA-B*35:01H HLA-B*35:07H
  source 1..10: note = Severe acute respiratory syndrome coronavirus 2
LPVNVAFELW

SEQ ID NO: 5155 - protein, 10 aa, Severe acute respiratory syndrome-related coronavirus
  REGION 1..10: note = Table A: HLA-A*36:01H HLA-A*30:02H HLA-B*35:01H
  source 1..10: note = Severe acute respiratory syndrome coronavirus 2
IAANTVIWDY

SEQ ID NO: 5156 - protein, 10 aa, Severe acute respiratory syndrome-related coronavirus
  REGION 1..10: note = Table A: HLA-B*44:05H HLA-C*15:05H HLA-B*37:01H HLA-B*38:02H HLA-B*40:02H HLA-B*41:02H HLA-B*49:01H
  source 1..10: note = Severe acute respiratory syndrome coronavirus 2
RDAPAHISTI

SEQ ID NO: 5157 - protein, 10 aa, Severe acute respiratory syndrome-related coronavirus
  REGION 1..10: note = Table A: HLA-B*56:01M HLA-B*55:02H HLA-A*68:02H HLA-C*15:05M HLA-B*55:01H HLA-B*54:01H HLA-B*07:02H HLA-B*07:04H HLA-B*07:05H
  source 1..10: note = Severe acute respiratory syndrome coronavirus 2
APAHISTIGV

SEQ ID NO: 5158 - protein, 10 aa, Severe acute respiratory syndrome-related coronavirus
  REGION 1..10: note = Table A: HLA-A*03:01H HLA-A*03:02H HLA-A*11:01H HLA-A*11:02H
  source 1..10: note = Severe acute respiratory syndrome coronavirus 2
GVCSMTDIAK

SEQ ID NO: 5159 - protein, 10 aa, Severe acute respiratory syndrome-related coronavirus
  REGION 1..10: note = Table A: HLA-C*15:05H
  source 1..10: note = Severe acute respiratory syndrome coronavirus 2
KPTETICAPL

SEQ ID NO: 5160 - protein, 10 aa, Severe acute respiratory syndrome-related coronavirus
  REGION 1..10: note = Table A: HLA-A*25:01M HLA-A*26:01H HLA-A*26:02H HLA-A*26:03H
  source 1..10: note = Severe acute respiratory syndrome coronavirus 2
ETICAPLTVF

SEQ ID NO: 5161 - protein, 10 aa, Severe acute respiratory syndrome-related coronavirus
  REGION 1..10: note = Table A: HLA-C*04:03H
  source 1..10: note = Severe acute respiratory syndrome coronavirus 2
FFDGRVDGQV

SEQ ID NO: 5162 - protein, 10 aa, Severe acute respiratory syndrome-related coronavirus
  REGION 1..10: note = Table A: HLA-B*27:05M HLA-B*27:02H HLA-B*38:01H HLA-B*38:02M HLA-B*39:01M
  source 1..10: note = Severe acute respiratory syndrome coronavirus 2
GRVDGQVDLF

SEQ ID NO: 5163 - protein, 10 aa, Severe acute respiratory syndrome-related coronavirus
  REGION 1..10: note = Table A: HLA-A*74:01H HLA-A*36:01H
  source 1..10: note = Severe acute respiratory syndrome coronavirus 2
RVDGQVDLFR

SEQ ID NO: 5164 - protein, 10 aa, Severe acute respiratory syndrome-related coronavirus
  REGION 1..10: note = Table A: HLA-A*74:01H
  source 1..10: note = Severe acute respiratory syndrome coronavirus 2
GQVDLFRNAR

SEQ ID NO: 5165 - protein, 10 aa, Severe acute respiratory syndrome-related coronavirus
  REGION 1..10: note = Table A: HLA-B*27:05H HLA-B*27:02H HLA-B*39:01H
  source 1..10: note = Severe acute respiratory syndrome coronavirus 2
ARNGVLITEG

SEQ ID NO: 5166 - protein, 10 aa, Severe acute respiratory syndrome-related coronavirus
  REGION 1..10: note = Table A: HLA-A*03:01H HLA-A*03:02H HLA-A*11:01H
  source 1..10: note = Severe acute respiratory syndrome coronavirus 2
GVLITEGSVK

SEQ ID NO: 5167 - protein, 10 aa, Severe acute respiratory syndrome-related coronavirus
  REGION 1..10: note = Table A: HLA-C*08:03H
  source 1..10: note = Severe acute respiratory syndrome coronavirus 2
GSVKGLQPSV

SEQ ID NO: 5168 - protein, 10 aa, Severe acute respiratory syndrome-related coronavirus
  REGION 1..10: note = Table A: HLA-A*03:01H HLA-A*03:02H HLA-A*34:02H
  source 1..10: note = Severe acute respiratory syndrome coronavirus 2
KGLQPSVGPK

SEQ ID NO: 5169 - protein, 10 aa, Severe acute respiratory syndrome-related coronavirus
  REGION 1..10: note = Table A: HLA-A*02:03H
  source 1..10: note = Severe acute respiratory syndrome coronavirus 2
LQPSVGPKQA

SEQ ID NO: 5170 - protein, 10 aa, Severe acute respiratory syndrome-related coronavirus
  REGION 1..10: note = Table A: HLA-C*08:03H
  source 1..10: note = Severe acute respiratory syndrome coronavirus 2
PSVGPKQASL

SEQ ID NO: 5171 - protein, 10 aa, Severe acute respiratory syndrome-related coronavirus
  REGION 1..10: note = Table A: HLA-B*48:01M HLA-A*02:08M HLA-A*02:02H HLA-B*40:02H HLA-B*15:01H HLA-B*57:03H HLA-B*13:01H HLA-B*13:02H
  source 1..10: note = Severe acute respiratory syndrome coronavirus 2
KQASLNGVTL

SEQ ID NO: 5172 - protein, 10 aa, Severe acute respiratory syndrome-related coronavirus
  REGION 1..10: note = Table A: HLA-A*36:01H HLA-B*27:02H HLA-A*68:02H
  source 1..10: note = Severe acute respiratory syndrome coronavirus 2
GVTLIGEAVK

SEQ ID NO: 5173 - protein, 10 aa, Severe acute respiratory syndrome-related coronavirus
  REGION 1..10: note = Table A: HLA-B*44:03H
  source 1..10: note = Severe acute respiratory syndrome coronavirus 2
GEAVKTQFNY

SEQ ID NO: 5174 - protein, 10 aa, Severe acute respiratory syndrome-related coronavirus
  REGION 1..10: note = Table A: HLA-A*36:01H HLA-A*26:01H HLA-A*26:02H HLA-A*26:03H HLA-B*53:01H HLA-A*68:02H HLA-A*34:01H HLA-A*34:02M HLA-B*35:01M HLA-B*35:07H HLA-B*38:02H HLA-A*66:01H
  source 1..10: note = Severe acute respiratory syndrome coronavirus 2
EAVKTQFNYY

SEQ ID NO: 5175 - protein, 10 aa, Severe acute respiratory syndrome-related coronavirus
  REGION 1..10: note = Table A: HLA-A*74:01H HLA-A*03:01H HLA-A*11:01H HLA-A*11:02H HLA-A*30:01M HLA-A*30:02H HLA-A*34:02H
  source 1..10: note = Severe acute respiratory syndrome coronavirus 2
AVKTQFNYYK

SEQ ID NO: 5176 - protein, 10 aa, Severe acute respiratory syndrome-related coronavirus
  REGION 1..10: note = Table A: HLA-B*48:01M HLA-B*38:02H HLA-B*15:03H
  source 1..10: note = Severe acute respiratory syndrome coronavirus 2
KKVDGVVQQL

SEQ ID NO: 5177 - protein, 10 aa, Severe acute respiratory syndrome-related coronavirus
  REGION 1..10: note = Table A: HLA-A*29:01H HLA-B*27:02H HLA-A*30:02H HLA-B*35:01H HLA-B*15:01H HLA-B*07:05H
  source 1..10: note = Severe acute respiratory syndrome coronavirus 2
GVVQQLPETY

SEQ ID NO: 5178 - protein, 10 aa, Severe acute respiratory syndrome-related coronavirus
  REGION 1..10: note = Table A: HLA-A*26:03H HLA-A*68:02M HLA-A*34:01M HLA-A*34:02M HLA-A*66:01M
  source 1..10: note = Severe acute respiratory syndrome coronavirus 2
ETYFTQSRNL

SEQ ID NO: 5179 - protein, 10 aa, Severe acute respiratory syndrome-related coronavirus
  REGION 1..10: note = Table A: HLA-C*16:01H HLA-A*25:01H HLA-A*33:03H HLA-B*46:01H HLA-A*26:03H HLA-C*03:02H HLA-B*57:03H HLA-C*02:02H
  source 1..10: note = Severe acute respiratory syndrome coronavirus 2
FTQSRNLQEF

SEQ ID NO: 5180 - protein, 10 aa, Severe acute respiratory syndrome-related coronavirus
  REGION 1..10: note = Table A: HLA-B*07:04H
  source 1..10: note = Severe acute respiratory syndrome coronavirus 2
KPRSQMEIDF

SEQ ID NO: 5181 - protein, 10 aa, Severe acute respiratory syndrome-related coronavirus
  REGION 1..10: note = Table A: HLA-A*02:11H HLA-A*02:04H HLA-A*02:05H HLA-A*02:06M HLA-A*02:01H HLA-C*08:01H HLA-B*38:01H HLA-B*38:02H HLA-B*13:01H HLA-B*13:02H
  source 1..10: note = Severe acute respiratory syndrome coronavirus 2
SQMEIDFLEL

SEQ ID NO: 5182 - protein, 10 aa, Severe acute respiratory syndrome-related coronavirus
  REGION 1..10: note = Table A: HLA-B*18:01H
  source 1..10: note = Severe acute respiratory syndrome coronavirus 2
MEIDFLELAM

SEQ ID NO: 5183 - protein, 10 aa, Severe acute respiratory syndrome-related coronavirus
  REGION 1..10: note = Table A: HLA-A*26:03H HLA-A*34:01H
  source 1..10: note = Severe acute respiratory syndrome coronavirus 2
ELAMDEFIER

SEQ ID NO: 5184 - protein, 10 aa, Severe acute respiratory syndrome-related coronavirus
  REGION 1..10: note = Table A: HLA-A*36:01H HLA-B*53:01H HLA-C*03:02H HLA-B*35:01H HLA-B*35:08H HLA-B*35:07H
  source 1..10: note = Severe acute respiratory syndrome coronavirus 2
LAMDEFIERY

SEQ ID NO: 5185 - protein, 10 aa, Severe acute respiratory syndrome-related coronavirus
  REGION 1..10: note = Table A: HLA-B*27:05H HLA-B*38:02H
  source 1..10: note = Severe acute respiratory syndrome coronavirus 2
ERYKLEGYAF

SEQ ID NO: 5186 - protein, 10 aa, Severe acute respiratory syndrome-related coronavirus
  REGION 1..10: note = Table A: HLA-B*13:01H
  source 1..10: note = Severe acute respiratory syndrome coronavirus 2
KLEGYAFEHI

SEQ ID NO: 5187 - protein, 10 aa, Severe acute respiratory syndrome-related coronavirus
  REGION 1..10: note = Table A: HLA-B*15:02H
  source 1..10: note = Severe acute respiratory syndrome coronavirus 2
EGYAFEHIVY

SEQ ID NO: 5188 - protein, 10 aa, Severe acute respiratory syndrome-related coronavirus
  REGION 1..10: note = Table A: HLA-A*29:02H HLA-C*04:03H
  source 1..10: note = Severe acute respiratory syndrome coronavirus 2
AFEHIVYGDF

SEQ ID NO: 5189 - protein, 10 aa, Severe acute respiratory syndrome-related coronavirus
  REGION 1..10: note = Table A: HLA-B*39:01H
  source 1..10: note = Severe acute respiratory syndrome coronavirus 2
EHIVYGDFSH

SEQ ID NO: 5190 - protein, 10 aa, Severe acute respiratory syndrome-related coronavirus
  REGION 1..10: note = Table A: HLA-C*14:02M HLA-C*14:03M HLA-C*07:02H HLA-A*24:02M HLA-A*24:07H HLA-A*23:01H
  source 1..10: note = Severe acute respiratory syndrome coronavirus 2
VYGDFSHSQL

SEQ ID NO: 5191 - protein, 10 aa, Severe acute respiratory syndrome-related coronavirus
  REGION 1..10: note = Table A: HLA-B*38:01M HLA-B*38:02H HLA-B*39:01H HLA-B*15:10M
  source 1..10: note = Severe acute respiratory syndrome coronavirus 2
SHSQLGGLHL

SEQ ID NO: 5192 - protein, 10 aa, Severe acute respiratory syndrome-related coronavirus
  REGION 1..10: note = Table A: HLA-B*58:02H
  source 1..10: note = Severe acute respiratory syndrome coronavirus 2
HSQLGGLHLL

SEQ ID NO: 5193 - protein, 10 aa, Severe acute respiratory syndrome-related coronavirus
  REGION 1..10: note = Table A: HLA-B*38:02H HLA-B*13:02M
  source 1..10: note = Severe acute respiratory syndrome coronavirus 2
SQLGGLHLLI

SEQ ID NO: 5194 - protein, 10 aa, Severe acute respiratory syndrome-related coronavirus
  REGION 1..10: note = Table A: HLA-A*03:01H
  source 1..10: note = Severe acute respiratory syndrome coronavirus 2
GLHLLIGLAK

SEQ ID NO: 5195 - protein, 10 aa, Severe acute respiratory syndrome-related coronavirus
  REGION 1..10: note = Table A: HLA-B*27:05H HLA-C*07:01H
  source 1..10: note = Severe acute respiratory syndrome coronavirus 2
KRFKESPFEL

SEQ ID NO: 5196 - protein, 10 aa, Severe acute respiratory syndrome-related coronavirus
  REGION 1..10: note = Table A: HLA-B*44:05H HLA-B*44:03H
  source 1..10: note = Severe acute respiratory syndrome coronavirus 2
KESPFELEDF

SEQ ID NO: 5197 - protein, 10 aa, Severe acute respiratory syndrome-related coronavirus
  REGION 1..10: note = Table A: HLA-B*53:01M HLA-C*15:05H HLA-B*35:01M HLA-B*35:08H HLA-B*35:07M HLA-B*38:02H HLA-B*07:04H HLA-B*07:05H HLA-B*15:11M
  source 1..10: note = Severe acute respiratory syndrome coronavirus 2
IPMDSTVKNY

SEQ ID NO: 5198 - protein, 10 aa, Severe acute respiratory syndrome-related coronavirus
  REGION 1..10: note = Table A: HLA-B*55:01H HLA-A*02:03H
  source 1..10: note = Severe acute respiratory syndrome coronavirus 2
TVKNYFITDA

SEQ ID NO: 5199 - protein, 10 aa, Severe acute respiratory syndrome-related coronavirus
  REGION 1..10: note = Table A: HLA-B*27:02H
  source 1..10: note = Severe acute respiratory syndrome coronavirus 2
YFITDAQTGS

SEQ ID NO: 5200 - protein, 10 aa, Severe acute respiratory syndrome-related coronavirus
  REGION 1..10: note = Table A: HLA-A*03:01M HLA-A*03:02M HLA-A*11:01H HLA-A*36:01M HLA-A*34:02H
  source 1..10: note = Severe acute respiratory syndrome coronavirus 2
ITDAQTGSSK

SEQ ID NO: 5201 - protein, 10 aa, Severe acute respiratory syndrome-related coronavirus
  REGION 1..10: note = Table A: HLA-A*26:01H HLA-A*26:02M HLA-B*35:01H
  source 1..10: note = Severe acute respiratory syndrome coronavirus 2
SVIDLLLDDF

SEQ ID NO: 5202 - protein, 10 aa, Severe acute respiratory syndrome-related coronavirus
  REGION 1..10: note = Table A: HLA-A*36:01H
  source 1..10: note = Severe acute respiratory syndrome coronavirus 2
LLDDFVEIIK

SEQ ID NO: 5203 - protein, 10 aa, Severe acute respiratory syndrome-related coronavirus
  REGION 1..10: note = Table A: HLA-A*68:02H
  source 1..10: note = Severe acute respiratory syndrome coronavirus 2
FVEIIKSQDL

SEQ ID NO: 5204 - protein, 10 aa, Severe acute respiratory syndrome-related coronavirus
  REGION 1..10: note = Table A: HLA-A*68:02H
  source 1..10: note = Severe acute respiratory syndrome coronavirus 2
EIIKSQDLSV

SEQ ID NO: 5205 - protein, 10 aa, Severe acute respiratory syndrome-related coronavirus
  REGION 1..10: note = Table A: HLA-A*02:03H
  source 1..10: note = Severe acute respiratory syndrome coronavirus 2
IIKSQDLSVV

SEQ ID NO: 5206 - protein, 10 aa, Severe acute respiratory syndrome-related coronavirus
  REGION 1..10: note = Table A: HLA-A*11:303M HLA-A*74:01H HLA-A*03:01M HLA-A*03:02H HLA-A*11:01H HLA-A*11:02H HLA-A*36:01H HLA-A*30:01H HLA-A*30:02H HLA-A*68:01H HLA-C*07:27M HLA-A*31:01H HLA-B*57:03H
  source 1..10: note = Severe acute respiratory syndrome coronavirus 2
KSQDLSVVSK

SEQ ID NO: 5207 - protein, 10 aa, Severe acute respiratory syndrome-related coronavirus
  REGION 1..10: note = Table A: HLA-B*38:02H
  source 1..10: note = Severe acute respiratory syndrome coronavirus 2
SQDLSVVSKV

SEQ ID NO: 5208 - protein, 10 aa, Severe acute respiratory syndrome-related coronavirus
  REGION 1..10: note = Table A: HLA-A*68:01H HLA-A*34:02H
  source 1..10: note = Severe acute respiratory syndrome coronavirus 2
DLSVVSKVVK

SEQ ID NO: 5209 - protein, 10 aa, Severe acute respiratory syndrome-related coronavirus
  REGION 1..10: note = Table A: HLA-A*68:02H HLA-B*57:03M HLA-B*13:02H
  source 1..10: note = Severe acute respiratory syndrome coronavirus 2
VVSKVVKVTI

SEQ ID NO: 5210 - protein, 10 aa, Severe acute respiratory syndrome-related coronavirus
  REGION 1..10: note = Table A: HLA-B*15:03H
  source 1..10: note = Severe acute respiratory syndrome coronavirus 2
SKVVKVTIDY

SEQ ID NO: 5211 - protein, 10 aa, Severe acute respiratory syndrome-related coronavirus
  REGION 1..10: note = Table A: HLA-A*02:08M
  source 1..10: note = Severe acute respiratory syndrome coronavirus 2
KVVKVTIDYT

SEQ ID NO: 5212 - protein, 10 aa, Severe acute respiratory syndrome-related coronavirus
  REGION 1..10: note = Table A: HLA-B*57:01H HLA-B*46:01H HLA-B*57:03M
  source 1..10: note = Severe acute respiratory syndrome coronavirus 2
VTIDYTEISF

SEQ ID NO: 5213 - protein, 10 aa, Severe acute respiratory syndrome-related coronavirus
  REGION 1..10: note = Table A: HLA-C*04:03H
  source 1..10: note = Severe acute respiratory syndrome coronavirus 2
TIDYTEISFM

SEQ ID NO: 5214 - protein, 10 aa, Severe acute respiratory syndrome-related coronavirus
  REGION 1..10: note = Table A: HLA-A*24:02H HLA-A*24:07M HLA-A*23:01H
  source 1..10: note = Severe acute respiratory syndrome coronavirus 2
DYTEISFMLW

SEQ ID NO: 5215 - protein, 10 aa, Severe acute respiratory syndrome-related coronavirus
  REGION 1..10: note = Table A: HLA-A*25:01H HLA-B*46:01H HLA-C*12:02H
  source 1..10: note = Severe acute respiratory syndrome coronavirus 2
WCKDGHVETF

SEQ ID NO: 5216 - protein, 10 aa, Severe acute respiratory syndrome-related coronavirus
  REGION 1..10: note = Table A: HLA-B*38:01H HLA-B*38:02M HLA-B*15:10H
  source 1..10: note = Severe acute respiratory syndrome coronavirus 2
GHVETFYPKL

SEQ ID NO: 5217 - protein, 10 aa, Severe acute respiratory syndrome-related coronavirus
  REGION 1..10: note = Table A: HLA-A*26:03H HLA-A*68:02H HLA-A*34:02H
  source 1..10: note = Severe acute respiratory syndrome coronavirus 2
ETFYPKLQSS

SEQ ID NO: 5218 - protein, 10 aa, Severe acute respiratory syndrome-related coronavirus
  REGION 1..10: note = Table A: HLA-B*53:01M HLA-B*35:07H HLA-B*07:04H
  source 1..10: note = Severe acute respiratory syndrome coronavirus 2
YPKLQSSQAW

SEQ ID NO: 5219 - protein, 10 aa, Severe acute respiratory syndrome-related coronavirus
  REGION 1..10: note = Table A: HLA-B*38:02H HLA-B*15:01M HLA-B*15:02H HLA-B*39:01H
  source 1..10: note = Severe acute respiratory syndrome coronavirus 2
SQAWQPGVAM

SEQ ID NO: 5220 - protein, 10 aa, Severe acute respiratory syndrome-related coronavirus
  REGION 1..10: note = Table A: HLA-B*35:01H
  source 1..10: note = Severe acute respiratory syndrome coronavirus 2
QPGVAMPNLY

SEQ ID NO: 5221 - protein, 10 aa, Severe acute respiratory syndrome-related coronavirus
  REGION 1..10: note = Table A: HLA-A*74:01H
  source 1..10: note = Severe acute respiratory syndrome coronavirus 2
AMPNLYKMQR

SEQ ID NO: 5222 - protein, 10 aa, Severe acute respiratory syndrome-related coronavirus
  REGION 1..10: note = Table A: HLA-A*02:11M HLA-A*68:02H HLA-A*02:05H HLA-A*02:06H HLA-A*02:07M HLA-A*02:01H HLA-A*02:02M HLA-A*02:03H HLA-B*13:02H
  source 1..10: note = Severe acute respiratory syndrome coronavirus 2
TLPKGIMMNV

SEQ ID NO: 5223 - protein, 10 aa, Severe acute respiratory syndrome-related coronavirus
  REGION 1..10: note = Table A: HLA-B*56:01M HLA-B*55:02M HLA-B*55:01M HLA-B*54:01H
  source 1..10: note = Severe acute respiratory syndrome coronavirus 2
LPKGIMMNVA

SEQ ID NO: 5224 - protein, 10 aa, Severe acute respiratory syndrome-related coronavirus
  REGION 1..10: note = Table A: HLA-A*30:02H
  source 1..10: note = Severe acute respiratory syndrome coronavirus 2
KGIMMNVAKY

SEQ ID NO: 5225 - protein, 10 aa, Severe acute respiratory syndrome-related coronavirus
  REGION 1..10: note = Table A: HLA-B*08:01H HLA-A*02:02H
  source 1..10: note = Severe acute respiratory syndrome coronavirus 2
MMNVAKYTQL

SEQ ID NO: 5226 - protein, 10 aa, Severe acute respiratory syndrome-related coronavirus
  REGION 1..10: note = Table A: HLA-B*38:02H
  source 1..10: note = Severe acute respiratory syndrome coronavirus 2
TQLCQYLNTL

SEQ ID NO: 5227 - protein, 10 aa, Severe acute respiratory syndrome-related coronavirus
  REGION 1..10: note = Table A: HLA-B*42:01H HLA-B*08:01M HLA-B*53:01H HLA-C*15:05H HLA-B*14:02H HLA-B*51:01H HLA-B*35:07H HLA-B*07:02H HLA-B*07:04M
  source 1..10: note = Severe acute respiratory syndrome coronavirus 2
VPYNMRVIHF

SEQ ID NO: 5228 - protein, 10 aa, Severe acute respiratory syndrome-related coronavirus
  REGION 1..10: note = Table A: HLA-A*03:01H HLA-A*03:02H HLA-A*36:01H HLA-A*30:02H
  source 1..10: note = Severe acute respiratory syndrome coronavirus 2
VIHFGAGSDK

SEQ ID NO: 5229 - protein, 10 aa, Severe acute respiratory syndrome-related coronavirus
  REGION 1..10: note = Table A: HLA-B*38:02H
  source 1..10: note = Severe acute respiratory syndrome coronavirus 2
IHFGAGSDKG

SEQ ID NO: 5230 - protein, 10 aa, Severe acute respiratory syndrome-related coronavirus
  REGION 1..10: note = Table A: HLA-C*08:03H
  source 1..10: note = Severe acute respiratory syndrome coronavirus 2
KGVAPGTAVL

SEQ ID NO: 5231 - protein, 10 aa, Severe acute respiratory syndrome-related coronavirus
  REGION 1..10: note = Table A: HLA-A*11:303H HLA-A*74:01M HLA-A*03:01H HLA-A*03:02M HLA-A*11:01M HLA-A*11:02M HLA-A*26:03M HLA-B*27:02H HLA-A*68:01H HLA-A*68:02H HLA-A*02:05H HLA-A*02:08H HLA-A*34:01M HLA-A*34:02M HLA-C*07:27H
  REGION 1..10: note = CONT. FROM ABOVE: HLA-A*31:01H HLA-A*66:01M
  source 1..10: note = Severe acute respiratory syndrome coronavirus 2
GVAPGTAVLR

SEQ ID NO: 5232 - protein, 10 aa, Severe acute respiratory syndrome-related coronavirus
  REGION 1..10: note = Table A: HLA-B*07:04H
  source 1..10: note = Severe acute respiratory syndrome coronavirus 2
APGTAVLRQW

SEQ ID NO: 5233 - protein, 10 aa, Severe acute respiratory syndrome-related coronavirus
  REGION 1..10: note = Table A: HLA-B*48:01H HLA-A*74:01H HLA-A*02:11H HLA-B*15:03H HLA-B*13:01M HLA-B*13:02H
  source 1..10: note = Severe acute respiratory syndrome coronavirus 2
RQWLPTGTLL

SEQ ID NO: 5234 - protein, 10 aa, Severe acute respiratory syndrome-related coronavirus
  REGION 1..10: note = Table A: HLA-A*68:02H HLA-A*02:05H HLA-B*38:02H
  source 1..10: note = Severe acute respiratory syndrome coronavirus 2
FVSDADSTLI

SEQ ID NO: 5235 - protein, 10 aa, Severe acute respiratory syndrome-related coronavirus
  REGION 1..10: note = Table A: HLA-A*34:02H
  source 1..10: note = Severe acute respiratory syndrome coronavirus 2
DCATVHTANK

SEQ ID NO: 5236 - protein, 10 aa, Severe acute respiratory syndrome-related coronavirus
  REGION 1..10: note = Table A: HLA-B*38:02H
  source 1..10: note = Severe acute respiratory syndrome coronavirus 2
VHTANKWDLI

SEQ ID NO: 5237 - protein, 10 aa, Severe acute respiratory syndrome-related coronavirus
  REGION 1..10: note = Table A: HLA-A*36:01M
  source 1..10: note = Severe acute respiratory syndrome coronavirus 2
KWDLIISDMY

SEQ ID NO: 5238 - protein, 10 aa, Severe acute respiratory syndrome-related coronavirus
  REGION 1..10: note = Table A: HLA-A*36:01H HLA-B*27:02H
  source 1..10: note = Severe acute respiratory syndrome coronavirus 2
LIISDMYDPK

SEQ ID NO: 5239 - protein, 10 aa, Severe acute respiratory syndrome-related coronavirus
  REGION 1..10: note = Table A: HLA-A*36:01H
  source 1..10: note = Severe acute respiratory syndrome coronavirus 2
ISDMYDPKTK

SEQ ID NO: 5240 - protein, 10 aa, Severe acute respiratory syndrome-related coronavirus
  REGION 1..10: note = Table A: HLA-A*02:11M HLA-A*68:02H HLA-A*02:02H HLA-A*02:03H HLA-B*38:02H
  source 1..10: note = Severe acute respiratory syndrome coronavirus 2
DMYDPKTKNV

SEQ ID NO: 5241 - protein, 10 aa, Severe acute respiratory syndrome-related coronavirus
  REGION 1..10: note = Table A: HLA-A*68:02H
  source 1..10: note = Severe acute respiratory syndrome coronavirus 2
DSKEGFFTYI

SEQ ID NO: 5242 - protein, 10 aa, Severe acute respiratory syndrome-related coronavirus
  REGION 1..10: note = Table A: HLA-A*68:02H HLA-A*02:02H
  source 1..10: note = Severe acute respiratory syndrome coronavirus 2
YICGFIQQKL

SEQ ID NO: 5243 - protein, 10 aa, Severe acute respiratory syndrome-related coronavirus
  REGION 1..10: note = Table A: HLA-B*13:02H
  source 1..10: note = Severe acute respiratory syndrome coronavirus 2
KLALGGSVAI

SEQ ID NO: 5244 - protein, 10 aa, Severe acute respiratory syndrome-related coronavirus
  REGION 1..10: note = Table A: HLA-A*34:02H
  source 1..10: note = Severe acute respiratory syndrome coronavirus 2
LALGGSVAIK

SEQ ID NO: 5245 - protein, 10 aa, Severe acute respiratory syndrome-related coronavirus
  REGION 1..10: note = Table A: HLA-B*13:02H
  source 1..10: note = Severe acute respiratory syndrome coronavirus 2
ALGGSVAIKI

SEQ ID NO: 5246 - protein, 10 aa, Severe acute respiratory syndrome-related coronavirus
  REGION 1..10: note = Table A: HLA-B*58:01H HLA-B*58:02H HLA-B*57:01H HLA-A*25:01H HLA-B*44:03H HLA-B*53:01M HLA-A*23:01H HLA-B*57:03H HLA-B*13:01H
  source 1..10: note = Severe acute respiratory syndrome coronavirus 2
VAIKITEHSW

SEQ ID NO: 5247 - protein, 10 aa, Severe acute respiratory syndrome-related coronavirus
  REGION 1..10: note = Table A: HLA-B*44:03H HLA-B*18:01H
  source 1..10: note = Severe acute respiratory syndrome coronavirus 2
TEHSWNADLY

SEQ ID NO: 5248 - protein, 10 aa, Severe acute respiratory syndrome-related coronavirus
  REGION 1..10: note = Table A: HLA-B*58:02H HLA-A*68:02H HLA-B*57:03H
  source 1..10: note = Severe acute respiratory syndrome coronavirus 2
HSWNADLYKL

SEQ ID NO: 5249 - protein, 10 aa, Severe acute respiratory syndrome-related coronavirus
  REGION 1..10: note = Table A: HLA-A*68:02H HLA-A*02:08H
  source 1..10: note = Severe acute respiratory syndrome coronavirus 2
WTAFVTNVNA

SEQ ID NO: 5250 - protein, 10 aa, Severe acute respiratory syndrome-related coronavirus
  REGION 1..10: note = Table A: HLA-B*35:01H HLA-B*15:02H
  source 1..10: note = Severe acute respiratory syndrome coronavirus 2
NVNASSSEAF

SEQ ID NO: 5251 - protein, 10 aa, Severe acute respiratory syndrome-related coronavirus
  REGION 1..10: note = Table A: HLA-A*68:02H
  source 1..10: note = Severe acute respiratory syndrome coronavirus 2
SSSEAFLIGC

SEQ ID NO: 5252 - protein, 10 aa, Severe acute respiratory syndrome-related coronavirus
  REGION 1..10: note = Table A: HLA-B*44:02M HLA-B*44:05H HLA-C*16:04H HLA-B*44:03H HLA-B*18:01M HLA-B*07:05M
  source 1..10: note = Severe acute respiratory syndrome coronavirus 2
SEAFLIGCNY

SEQ ID NO: 5253 - protein, 10 aa, Severe acute respiratory syndrome-related coronavirus
  REGION 1..10: note = Table A: HLA-A*68:01H HLA-A*68:02M HLA-A*34:01H HLA-A*66:01H
  source 1..10: note = Severe acute respiratory syndrome coronavirus 2
EAFLIGCNYL

SEQ ID NO: 5254 - protein, 10 aa, Severe acute respiratory syndrome-related coronavirus
  REGION 1..10: note = Table A: HLA-B*15:03M
  source 1..10: note = Severe acute respiratory syndrome coronavirus 2
GKPREQIDGY

SEQ ID NO: 5255 - protein, 10 aa, Severe acute respiratory syndrome-related coronavirus
  REGION 1..10: note = Table A: HLA-A*26:03H HLA-A*68:02H HLA-A*02:05H HLA-A*02:06H HLA-A*02:08H HLA-B*38:02H
  source 1..10: note = Severe acute respiratory syndrome coronavirus 2
EQIDGYVMHA

SEQ ID NO: 5256 - protein, 10 aa, Severe acute respiratory syndrome-related coronavirus
  REGION 1..10: note = Table A: HLA-B*51:01M
  source 1..10: note = Severe acute respiratory syndrome coronavirus 2
DGYVMHANYI

SEQ ID NO: 5257 - protein, 10 aa, Severe acute respiratory syndrome-related coronavirus
  REGION 1..10: note = Table A: HLA-A*25:01H
  source 1..10: note = Severe acute respiratory syndrome coronavirus 2
YVMHANYIFW

SEQ ID NO: 5258 - protein, 10 aa, Severe acute respiratory syndrome-related coronavirus
  REGION 1..10: note = Table A: HLA-A*74:01H
  source 1..10: note = Severe acute respiratory syndrome coronavirus 2
VMHANYIFWR

SEQ ID NO: 5259 - protein, 10 aa, Severe acute respiratory syndrome-related coronavirus
  REGION 1..10: note = Table A: HLA-C*14:03H
  source 1..10: note = Severe acute respiratory syndrome coronavirus 2
FWRNTNPIQL

SEQ ID NO: 5260 - protein, 10 aa, Severe acute respiratory syndrome-related coronavirus
  REGION 1..10: note = Table A: HLA-A*25:01H HLA-B*46:01H HLA-A*26:01H HLA-A*29:02H HLA-A*30:02M HLA-A*34:02H HLA-B*35:01H HLA-B*38:02H HLA-B*15:01H HLA-B*07:05H
  source 1..10: note = Severe acute respiratory syndrome coronavirus 2
NTNPIQLSSY

SEQ ID NO: 5261 - protein, 10 aa, Severe acute respiratory syndrome-related coronavirus
  REGION 1..10: note = Table A: HLA-B*35:03M HLA-C*15:05M HLA-B*35:01H HLA-B*07:05M
  source 1..10: note = Severe acute respiratory syndrome coronavirus 2
NPIQLSSYSL

SEQ ID NO: 5262 - protein, 10 aa, Severe acute respiratory syndrome-related coronavirus
  REGION 1..10: note = Table A: HLA-A*03:02H HLA-A*11:01M HLA-A*11:02M HLA-A*34:02H HLA-C*07:27H
  source 1..10: note = Severe acute respiratory syndrome coronavirus 2
SSYSLFDMSK

SEQ ID NO: 5263 - protein, 10 aa, Severe acute respiratory syndrome-related coronavirus
  REGION 1..10: note = Table A: HLA-A*24:02H HLA-A*24:07H
  source 1..10: note = Severe acute respiratory syndrome coronavirus 2
SYSLFDMSKF

SEQ ID NO: 5264 - protein, 10 aa, Severe acute respiratory syndrome-related coronavirus
  REGION 1..10: note = Table A: HLA-A*74:01H HLA-A*02:11M HLA-A*68:02H HLA-A*02:04M HLA-A*02:07H HLA-A*02:01H HLA-A*02:02H HLA-A*02:03H HLA-C*08:03H
  source 1..10: note = Severe acute respiratory syndrome coronavirus 2
SLFDMSKFPL

SEQ ID NO: 5265 - protein, 10 aa, Severe acute respiratory syndrome-related coronavirus
  REGION 1..10: note = Table A: HLA-A*36:01H
  source 1..10: note = Severe acute respiratory syndrome coronavirus 2
LFDMSKFPLK

SEQ ID NO: 5266 - protein, 10 aa, Severe acute respiratory syndrome-related coronavirus
  REGION 1..10: note = Table A: HLA-A*33:01M HLA-A*33:03M HLA-A*26:03H HLA-A*34:01M HLA-A*34:02H HLA-A*66:01M
  source 1..10: note = Severe acute respiratory syndrome coronavirus 2
DMSKFPLKLR

SEQ ID NO: 5267 - protein, 10 aa, Severe acute respiratory syndrome-related coronavirus
  REGION 1..10: note = Table A: HLA-B*55:02H HLA-C*15:05H HLA-B*54:01H HLA-B*07:04H
  source 1..10: note = Severe acute respiratory syndrome coronavirus 2
FPLKLRGTAV

SEQ ID NO: 5268 - protein, 10 aa, Severe acute respiratory syndrome-related coronavirus
  REGION 1..10: note = Table A: HLA-B*07:04H
  source 1..10: note = Severe acute respiratory syndrome coronavirus 2
KLRGTAVMSL

SEQ ID NO: 5269 - protein, 10 aa, Severe acute respiratory syndrome-related coronavirus
  REGION 1..10: note = Table A: HLA-A*26:02H HLA-A*02:02M HLA-A*02:03M HLA-B*38:02M HLA-B*15:02H
  source 1..10: note = Severe acute respiratory syndrome coronavirus 2
SLKEGQINDM

SEQ ID NO: 5270 - protein, 10 aa, Severe acute respiratory syndrome-related coronavirus
  REGION 1..10: note = Table A: HLA-B*44:05H HLA-B*40:01M HLA-B*40:02M HLA-B*40:06H HLA-B*41:02H
  source 1..10: note = Severe acute respiratory syndrome coronavirus 2
KEGQINDMIL

SEQ ID NO: 5271 - protein, 10 aa, Severe acute respiratory syndrome-related coronavirus
  REGION 1..10: note = Table A: HLA-B*48:01H HLA-A*02:04H HLA-A*02:05H HLA-A*02:06H HLA-B*15:01H HLA-B*13:01H HLA-B*13:02M
  source 1..10: note = Severe acute respiratory syndrome coronavirus 2
GQINDMILSL

SEQ ID NO: 5272 - protein, 10 aa, Severe acute respiratory syndrome-related coronavirus
  REGION 1..10: note = Table A: HLA-A*02:04H
  source 1..10: note = Severe acute respiratory syndrome coronavirus 2
QINDMILSLL

SEQ ID NO: 5273 - protein, 10 aa, Severe acute respiratory syndrome-related coronavirus
  REGION 1..10: note = Table A: HLA-B*07:04H
  source 1..10: note = Severe acute respiratory syndrome coronavirus 2
IIRENNRVVI

SEQ ID NO: 5274 - protein, 10 aa, Severe acute respiratory syndrome-related coronavirus
  REGION 1..10: note = Table A: HLA-B*14:02H HLA-B*38:02H HLA-B*39:01M
  source 1..10: note = Severe acute respiratory syndrome coronavirus 2
NRVVISSDVL

SEQ ID NO: 5275 - protein, 11 aa, Severe acute respiratory syndrome-related coronavirus
  REGION 1..11: note = Table A: HLA-A*02:11H HLA-A*68:02H HLA-A*02:07H
  source 1..11: note = Severe acute respiratory syndrome coronavirus 2
LVPGFNEKTHV

SEQ ID NO: 5276 - protein, 11 aa, Severe acute respiratory syndrome-related coronavirus
  REGION 1..11: note = Table A: HLA-B*57:03M
  source 1..11: note = Severe acute respiratory syndrome coronavirus 2
KTHVQLSLPVL

SEQ ID NO: 5277 - protein, 11 aa, Severe acute respiratory syndrome-related coronavirus
  REGION 1..11: note = Table A: HLA-B*13:01H
  source 1..11: note = Severe acute respiratory syndrome coronavirus 2
RGFGDSVEEVL

SEQ ID NO: 5278 - protein, 11 aa, Severe acute respiratory syndrome-related coronavirus
  REGION 1..11: note = Table A: HLA-B*27:02H HLA-A*68:01H
  source 1..11: note = Severe acute respiratory syndrome coronavirus 2
DSVEEVLSEAR

SEQ ID NO: 5279 - protein, 11 aa, Severe acute respiratory syndrome-related coronavirus
  REGION 1..11: note = Table A: HLA-B*44:05H HLA-B*44:03H
  source 1..11: note = Severe acute respiratory syndrome coronavirus 2
EEVLSEARQHL

SEQ ID NO: 5280 - protein, 11 aa, Severe acute respiratory syndrome-related coronavirus
  REGION 1..11: note = Table A: HLA-A*33:03H HLA-A*34:02M
  source 1..11: note = Severe acute respiratory syndrome coronavirus 2
EVLSEARQHLK

SEQ ID NO: 5281 - protein, 11 aa, Severe acute respiratory syndrome-related coronavirus
  REGION 1..11: note = Table A: HLA-B*44:05H HLA-B*40:01H HLA-B*40:02M HLA-B*40:06H HLA-B*41:02H
  source 1..11: note = Severe acute respiratory syndrome coronavirus 2
VEVEKGVLPQL

SEQ ID NO: 5282 - protein, 11 aa, Severe acute respiratory syndrome-related coronavirus
  REGION 1..11: note = Table A: HLA-A*02:04H HLA-A*02:06H
  source 1..11: note = Severe acute respiratory syndrome coronavirus 2
GVLPQLEQPYV

SEQ ID NO: 5283 - protein, 11 aa, Severe acute respiratory syndrome-related coronavirus
  REGION 1..11: note = Table A: HLA-A*24:07M
  source 1..11: note = Severe acute respiratory syndrome coronavirus 2
VLPQLEQPYVF

SEQ ID NO: 5284 - protein, 11 aa, Severe acute respiratory syndrome-related coronavirus
  REGION 1..11: note = Table A: HLA-A*74:01H
  source 1..11: note = Severe acute respiratory syndrome coronavirus 2
QLEQPYVFIKR

SEQ ID NO: 5285 - protein, 11 aa, Severe acute respiratory syndrome-related coronavirus
  REGION 1..11: note = Table A: HLA-B*56:01H HLA-B*55:02H HLA-B*55:01H HLA-B*54:01H
  source 1..11: note = Severe acute respiratory syndrome coronavirus 2
QPYVFIKRSDA

SEQ ID NO: 5286 - protein, 11 aa, Severe acute respiratory syndrome-related coronavirus
  REGION 1..11: note = Table A: HLA-C*04:03H HLA-C*08:01H
  source 1..11: note = Severe acute respiratory syndrome coronavirus 2
TAPHGHVMVEL

SEQ ID NO: 5287 - protein, 11 aa, Severe acute respiratory syndrome-related coronavirus
  REGION 1..11: note = Table A: HLA-B*38:02H
  source 1..11: note = Severe acute respiratory syndrome coronavirus 2
GHVMVELVAEL

SEQ ID NO: 5288 - protein, 11 aa, Severe acute respiratory syndrome-related coronavirus
  REGION 1..11: note = Table A: HLA-A*26:01H HLA-B*35:01H HLA-B*38:02H
  source 1..11: note = Severe acute respiratory syndrome coronavirus 2
ELVAELEGIQY

SEQ ID NO: 5289 - protein, 11 aa, Severe acute respiratory syndrome-related coronavirus
  REGION 1..11: note = Table A: HLA-A*68:02H
  source 1..11: note = Severe acute respiratory syndrome coronavirus 2
LVAELEGIQYG

SEQ ID NO: 5290 - protein, 11 aa, Severe acute respiratory syndrome-related coronavirus
  REGION 1..11: note = Table A: HLA-A*02:01H HLA-A*02:02H
  source 1..11: note = Severe acute respiratory syndrome coronavirus 2
VLVPHVGEIPV

SEQ ID NO: 5291 - protein, 11 aa, Severe acute respiratory syndrome-related coronavirus
  REGION 1..11: note = Table A: HLA-A*02:11H HLA-A*02:05H HLA-A*02:07H HLA-A*02:08H
  source 1..11: note = Severe acute respiratory syndrome coronavirus 2
LVPHVGEIPVA

SEQ ID NO: 5292 - protein, 11 aa, Severe acute respiratory syndrome-related coronavirus
  REGION 1..11: note = Table A: HLA-B*56:01M HLA-B*53:01H HLA-B*55:02M HLA-C*15:05H HLA-B*35:01H HLA-B*35:08M HLA-B*35:07M HLA-B*38:02H HLA-B*54:01M HLA-B*15:02H HLA-B*07:05H HLA-B*15:11H
  source 1..11: note = Severe acute respiratory syndrome coronavirus 2
VPHVGEIPVAY

SEQ ID NO: 5293 - protein, 11 aa, Severe acute respiratory syndrome-related coronavirus
  REGION 1..11: note = Table A: HLA-B*40:02H
  source 1..11: note = Severe acute respiratory syndrome coronavirus 2
GEIPVAYRKVL

SEQ ID NO: 5294 - protein, 11 aa, Severe acute respiratory syndrome-related coronavirus
  REGION 1..11: note = Table A: HLA-A*30:02M
  source 1..11: note = Severe acute respiratory syndrome coronavirus 2
NGNKGAGGHSY

SEQ ID NO: 5295 - protein, 11 aa, Severe acute respiratory syndrome-related coronavirus
  REGION 1..11: note = Table A: HLA-B*38:02H
  source 1..11: note = Severe acute respiratory syndrome coronavirus 2
GHSYGADLKSF

SEQ ID NO: 5296 - protein, 11 aa, Severe acute respiratory syndrome-related coronavirus
  REGION 1..11: note = Table A: HLA-B*38:02H
  source 1..11: note = Severe acute respiratory syndrome coronavirus 2
KHSSGVTRELM

SEQ ID NO: 5297 - protein, 11 aa, Severe acute respiratory syndrome-related coronavirus
  REGION 1..11: note = Table A: HLA-A*36:01H HLA-A*25:01H HLA-A*26:01M HLA-A*26:02H HLA-A*26:03H HLA-A*30:02H HLA-B*35:01H HLA-B*38:02H HLA-B*15:02H HLA-B*39:01H
  source 1..11: note = Severe acute respiratory syndrome coronavirus 2
ELMRELNGGAY

SEQ ID NO: 5298 - protein, 11 aa, Severe acute respiratory syndrome-related coronavirus
  REGION 1..11: note = Table A: HLA-A*02:11H
  source 1..11: note = Severe acute respiratory syndrome coronavirus 2
LMRELNGGAYT

SEQ ID NO: 5299 - protein, 11 aa, Severe acute respiratory syndrome-related coronavirus
  REGION 1..11: note = Table A: HLA-B*44:02H HLA-A*36:01H HLA-B*44:03H HLA-A*30:02M
  source 1..11: note = Severe acute respiratory syndrome coronavirus 2
RELNGGAYTRY

SEQ ID NO: 5300 - protein, 11 aa, Severe acute respiratory syndrome-related coronavirus
  REGION 1..11: note = Table A: HLA-B*54:01H
  source 1..11: note = Severe acute respiratory syndrome coronavirus 2
YPLECIKDLLA

SEQ ID NO: 5301 - protein, 11 aa, Severe acute respiratory syndrome-related coronavirus
  REGION 1..11: note = Table A: HLA-A*02:11M HLA-A*02:07H
  source 1..11: note = Severe acute respiratory syndrome coronavirus 2
QLDFIDTKRGV

SEQ ID NO: 5302 - protein, 11 aa, Severe acute respiratory syndrome-related coronavirus
  REGION 1..11: note = Table A: HLA-B*40:06H
  source 1..11: note = Severe acute respiratory syndrome coronavirus 2
REHEHEIAWYT

SEQ ID NO: 5303 - protein, 11 aa, Severe acute respiratory syndrome-related coronavirus
  REGION 1..11: note = Table A: HLA-A*34:02H
  source 1..11: note = Severe acute respiratory syndrome coronavirus 2
EIAWYTERSEK

SEQ ID NO: 5304 - protein, 11 aa, Severe acute respiratory syndrome-related coronavirus
  REGION 1..11: note = Table A: HLA-A*30:02H
  source 1..11: note = Severe acute respiratory syndrome coronavirus 2
AWYTERSEKSY

SEQ ID NO: 5305 - protein, 11 aa, Severe acute respiratory syndrome-related coronavirus
  REGION 1..11: note = Table A: HLA-B*58:02M HLA-A*02:11H HLA-C*15:02H HLA-B*57:03M HLA-B*13:02H
  source 1..11: note = Severe acute respiratory syndrome coronavirus 2
KSYELQTPFEI

SEQ ID NO: 5306 - protein, 11 aa, Severe acute respiratory syndrome-related coronavirus
  REGION 1..11: note = Table A: HLA-B*40:01H HLA-B*40:02H
  source 1..11: note = Severe acute respiratory syndrome coronavirus 2
YELQTPFEIKL

SEQ ID NO: 5307 - protein, 11 aa, Severe acute respiratory syndrome-related coronavirus
  REGION 1..11: note = Table A: HLA-A*34:02H
  source 1..11: note = Severe acute respiratory syndrome coronavirus 2
QTPFEIKLAKK

SEQ ID NO: 5308 - protein, 11 aa, Severe acute respiratory syndrome-related coronavirus
  REGION 1..11: note = Table A: HLA-B*07:04H
  source 1..11: note = Severe acute respiratory syndrome coronavirus 2
TPFEIKLAKKF

SEQ ID NO: 5309 - protein, 11 aa, Severe acute respiratory syndrome-related coronavirus
  REGION 1..11: note = Table A: HLA-A*68:02H
  source 1..11: note = Severe acute respiratory syndrome coronavirus 2
DTFNGECPNFV

SEQ ID NO: 5310 - protein, 11 aa, Severe acute respiratory syndrome-related coronavirus
  REGION 1..11: note = Table A: HLA-A*02:11H HLA-A*02:05H
  source 1..11: note = Severe acute respiratory syndrome coronavirus 2
FVFPLNSIIKT

SEQ ID NO: 5311 - protein, 11 aa, Severe acute respiratory syndrome-related coronavirus
  REGION 1..11: note = Table A: HLA-A*24:07M HLA-A*23:01H
  source 1..11: note = Severe acute respiratory syndrome coronavirus 2
VFPLNSIIKTI

SEQ ID NO: 5312 - protein, 11 aa, Severe acute respiratory syndrome-related coronavirus
  REGION 1..11: note = Table A: HLA-A*30:01H
  source 1..11: note = Severe acute respiratory syndrome coronavirus 2
IIKTIQPRVEK

SEQ ID NO: 5313 - protein, 11 aa, Severe acute respiratory syndrome-related coronavirus
  REGION 1..11: note = Table A: HLA-A*02:11H HLA-A*02:08H HLA-A*02:03H
  source 1..11: note = Severe acute respiratory syndrome coronavirus 2
SVYPVASPNEC

SEQ ID NO: 5314 - protein, 11 aa, Severe acute respiratory syndrome-related coronavirus
  REGION 1..11: note = Table A: HLA-B*49:01H
  source 1..11: note = Severe acute respiratory syndrome coronavirus 2
GETSWQTGDFV

SEQ ID NO: 5315 - protein, 11 aa, Severe acute respiratory syndrome-related coronavirus
  REGION 1..11: note = Table A: HLA-A*36:01H HLA-A*68:01H HLA-A*68:02H HLA-A*34:02M
  source 1..11: note = Severe acute respiratory syndrome coronavirus 2
ETSWQTGDFVK

SEQ ID NO: 5316 - protein, 11 aa, Severe acute respiratory syndrome-related coronavirus
  REGION 1..11: note = Table A: HLA-A*26:01H
  source 1..11: note = Severe acute respiratory syndrome coronavirus 2
LTKEGATTCGY

SEQ ID NO: 5317 - protein, 11 aa, Severe acute respiratory syndrome-related coronavirus
  REGION 1..11: note = Table A: HLA-A*24:02M HLA-A*24:07M HLA-A*23:01M
  source 1..11: note = Severe acute respiratory syndrome coronavirus 2
GYLPQNAVVKI

SEQ ID NO: 5318 - protein, 11 aa, Severe acute respiratory syndrome-related coronavirus
  REGION 1..11: note = Table A: HLA-B*15:02H
  source 1..11: note = Severe acute respiratory syndrome coronavirus 2
YLPQNAVVKIY

SEQ ID NO: 5319 - protein, 11 aa, Severe acute respiratory syndrome-related coronavirus
  REGION 1..11: note = Table A: HLA-B*55:02H
  source 1..11: note = Severe acute respiratory syndrome coronavirus 2
LPQNAVVKIYC

SEQ ID NO: 5320 - protein, 11 aa, Severe acute respiratory syndrome-related coronavirus
  REGION 1..11: note = Table A: HLA-A*68:02H HLA-B*35:03H HLA-B*35:02H HLA-C*08:03H HLA-B*35:12H HLA-B*38:01H HLA-B*38:02H
  source 1..11: note = Severe acute respiratory syndrome coronavirus 2
HNSEVGPEHSL

SEQ ID NO: 5321 - protein, 11 aa, Severe acute respiratory syndrome-related coronavirus
  REGION 1..11: note = Table A: HLA-A*25:01H HLA-A*26:01H HLA-A*26:02H HLA-A*26:03H HLA-A*30:02H HLA-A*34:01M HLA-A*34:02H HLA-B*35:01H HLA-B*38:02H
  source 1..11: note = Severe acute respiratory syndrome coronavirus 2
EVGPEHSLAEY

SEQ ID NO: 5322 - protein, 11 aa, Severe acute respiratory syndrome-related coronavirus
  REGION 1..11: note = Table A: HLA-A*02:02M
  source 1..11: note = Severe acute respiratory syndrome coronavirus 2
SLAEYHNESGL

SEQ ID NO: 5323 - protein, 11 aa, Severe acute respiratory syndrome-related coronavirus
  REGION 1..11: note = Table A: HLA-A*36:01H
  source 1..11: note = Severe acute respiratory syndrome coronavirus 2
LAEYHNESGLK

SEQ ID NO: 5324 - protein, 11 aa, Severe acute respiratory syndrome-related coronavirus
  REGION 1..11: note = Table A: HLA-B*45:01H HLA-B*40:02H HLA-B*49:01H
  source 1..11: note = Severe acute respiratory syndrome coronavirus 2
AEYHNESGLKT

SEQ ID NO: 5325 - protein, 11 aa, Severe acute respiratory syndrome-related coronavirus
  REGION 1..11: note = Table A: HLA-A*33:03H HLA-A*24:02H
  source 1..11: note = Severe acute respiratory syndrome coronavirus 2
EYHNESGLKTI

SEQ ID NO: 5326 - protein, 11 aa, Severe acute respiratory syndrome-related coronavirus
  REGION 1..11: note = Table A: HLA-B*38:01M HLA-B*38:02H HLA-B*39:01M HLA-B*15:10H
  source 1..11: note = Severe acute respiratory syndrome coronavirus 2
YHNESGLKTIL

SEQ ID NO: 5327 - protein, 11 aa, Severe acute respiratory syndrome-related coronavirus
  REGION 1..11: note = Table A: HLA-A*33:01H HLA-A*33:03H HLA-A*68:01H
  source 1..11: note = Severe acute respiratory syndrome coronavirus 2
HNESGLKTILR

SEQ ID NO: 5328 - protein, 11 aa, Severe acute respiratory syndrome-related coronavirus
  REGION 1..11: note = Table A: HLA-B*58:02M
  source 1..11: note = Severe acute respiratory syndrome coronavirus 2
KTILRKGGRTI

SEQ ID NO: 5329 - protein, 11 aa, Severe acute respiratory syndrome-related coronavirus
  REGION 1..11: note = Table A: HLA-B*39:01H
  source 1..11: note = Severe acute respiratory syndrome coronavirus 2
NHTGVVGEGSE

SEQ ID NO: 5330 - protein, 11 aa, Severe acute respiratory syndrome-related coronavirus
  REGION 1..11: note = Table A: HLA-B*40:01H
  source 1..11: note = Severe acute respiratory syndrome coronavirus 2
GEGSEGLNDNL

SEQ ID NO: 5331 - protein, 11 aa, Severe acute respiratory syndrome-related coronavirus
  REGION 1..11: note = Table A: HLA-A*02:11H
  source 1..11: note = Severe acute respiratory syndrome coronavirus 2
NLLEILQKEKV

SEQ ID NO: 5332 - protein, 11 aa, Severe acute respiratory syndrome-related coronavirus
  REGION 1..11: note = Table A: HLA-A*02:11H
  source 1..11: note = Severe acute respiratory syndrome coronavirus 2
ILQKEKVNINI

SEQ ID NO: 5333 - protein, 11 aa, Severe acute respiratory syndrome-related coronavirus
  REGION 1..11: note = Table A: HLA-A*03:02M HLA-A*11:02H HLA-A*36:01H HLA-A*30:02H
  source 1..11: note = Severe acute respiratory syndrome coronavirus 2
KVNINIVGDFK

SEQ ID NO: 5334 - protein, 11 aa, Severe acute respiratory syndrome-related coronavirus
  REGION 1..11: note = Table A: HLA-A*02:11H HLA-A*02:02H
  source 1..11: note = Severe acute respiratory syndrome coronavirus 2
IVGDFKLNEEI

SEQ ID NO: 5335 - protein, 11 aa, Severe acute respiratory syndrome-related coronavirus
  REGION 1..11: note = Table A: HLA-A*02:11H HLA-A*02:04H HLA-A*02:02M
  source 1..11: note = Severe acute respiratory syndrome coronavirus 2
KLNEEIAIILA

SEQ ID NO: 5336 - protein, 11 aa, Severe acute respiratory syndrome-related coronavirus
  REGION 1..11: note = Table A: HLA-B*44:05H
  source 1..11: note = Severe acute respiratory syndrome coronavirus 2
NEEIAIILASF

SEQ ID NO: 5337 - protein, 11 aa, Severe acute respiratory syndrome-related coronavirus
  REGION 1..11: note = Table A: HLA-A*02:02H HLA-A*02:03H
  source 1..11: note = Severe acute respiratory syndrome coronavirus 2
ILASFSASTSA

SEQ ID NO: 5338 - protein, 11 aa, Severe acute respiratory syndrome-related coronavirus
  REGION 1..11: note = Table A: HLA-A*68:02H
  source 1..11: note = Severe acute respiratory syndrome coronavirus 2
FSASTSAFVET

SEQ ID NO: 5339 - protein, 11 aa, Severe acute respiratory syndrome-related coronavirus
  REGION 1..11: note = Table A: HLA-A*68:02H
  source 1..11: note = Severe acute respiratory syndrome coronavirus 2
SASTSAFVETV

SEQ ID NO: 5340 - protein, 11 aa, Severe acute respiratory syndrome-related coronavirus
  REGION 1..11: note = Table A: HLA-A*11:01M HLA-A*11:02H HLA-A*36:01H
  source 1..11: note = Severe acute respiratory syndrome coronavirus 2
ASTSAFVETVK

SEQ ID NO: 5341 - protein, 11 aa, Severe acute respiratory syndrome-related coronavirus
  REGION 1..11: note = Table A: HLA-A*68:02H
  source 1..11: note = Severe acute respiratory syndrome coronavirus 2
TSAFVETVKGL

SEQ ID NO: 5342 - protein, 11 aa, Severe acute respiratory syndrome-related coronavirus
  REGION 1..11: note = Table A: HLA-C*14:02H HLA-C*14:03M HLA-A*36:01H HLA-A*29:01M HLA-A*29:02H HLA-B*44:03H HLA-B*27:02H HLA-A*30:02H
  source 1..11: note = Severe acute respiratory syndrome coronavirus 2
AFVETVKGLDY

SEQ ID NO: 5343 - protein, 11 aa, Severe acute respiratory syndrome-related coronavirus
  REGION 1..11: note = Table A: HLA-A*36:01H HLA-A*34:02H
  source 1..11: note = Severe acute respiratory syndrome coronavirus 2
FVETVKGLDYK

SEQ ID NO: 5344 - protein, 11 aa, Severe acute respiratory syndrome-related coronavirus
  REGION 1..11: note = Table A: HLA-A*25:01H HLA-A*26:01M HLA-A*26:02M HLA-A*26:03M HLA-A*34:01H HLA-A*66:01H
  source 1..11: note = Severe acute respiratory syndrome coronavirus 2
ETVKGLDYKAF

SEQ ID NO: 5345 - protein, 11 aa, Severe acute respiratory syndrome-related coronavirus
  REGION 1..11: note = Table A: HLA-A*74:01H HLA-A*33:03H
  source 1..11: note = Severe acute respiratory syndrome coronavirus 2
TVKGLDYKAFK

SEQ ID NO: 5346 - protein, 11 aa, Severe acute respiratory syndrome-related coronavirus
  REGION 1..11: note = Table A: HLA-B*44:03H
  source 1..11: note = Severe acute respiratory syndrome coronavirus 2
GEQKSILSPLY

SEQ ID NO: 5347 - protein, 11 aa, Severe acute respiratory syndrome-related coronavirus
  REGION 1..11: note = Table A: HLA-B*56:01H HLA-B*55:02M HLA-B*54:01H
  source 1..11: note = Severe acute respiratory syndrome coronavirus 2
SPLYAFASEAA

SEQ ID NO: 5348 - protein, 11 aa, Severe acute respiratory syndrome-related coronavirus
  REGION 1..11: note = Table A: HLA-C*16:01H HLA-A*02:11H HLA-C*03:04H HLA-A*68:02H HLA-C*12:03H HLA-B*54:01H
  source 1..11: note = Severe acute respiratory syndrome coronavirus 2
YAFASEAARVV

SEQ ID NO: 5349 - protein, 11 aa, Severe acute respiratory syndrome-related coronavirus
  REGION 1..11: note = Table A: HLA-A*74:01H HLA-A*31:01H
  source 1..11: note = Severe acute respiratory syndrome coronavirus 2
AFASEAARVVR

SEQ ID NO: 5350 - protein, 11 aa, Severe acute respiratory syndrome-related coronavirus
  REGION 1..11: note = Table A: HLA-A*74:01H
  source 1..11: note = Severe acute respiratory syndrome coronavirus 2
AARVVRSIFSR

SEQ ID NO: 5351 - protein, 11 aa, Severe acute respiratory syndrome-related coronavirus
  REGION 1..11: note = Table A: HLA-B*58:02H HLA-B*07:04H HLA-B*57:03H
  source 1..11: note = Severe acute respiratory syndrome coronavirus 2
RVVRSIFSRTL

SEQ ID NO: 5352 - protein, 11 aa, Severe acute respiratory syndrome-related coronavirus
  REGION 1..11: note = Table A: HLA-A*02:08H
  source 1..11: note = Severe acute respiratory syndrome coronavirus 2
RSIFSRTLETA

SEQ ID NO: 5353 - protein, 11 aa, Severe acute respiratory syndrome-related coronavirus
  REGION 1..11: note = Table A: HLA-A*74:01H HLA-A*03:01H HLA-A*03:02H HLA-A*11:01H HLA-A*11:02H HLA-A*36:01H HLA-A*30:02H HLA-A*31:01M HLA-B*57:03H
  source 1..11: note = Severe acute respiratory syndrome coronavirus 2
RTLETAQNSVR

SEQ ID NO: 5354 - protein, 11 aa, Severe acute respiratory syndrome-related coronavirus
  REGION 1..11: note = Table A: HLA-B*40:02H
  source 1..11: note = Severe acute respiratory syndrome coronavirus 2
LETAQNSVRVL

SEQ ID NO: 5355 - protein, 11 aa, Severe acute respiratory syndrome-related coronavirus
  REGION 1..11: note = Table A: HLA-A*68:01H HLA-A*68:02H
  source 1..11: note = Severe acute respiratory syndrome coronavirus 2
ETAQNSVRVLQ

SEQ ID NO: 5356 - protein, 11 aa, Severe acute respiratory syndrome-related coronavirus
  REGION 1..11: note = Table A: HLA-A*03:02H HLA-A*11:01H HLA-A*34:02H
  source 1..11: note = Severe acute respiratory syndrome coronavirus 2
TAQNSVRVLQK

SEQ ID NO: 5357 - protein, 11 aa, Severe acute respiratory syndrome-related coronavirus
  REGION 1..11: note = Table A: HLA-B*38:02H
  source 1..11: note = Severe acute respiratory syndrome coronavirus 2
QKAAITILDGI

SEQ ID NO: 5358 - protein, 11 aa, Severe acute respiratory syndrome-related coronavirus
  REGION 1..11: note = Table A: HLA-A*30:02H HLA-B*15:01H
  source 1..11: note = Severe acute respiratory syndrome coronavirus 2
AITILDGISQY

SEQ ID NO: 5359 - protein, 11 aa, Severe acute respiratory syndrome-related coronavirus
  REGION 1..11: note = Table A: HLA-A*02:11H HLA-A*02:04M HLA-A*02:06H HLA-A*02:01H HLA-A*02:02H HLA-C*08:01H HLA-B*38:02H
  source 1..11: note = Severe acute respiratory syndrome coronavirus 2
TILDGISQYSL

SEQ ID NO: 5360 - protein, 11 aa, Severe acute respiratory syndrome-related coronavirus
  REGION 1..11: note = Table A: HLA-B*57:03M
  source 1..11: note = Severe acute respiratory syndrome coronavirus 2
YSLRLIDAMMF

SEQ ID NO: 5361 - protein, 11 aa, Severe acute respiratory syndrome-related coronavirus
  REGION 1..11: note = Table A: HLA-A*68:02M HLA-A*02:02H
  source 1..11: note = Severe acute respiratory syndrome coronavirus 2
FTSDLATNNLV

SEQ ID NO: 5362 - protein, 11 aa, Severe acute respiratory syndrome-related coronavirus
  REGION 1..11: note = Table A: HLA-A*68:02H HLA-B*35:03H HLA-C*17:01H
  source 1..11: note = Severe acute respiratory syndrome coronavirus 2
MAYITGGVVQL

SEQ ID NO: 5363 - protein, 11 aa, Severe acute respiratory syndrome-related coronavirus
  REGION 1..11: note = Table A: HLA-B*44:03H
  source 1..11: note = Severe acute respiratory syndrome coronavirus 2
KEGVEFLRDGW

SEQ ID NO: 5364 - protein, 11 aa, Severe acute respiratory syndrome-related coronavirus
  REGION 1..11: note = Table A: HLA-B*45:01M HLA-B*40:02H HLA-B*41:02H HLA-B*50:01M
  source 1..11: note = Severe acute respiratory syndrome coronavirus 2
CEIVGGQIVTC

SEQ ID NO: 5365 - protein, 11 aa, Severe acute respiratory syndrome-related coronavirus
  REGION 1..11: note = Table A: HLA-A*68:02H
  source 1..11: note = Severe acute respiratory syndrome coronavirus 2
EIVGGQIVTCA

SEQ ID NO: 5366 - protein, 11 aa, Severe acute respiratory syndrome-related coronavirus
  REGION 1..11: note = Table A: HLA-B*58:01H HLA-B*44:02H HLA-B*44:05M HLA-B*44:03M HLA-A*24:07H HLA-A*23:01H HLA-B*40:01M HLA-B*40:02H HLA-B*40:06H HLA-B*57:03M HLA-B*13:01H HLA-B*49:01H
  source 1..11: note = Severe acute respiratory syndrome coronavirus 2
KEIKESVQTFF

SEQ ID NO: 5367 - protein, 11 aa, Severe acute respiratory syndrome-related coronavirus
  REGION 1..11: note = Table A: HLA-A*34:02H
  source 1..11: note = Severe acute respiratory syndrome coronavirus 2
EIKESVQTFFK

SEQ ID NO: 5368 - protein, 11 aa, Severe acute respiratory syndrome-related coronavirus
  REGION 1..11: note = Table A: HLA-A*11:303H HLA-A*74:01H HLA-A*03:02M HLA-A*11:01M HLA-A*11:02M HLA-A*30:01H HLA-A*34:02H HLA-C*07:27H HLA-A*31:01H
  source 1..11: note = Severe acute respiratory syndrome coronavirus 2
SVQTFFKLVNK

SEQ ID NO: 5369 - protein, 11 aa, Severe acute respiratory syndrome-related coronavirus
  REGION 1..11: note = Table A: HLA-B*08:01H
  source 1..11: note = Severe acute respiratory syndrome coronavirus 2
FFKLVNKFLAL

SEQ ID NO: 5370 - protein, 11 aa, Severe acute respiratory syndrome-related coronavirus
  REGION 1..11: note = Table A: HLA-B*44:05M HLA-B*40:02H
  source 1..11: note = Severe acute respiratory syndrome coronavirus 2
ADSIIIGGAKL

SEQ ID NO: 5371 - protein, 11 aa, Severe acute respiratory syndrome-related coronavirus
  REGION 1..11: note = Table A: HLA-A*33:01H HLA-A*68:01M HLA-A*34:02M HLA-A*66:01M
  source 1..11: note = Severe acute respiratory syndrome coronavirus 2
DSIIIGGAKLK

SEQ ID NO: 5372 - protein, 11 aa, Severe acute respiratory syndrome-related coronavirus
  REGION 1..11: note = Table A: HLA-B*46:01H HLA-B*08:01H HLA-C*03:03H HLA-A*02:11H HLA-C*03:04H HLA-A*02:04H HLA-A*02:05H HLA-A*02:08H HLA-A*02:02H HLA-A*02:03H HLA-B*07:04H
  source 1..11: note = Severe acute respiratory syndrome coronavirus 2
IIIGGAKLKAL

SEQ ID NO: 5373 - protein, 11 aa, Severe acute respiratory syndrome-related coronavirus
  REGION 1..11: note = Table A: HLA-A*24:07H HLA-B*38:02H HLA-A*32:01H HLA-B*15:01H HLA-B*57:03M
  source 1..11: note = Severe acute respiratory syndrome coronavirus 2
KLKALNLGETF

SEQ ID NO: 5374 - protein, 11 aa, Severe acute respiratory syndrome-related coronavirus
  REGION 1..11: note = Table A: HLA-A*03:02H
  source 1..11: note = Severe acute respiratory syndrome coronavirus 2
NLGETFVTHSK

SEQ ID NO: 5375 - protein, 11 aa, Severe acute respiratory syndrome-related coronavirus
  REGION 1..11: note = Table A: HLA-B*44:05H HLA-B*40:02H
  source 1..11: note = Severe acute respiratory syndrome coronavirus 2
GETFVTHSKGL

SEQ ID NO: 5376 - protein, 11 aa, Severe acute respiratory syndrome-related coronavirus
  REGION 1..11: note = Table A: HLA-A*36:01M HLA-A*26:01H HLA-A*26:02H HLA-A*01:01H HLA-A*30:02H HLA-A*68:01H HLA-A*34:01H HLA-A*34:02M HLA-A*66:01H
  source 1..11: note = Severe acute respiratory syndrome coronavirus 2
ETFVTHSKGLY

SEQ ID NO: 5377 - protein, 11 aa, Severe acute respiratory syndrome-related coronavirus
  REGION 1..11: note = Table A: HLA-A*74:01H HLA-A*33:03H
  source 1..11: note = Severe acute respiratory syndrome coronavirus 2
TFVTHSKGLYR

SEQ ID NO: 5378 - protein, 11 aa, Severe acute respiratory syndrome-related coronavirus
  REGION 1..11: note = Table A: HLA-B*45:01H
  source 1..11: note = Severe acute respiratory syndrome coronavirus 2
EETGLLMPLKA

SEQ ID NO: 5379 - protein, 11 aa, Severe acute respiratory syndrome-related coronavirus
  REGION 1..11: note = Table A: HLA-A*02:11H
  source 1..11: note = Severe acute respiratory syndrome coronavirus 2
LLMPLKAPKEI

SEQ ID NO: 5380 - protein, 11 aa, Severe acute respiratory syndrome-related coronavirus
  REGION 1..11: note = Table A: HLA-B*53:01H HLA-B*35:03H HLA-B*35:01H HLA-B*35:08H HLA-B*35:07M HLA-B*54:01H
  source 1..11: note = Severe acute respiratory syndrome coronavirus 2
MPLKAPKEIIF

SEQ ID NO: 5381 - protein, 11 aa, Severe acute respiratory syndrome-related coronavirus
  REGION 1..11: note = Table A: HLA-B*44:05H HLA-B*40:01H HLA-B*40:02M
  source 1..11: note = Severe acute respiratory syndrome coronavirus 2
KEIIFLEGETL

SEQ ID NO: 5382 - protein, 11 aa, Severe acute respiratory syndrome-related coronavirus
  REGION 1..11: note = Table A: HLA-A*02:02H
  source 1..11: note = Severe acute respiratory syndrome coronavirus 2
FLEGETLPTEV

SEQ ID NO: 5383 - protein, 11 aa, Severe acute respiratory syndrome-related coronavirus
  REGION 1..11: note = Table A: HLA-B*40:01H
  source 1..11: note = Severe acute respiratory syndrome coronavirus 2
LEGETLPTEVL

SEQ ID NO: 5384 - protein, 11 aa, Severe acute respiratory syndrome-related coronavirus
  REGION 1..11: note = Table A: HLA-C*08:03H
  source 1..11: note = Severe acute respiratory syndrome coronavirus 2
VVLKTGDLQPL

SEQ ID NO: 5385 - protein, 11 aa, Severe acute respiratory syndrome-related coronavirus
  REGION 1..11: note = Table A: HLA-B*45:01H
  source 1..11: note = Severe acute respiratory syndrome coronavirus 2
LEQPTSEAVEA

SEQ ID NO: 5386 - protein, 11 aa, Severe acute respiratory syndrome-related coronavirus
  REGION 1..11: note = Table A: HLA-B*35:03H
  source 1..11: note = Severe acute respiratory syndrome coronavirus 2
QPTSEAVEAPL

SEQ ID NO: 5387 - protein, 11 aa, Severe acute respiratory syndrome-related coronavirus
  REGION 1..11: note = Table A: HLA-B*45:01H HLA-B*50:01H
  source 1..11: note = Severe acute respiratory syndrome coronavirus 2
VEAPLVGTPVC

SEQ ID NO: 5388 - protein, 11 aa, Severe acute respiratory syndrome-related coronavirus
  REGION 1..11: note = Table A: HLA-A*68:02H HLA-B*51:01H
  source 1..11: note = Severe acute respiratory syndrome coronavirus 2
EAPLVGTPVCI

SEQ ID NO: 5389 - protein, 11 aa, Severe acute respiratory syndrome-related coronavirus
  REGION 1..11: note = Table A: HLA-A*36:01H HLA-A*29:02H HLA-A*02:11H HLA-A*30:02H HLA-B*35:01H HLA-B*35:07H HLA-B*38:02M HLA-B*15:01H HLA-B*15:02H
  source 1..11: note = Severe acute respiratory syndrome coronavirus 2
MLLEIKDTEKY

SEQ ID NO: 5390 - protein, 11 aa, Severe acute respiratory syndrome-related coronavirus
  REGION 1..11: note = Table A: HLA-B*08:01H
  source 1..11: note = Severe acute respiratory syndrome coronavirus 2
EIKDTEKYCAL

SEQ ID NO: 5391 - protein, 11 aa, Severe acute respiratory syndrome-related coronavirus
  REGION 1..11: note = Table A: HLA-C*15:05M HLA-B*35:01H HLA-B*07:02M HLA-B*07:05M
  source 1..11: note = Severe acute respiratory syndrome coronavirus 2
APNMMVTNNTF

SEQ ID NO: 5392 - protein, 11 aa, Severe acute respiratory syndrome-related coronavirus
  REGION 1..11: note = Table A: HLA-A*36:01H HLA-A*34:02M
  source 1..11: note = Severe acute respiratory syndrome coronavirus 2
MMVTNNTFTLK

SEQ ID NO: 5393 - protein, 11 aa, Severe acute respiratory syndrome-related coronavirus
  REGION 1..11: note = Table A: HLA-C*08:03H
  source 1..11: note = Severe acute respiratory syndrome coronavirus 2
NTFTLKGGAPT

SEQ ID NO: 5394 - protein, 11 aa, Severe acute respiratory syndrome-related coronavirus
  REGION 1..11: note = Table A: HLA-A*02:11H
  source 1..11: note = Severe acute respiratory syndrome coronavirus 2
FTLKGGAPTKV

SEQ ID NO: 5395 - protein, 11 aa, Severe acute respiratory syndrome-related coronavirus
  REGION 1..11: note = Table A: HLA-A*68:02H HLA-A*02:05H HLA-A*02:06H HLA-A*02:08H
  source 1..11: note = Severe acute respiratory syndrome coronavirus 2
VTFGDDTVIEV

SEQ ID NO: 5396 - protein, 11 aa, Severe acute respiratory syndrome-related coronavirus
  REGION 1..11: note = Table A: HLA-B*27:02H
  source 1..11: note = Severe acute respiratory syndrome coronavirus 2
DDTVIEVQGYK

SEQ ID NO: 5397 - protein, 11 aa, Severe acute respiratory syndrome-related coronavirus
  REGION 1..11: note = Table A: HLA-A*26:03H HLA-A*02:11H HLA-A*68:01H HLA-A*68:02M HLA-A*02:05M HLA-A*02:06M HLA-A*02:07H HLA-A*02:08H HLA-A*02:02H HLA-A*02:03H HLA-B*38:02H
  source 1..11: note = Severe acute respiratory syndrome coronavirus 2
TVIEVQGYKSV

SEQ ID NO: 5398 - protein, 11 aa, Severe acute respiratory syndrome-related coronavirus
  REGION 1..11: note = Table A: HLA-B*49:01H
  source 1..11: note = Severe acute respiratory syndrome coronavirus 2
IEVQGYKSVNI

SEQ ID NO: 5399 - protein, 11 aa, Severe acute respiratory syndrome-related coronavirus
  REGION 1..11: note = Table A: HLA-A*11:02H
  source 1..11: note = Severe acute respiratory syndrome coronavirus 2
ITFELDERIDK

SEQ ID NO: 5400 - protein, 11 aa, Severe acute respiratory syndrome-related coronavirus
  REGION 1..11: note = Table A: HLA-B*40:02H
  source 1..11: note = Severe acute respiratory syndrome coronavirus 2
FELDERIDKVL

SEQ ID NO: 5401 - protein, 11 aa, Severe acute respiratory syndrome-related coronavirus
  REGION 1..11: note = Table A: HLA-A*68:02H
  source 1..11: note = Severe acute respiratory syndrome coronavirus 2
SAYTVELGTEV

SEQ ID NO: 5402 - protein, 11 aa, Severe acute respiratory syndrome-related coronavirus
  REGION 1..11: note = Table A: HLA-B*35:01H HLA-B*35:08H HLA-B*38:02H HLA-B*39:01H
  source 1..11: note = Severe acute respiratory syndrome coronavirus 2
TVELGTEVNEF

SEQ ID NO: 5403 - protein, 11 aa, Severe acute respiratory syndrome-related coronavirus
  REGION 1..11: note = Table A: HLA-B*50:01H
  source 1..11: note = Severe acute respiratory syndrome coronavirus 2
TEVNEFACVVA

SEQ ID NO: 5404 - protein, 11 aa, Severe acute respiratory syndrome-related coronavirus
  REGION 1..11: note = Table A: HLA-A*02:08H
  source 1..11: note = Severe acute respiratory syndrome coronavirus 2
CVVADAVIKTL

SEQ ID NO: 5405 - protein, 11 aa, Severe acute respiratory syndrome-related coronavirus
  REGION 1..11: note = Table A: HLA-B*58:01H HLA-A*36:01H HLA-B*57:01H HLA-B*57:03M
  source 1..11: note = Severe acute respiratory syndrome coronavirus 2
LTPLGIDLDEW

SEQ ID NO: 5406 - protein, 11 aa, Severe acute respiratory syndrome-related coronavirus
  REGION 1..11: note = Table A: HLA-C*14:02H HLA-C*14:03H HLA-A*24:02H HLA-C*08:01H HLA-A*23:01H
  source 1..11: note = Severe acute respiratory syndrome coronavirus 2
TYYLFDESGEF

SEQ ID NO: 5407 - protein, 11 aa, Severe acute respiratory syndrome-related coronavirus
  REGION 1..11: note = Table A: HLA-A*11:303H HLA-A*29:02H HLA-A*02:11H HLA-A*68:02M HLA-B*35:03H HLA-A*02:04H HLA-A*02:05H HLA-A*02:06H HLA-A*02:07H HLA-A*02:08H HLA-B*14:01H HLA-A*02:01H HLA-A*02:02H HLA-A*02:03M HLA-C*17:01H
  REGION 1..11: note = CONT. FROM ABOVE: HLA-C*08:01M HLA-B*38:01H HLA-B*38:02M HLA- B*40:06M HLA-B*13:01H HLA-B*13:02M
  source 1..11: note = Severe acute respiratory syndrome coronavirus 2
YLFDESGEFKL

SEQ ID NO: 5408 - protein, 11 aa, Severe acute respiratory syndrome-related coronavirus
  REGION 1..11: note = Table A: HLA-A*36:01H HLA-A*30:02H
  source 1..11: note = Severe acute respiratory syndrome coronavirus 2
SGEFKLASHMY

SEQ ID NO: 5409 - protein, 11 aa, Severe acute respiratory syndrome-related coronavirus
  REGION 1..11: note = Table A: HLA-B*18:01H
  source 1..11: note = Severe acute respiratory syndrome coronavirus 2
EEEEFEPSTQY

SEQ ID NO: 5410 - protein, 11 aa, Severe acute respiratory syndrome-related coronavirus
  REGION 1..11: note = Table A: HLA-B*44:02M HLA-B*44:05H HLA-C*16:04H HLA-B*44:03M HLA-B*18:01M HLA-C*07:01H HLA-B*27:02H HLA-B*07:05M
  source 1..11: note = Severe acute respiratory syndrome coronavirus 2
EEFEPSTQYEY

SEQ ID NO: 5411 - protein, 11 aa, Severe acute respiratory syndrome-related coronavirus
  REGION 1..11: note = Table A: HLA-B*38:02H HLA-B*39:01H
  source 1..11: note = Severe acute respiratory syndrome coronavirus 2
TQYEYGTEDDY

SEQ ID NO: 5412 - protein, 11 aa, Severe acute respiratory syndrome-related coronavirus
  REGION 1..11: note = Table A: HLA-B*56:01M HLA-B*55:02M HLA-C*15:05H HLA-B*55:01M HLA-B*54:01H HLA-B*07:05H HLA-B*50:01H
  source 1..11: note = Severe acute respiratory syndrome coronavirus 2
KPLEFGATSAA

SEQ ID NO: 5413 - protein, 11 aa, Severe acute respiratory syndrome-related coronavirus
  REGION 1..11: note = Table A: HLA-A*68:02H
  source 1..11: note = Severe acute respiratory syndrome coronavirus 2
QTTTIQTIVEV

SEQ ID NO: 5414 - protein, 11 aa, Severe acute respiratory syndrome-related coronavirus
  REGION 1..11: note = Table A: HLA-B*44:05H HLA-B*40:01H HLA-B*40:02H
  source 1..11: note = Severe acute respiratory syndrome coronavirus 2
VEVQPQLEMEL

SEQ ID NO: 5415 - protein, 11 aa, Severe acute respiratory syndrome-related coronavirus
  REGION 1..11: note = Table A: HLA-A*68:02H
  source 1..11: note = Severe acute respiratory syndrome coronavirus 2
ELTPVVQTIEV

SEQ ID NO: 5416 - protein, 11 aa, Severe acute respiratory syndrome-related coronavirus
  REGION 1..11: note = Table A: HLA-A*26:01H HLA-A*30:02H
  source 1..11: note = Severe acute respiratory syndrome coronavirus 2
QTIEVNSFSGY

SEQ ID NO: 5417 - protein, 11 aa, Severe acute respiratory syndrome-related coronavirus
  REGION 1..11: note = Table A: HLA-A*25:01H HLA-A*26:03H HLA-A*68:01H HLA-A*68:02H HLA-A*34:01H HLA-A*34:02H
  source 1..11: note = Severe acute respiratory syndrome coronavirus 2
EVNSFSGYLKL

SEQ ID NO: 5418 - protein, 11 aa, Severe acute respiratory syndrome-related coronavirus
  REGION 1..11: note = Table A: HLA-A*24:07H HLA-A*23:01H
  source 1..11: note = Severe acute respiratory syndrome coronavirus 2
GYLKLTDNVYI

SEQ ID NO: 5419 - protein, 11 aa, Severe acute respiratory syndrome-related coronavirus
  REGION 1..11: note = Table A: HLA-A*02:02H
  source 1..11: note = Severe acute respiratory syndrome coronavirus 2
KLTDNVYIKNA

SEQ ID NO: 5420 - protein, 11 aa, Severe acute respiratory syndrome-related coronavirus
  REGION 1..11: note = Table A: HLA-A*23:01H
  source 1..11: note = Severe acute respiratory syndrome coronavirus 2
VYIKNADIVEE

SEQ ID NO: 5421 - protein, 11 aa, Severe acute respiratory syndrome-related coronavirus
  REGION 1..11: note = Table A: HLA-A*02:05H HLA-A*02:08H
  source 1..11: note = Severe acute respiratory syndrome coronavirus 2
YIKNADIVEEA

SEQ ID NO: 5422 - protein, 11 aa, Severe acute respiratory syndrome-related coronavirus
  REGION 1..11: note = Table A: HLA-B*56:01H HLA-B*55:02M HLA-B*55:01H HLA-A*02:08M
  source 1..11: note = Severe acute respiratory syndrome coronavirus 2
KVKPTVVVNAA

SEQ ID NO: 5423 - protein, 11 aa, Severe acute respiratory syndrome-related coronavirus
  REGION 1..11: note = Table A: HLA-A*03:02M HLA-A*11:01M HLA-A*11:02M HLA-C*07:27H
  source 1..11: note = Severe acute respiratory syndrome coronavirus 2
VVVNAANVYLK

SEQ ID NO: 5424 - protein, 11 aa, Severe acute respiratory syndrome-related coronavirus
  REGION 1..11: note = Table A: HLA-A*02:02M HLA-A*02:03M HLA-B*38:02H
  source 1..11: note = Severe acute respiratory syndrome coronavirus 2
YLKHGGGVAGA

SEQ ID NO: 5425 - protein, 11 aa, Severe acute respiratory syndrome-related coronavirus
  REGION 1..11: note = Table A: HLA-A*03:02H HLA-A*36:01H HLA-B*27:02H HLA-A*34:02H
  source 1..11: note = Severe acute respiratory syndrome coronavirus 2
HGGGVAGALNK

SEQ ID NO: 5426 - protein, 11 aa, Severe acute respiratory syndrome-related coronavirus
  REGION 1..11: note = Table A: HLA-B*38:02H
  source 1..11: note = Severe acute respiratory syndrome coronavirus 2
NAMQVESDDYI

SEQ ID NO: 5427 - protein, 11 aa, Severe acute respiratory syndrome-related coronavirus
  REGION 1..11: note = Table A: HLA-A*24:07H
  source 1..11: note = Severe acute respiratory syndrome coronavirus 2
DYIATNGPLKV

SEQ ID NO: 5428 - protein, 11 aa, Severe acute respiratory syndrome-related coronavirus
  REGION 1..11: note = Table A: HLA-C*15:05M HLA-C*08:03H HLA-B*07:05H
  source 1..11: note = Severe acute respiratory syndrome coronavirus 2
GPLKVGGSCVL

SEQ ID NO: 5429 - protein, 11 aa, Severe acute respiratory syndrome-related coronavirus
  REGION 1..11: note = Table A: HLA-A*03:01H HLA-A*03:02H
  source 1..11: note = Severe acute respiratory syndrome coronavirus 2
CLHVVGPNVNK

SEQ ID NO: 5430 - protein, 11 aa, Severe acute respiratory syndrome-related coronavirus
  REGION 1..11: note = Table A: HLA-A*02:08H
  source 1..11: note = Severe acute respiratory syndrome coronavirus 2
NVNKGEDIQLL

SEQ ID NO: 5431 - protein, 11 aa, Severe acute respiratory syndrome-related coronavirus
  REGION 1..11: note = Table A: HLA-B*44:03H
  source 1..11: note = Severe acute respiratory syndrome coronavirus 2
GEDIQLLKSAY

SEQ ID NO: 5432 - protein, 11 aa, Severe acute respiratory syndrome-related coronavirus
  REGION 1..11: note = Table A: HLA-A*02:11H HLA-A*68:02H HLA-A*02:05H HLA-A*02:06H HLA-A*02:08H HLA-A*02:02H
  source 1..11: note = Severe acute respiratory syndrome coronavirus 2
SAYENFNQHEV

SEQ ID NO: 5433 - protein, 11 aa, Severe acute respiratory syndrome-related coronavirus
  REGION 1..11: note = Table A: HLA-C*08:01H
  source 1..11: note = Severe acute respiratory syndrome coronavirus 2
AYENFNQHEVL

SEQ ID NO: 5434 - protein, 11 aa, Severe acute respiratory syndrome-related coronavirus
  REGION 1..11: note = Table A: HLA-B*37:01H HLA-B*40:01M HLA-B*40:02H
  source 1..11: note = Severe acute respiratory syndrome coronavirus 2
YENFNQHEVLL

SEQ ID NO: 5435 - protein, 11 aa, Severe acute respiratory syndrome-related coronavirus
  REGION 1..11: note = Table A: HLA-C*08:01H HLA-B*38:02H
  source 1..11: note = Severe acute respiratory syndrome coronavirus 2
NQHEVLLAPLL

SEQ ID NO: 5436 - protein, 11 aa, Severe acute respiratory syndrome-related coronavirus
  REGION 1..11: note = Table A: HLA-B*45:01H HLA-B*40:06M HLA-B*50:01H
  source 1..11: note = Severe acute respiratory syndrome coronavirus 2
HEVLLAPLLSA

SEQ ID NO: 5437 - protein, 11 aa, Severe acute respiratory syndrome-related coronavirus
  REGION 1..11: note = Table A: HLA-B*56:01H HLA-B*55:02H
  source 1..11: note = Severe acute respiratory syndrome coronavirus 2
APLLSAGIFGA

SEQ ID NO: 5438 - protein, 11 aa, Severe acute respiratory syndrome-related coronavirus
  REGION 1..11: note = Table A: HLA-A*11:303H HLA-C*03:03H HLA-A*02:11M HLA-C*03:04H HLA-A*30:02H HLA-A*68:02H HLA-A*02:04M HLA-A*02:05M HLA-A*02:07H HLA-A*02:08M HLA-A*02:02M HLA-A*02:03H HLA-C*08:01H HLA-C*08:03H HLA-B*40:02H
  REGION 1..11: note = CONT. FROM ABOVE: HLA-B*40:06H
  source 1..11: note = Severe acute respiratory syndrome coronavirus 2
GIFGADPIHSL

SEQ ID NO: 5439 - protein, 11 aa, Severe acute respiratory syndrome-related coronavirus
  REGION 1..11: note = Table A: HLA-A*02:11H HLA-A*68:02H HLA-A*02:02H
  source 1..11: note = Severe acute respiratory syndrome coronavirus 2
FGADPIHSLRV

SEQ ID NO: 5440 - protein, 11 aa, Severe acute respiratory syndrome-related coronavirus
  REGION 1..11: note = Table A: HLA-B*46:01H HLA-C*12:02H HLA-C*12:03H
  source 1..11: note = Severe acute respiratory syndrome coronavirus 2
VCVDTVRTNVY

SEQ ID NO: 5441 - protein, 11 aa, Severe acute respiratory syndrome-related coronavirus
  REGION 1..11: note = Table A: HLA-C*04:03H HLA-A*02:11H HLA-A*02:07M HLA-A*02:01H
  source 1..11: note = Severe acute respiratory syndrome coronavirus 2
CVDTVRTNVYL

SEQ ID NO: 5442 - protein, 11 aa, Severe acute respiratory syndrome-related coronavirus
  REGION 1..11: note = Table A: HLA-A*68:02H
  source 1..11: note = Severe acute respiratory syndrome coronavirus 2
DTVRTNVYLAV

SEQ ID NO: 5443 - protein, 11 aa, Severe acute respiratory syndrome-related coronavirus
  REGION 1..11: note = Table A: HLA-A*29:02H HLA-A*30:02H HLA-A*24:07H HLA-A*23:01H
  source 1..11: note = Severe acute respiratory syndrome coronavirus 2
VYLAVFDKNLY

SEQ ID NO: 5444 - protein, 11 aa, Severe acute respiratory syndrome-related coronavirus
  REGION 1..11: note = Table A: HLA-A*02:11M HLA-A*68:02H HLA-A*02:04H HLA-A*02:05H HLA-A*02:06H HLA-A*02:07H HLA-A*02:08M HLA-A*02:02H HLA-C*08:01H HLA-B*13:01H
  source 1..11: note = Severe acute respiratory syndrome coronavirus 2
AVFDKNLYDKL

SEQ ID NO: 5445 - protein, 11 aa, Severe acute respiratory syndrome-related coronavirus
  REGION 1..11: note = Table A: HLA-A*02:11H HLA-A*02:02M
  source 1..11: note = Severe acute respiratory syndrome coronavirus 2
NLYDKLVSSFL

SEQ ID NO: 5446 - protein, 11 aa, Severe acute respiratory syndrome-related coronavirus
  REGION 1..11: note = Table A: HLA-A*03:02H HLA-A*11:01H
  source 1..11: note = Severe acute respiratory syndrome coronavirus 2
QVEQKIAEIPK

SEQ ID NO: 5447 - protein, 11 aa, Severe acute respiratory syndrome-related coronavirus
  REGION 1..11: note = Table A: HLA-B*44:02H HLA-B*44:05M HLA-B*45:01H HLA-B*44:03H
  source 1..11: note = Severe acute respiratory syndrome coronavirus 2
AEIPKEEVKPF

SEQ ID NO: 5448 - protein, 11 aa, Severe acute respiratory syndrome-related coronavirus
  REGION 1..11: note = Table A: HLA-B*56:01H HLA-B*55:02M HLA-C*15:05H HLA-B*07:04H
  source 1..11: note = Severe acute respiratory syndrome coronavirus 2
KPFITESKPSV

SEQ ID NO: 5449 - protein, 11 aa, Severe acute respiratory syndrome-related coronavirus
  REGION 1..11: note = Table A: HLA-A*68:01H
  source 1..11: note = Severe acute respiratory syndrome coronavirus 2
ITESKPSVEQR

SEQ ID NO: 5450 - protein, 11 aa, Severe acute respiratory syndrome-related coronavirus
  REGION 1..11: note = Table A: HLA-B*27:02M
  source 1..11: note = Severe acute respiratory syndrome coronavirus 2
EEVTTTLEETK

SEQ ID NO: 5451 - protein, 11 aa, Severe acute respiratory syndrome-related coronavirus
  REGION 1..11: note = Table A: HLA-A*26:01H HLA-A*26:02M
  source 1..11: note = Severe acute respiratory syndrome coronavirus 2
EVTTTLEETKF

SEQ ID NO: 5452 - protein, 11 aa, Severe acute respiratory syndrome-related coronavirus
  REGION 1..11: note = Table A: HLA-A*24:07H HLA-A*23:01H
  source 1..11: note = Severe acute respiratory syndrome coronavirus 2
KFLTENLLLYI

SEQ ID NO: 5453 - protein, 11 aa, Severe acute respiratory syndrome-related coronavirus
  REGION 1..11: note = Table A: HLA-A*02:11H
  source 1..11: note = Severe acute respiratory syndrome coronavirus 2
LLLYIDINGNL

SEQ ID NO: 5454 - protein, 11 aa, Severe acute respiratory syndrome-related coronavirus
  REGION 1..11: note = Table A: HLA-B*57:03M
  source 1..11: note = Severe acute respiratory syndrome coronavirus 2
ATLVSDIDITF

SEQ ID NO: 5455 - protein, 11 aa, Severe acute respiratory syndrome-related coronavirus
  REGION 1..11: note = Table A: HLA-A*02:11H HLA-A*02:04H HLA-A*02:05H HLA-A*02:07H HLA-A*02:01H HLA-A*02:02M HLA-C*08:01H HLA-B*38:02H HLA-B*13:01H
  source 1..11: note = Severe acute respiratory syndrome coronavirus 2
TLVSDIDITFL

SEQ ID NO: 5456 - protein, 11 aa, Severe acute respiratory syndrome-related coronavirus
  REGION 1..11: note = Table A: HLA-A*03:02H HLA-A*11:01H HLA-A*11:02H HLA-A*68:02H HLA-A*34:02H
  source 1..11: note = Severe acute respiratory syndrome coronavirus 2
LVSDIDITFLK

SEQ ID NO: 5457 - protein, 11 aa, Severe acute respiratory syndrome-related coronavirus
  REGION 1..11: note = Table A: HLA-A*36:01H
  source 1..11: note = Severe acute respiratory syndrome coronavirus 2
VSDIDITFLKK

SEQ ID NO: 5458 - protein, 11 aa, Severe acute respiratory syndrome-related coronavirus
  REGION 1..11: note = Table A: HLA-B*58:02H
  source 1..11: note = Severe acute respiratory syndrome coronavirus 2
ITFLKKDAPYI

SEQ ID NO: 5459 - protein, 11 aa, Severe acute respiratory syndrome-related coronavirus
  REGION 1..11: note = Table A: HLA-A*26:02H HLA-A*68:02H HLA-B*38:02H
  source 1..11: note = Severe acute respiratory syndrome coronavirus 2
DVVQEGVLTAV

SEQ ID NO: 5460 - protein, 11 aa, Severe acute respiratory syndrome-related coronavirus
  REGION 1..11: note = Table A: HLA-A*11:303H HLA-A*03:01H HLA-A*03:02M HLA-A*11:01H HLA-A*11:02H HLA-A*30:01H HLA-A*34:02H HLA-C*07:27H
  source 1..11: note = Severe acute respiratory syndrome coronavirus 2
GVLTAVVIPTK

SEQ ID NO: 5461 - protein, 11 aa, Severe acute respiratory syndrome-related coronavirus
  REGION 1..11: note = Table A: HLA-A*03:02H
  source 1..11: note = Severe acute respiratory syndrome coronavirus 2
VLTAVVIPTKK

SEQ ID NO: 5462 - protein, 11 aa, Severe acute respiratory syndrome-related coronavirus
  REGION 1..11: note = Table A: HLA-A*03:02H HLA-A*11:01H HLA-A*36:01H
  source 1..11: note = Severe acute respiratory syndrome coronavirus 2
KAGGTTEMLAK

SEQ ID NO: 5463 - protein, 11 aa, Severe acute respiratory syndrome-related coronavirus
  REGION 1..11: note = Table A: HLA-A*74:01M HLA-A*11:01H HLA-A*11:02H HLA-A*68:01H HLA-A*31:01H HLA-A*66:01H
  source 1..11: note = Severe acute respiratory syndrome coronavirus 2
GTTEMLAKALR

SEQ ID NO: 5464 - protein, 11 aa, Severe acute respiratory syndrome-related coronavirus
  REGION 1..11: note = Table A: HLA-A*30:02H
  source 1..11: note = Severe acute respiratory syndrome coronavirus 2
KALRKVPTDNY

SEQ ID NO: 5465 - protein, 11 aa, Severe acute respiratory syndrome-related coronavirus
  REGION 1..11: note = Table A: HLA-A*36:01H HLA-A*30:02H HLA-B*15:01H HLA-B*57:03H
  source 1..11: note = Severe acute respiratory syndrome coronavirus 2
KVPTDNYITTY

SEQ ID NO: 5466 - protein, 11 aa, Severe acute respiratory syndrome-related coronavirus
  REGION 1..11: note = Table A: HLA-A*03:01H HLA-A*11:01H HLA-A*11:02H HLA-A*36:01H HLA-B*57:01H HLA-A*25:01H HLA-B*46:01H HLA-A*26:01M HLA-A*26:02M HLA-A*26:03M HLA-A*29:01H HLA-A*29:02H HLA-A*01:01H HLA-A*30:02M HLA-A*68:01H HLA-A*34:02M
  REGION 1..11: note = CONT. FROM ABOVE: HLA-B*38:02H HLA-B*15:01M HLA-B*39:01H HLA- A*66:01H
  source 1..11: note = Severe acute respiratory syndrome coronavirus 2
TTYPGQGLNGY

SEQ ID NO: 5467 - protein, 11 aa, Severe acute respiratory syndrome-related coronavirus
  REGION 1..11: note = Table A: HLA-B*56:01H HLA-B*55:02H HLA-C*15:05H HLA-B*54:01H
  source 1..11: note = Severe acute respiratory syndrome coronavirus 2
YPGQGLNGYTV

SEQ ID NO: 5468 - protein, 11 aa, Severe acute respiratory syndrome-related coronavirus
  REGION 1..11: note = Table A: HLA-A*03:02M HLA-B*27:02H
  source 1..11: note = Severe acute respiratory syndrome coronavirus 2
GLNGYTVEEAK

SEQ ID NO: 5469 - protein, 11 aa, Severe acute respiratory syndrome-related coronavirus
  REGION 1..11: note = Table A: HLA-A*11:303H HLA-A*03:02H HLA-A*11:01M HLA-A*11:02M HLA-A*36:01H HLA-A*68:01M HLA-A*68:02H HLA-A*34:01H HLA-A*34:02H HLA-C*07:27H HLA-A*66:01M
  source 1..11: note = Severe acute respiratory syndrome coronavirus 2
YTVEEAKTVLK

SEQ ID NO: 5470 - protein, 11 aa, Severe acute respiratory syndrome-related coronavirus
  REGION 1..11: note = Table A: HLA-A*11:303H HLA-A*03:01H HLA-A*03:02M HLA-A*11:01M HLA-A*11:02M HLA-A*36:01H HLA-A*68:01M HLA-A*34:02M HLA-C*07:27H
  source 1..11: note = Severe acute respiratory syndrome coronavirus 2
TVEEAKTVLKK

SEQ ID NO: 5471 - protein, 11 aa, Severe acute respiratory syndrome-related coronavirus
  REGION 1..11: note = Table A: HLA-B*57:03H
  source 1..11: note = Severe acute respiratory syndrome coronavirus 2
KSAFYILPSII

SEQ ID NO: 5472 - protein, 11 aa, Severe acute respiratory syndrome-related coronavirus
  REGION 1..11: note = Table A: HLA-B*27:02H HLA-A*34:02H
  source 1..11: note = Severe acute respiratory syndrome coronavirus 2
YILPSIISNEK

SEQ ID NO: 5473 - protein, 11 aa, Severe acute respiratory syndrome-related coronavirus
  REGION 1..11: note = Table A: HLA-B*44:05H
  source 1..11: note = Severe acute respiratory syndrome coronavirus 2
QEILGTVSWNL

SEQ ID NO: 5474 - protein, 11 aa, Severe acute respiratory syndrome-related coronavirus
  REGION 1..11: note = Table A: HLA-A*33:01H HLA-A*33:03H HLA-A*68:01H HLA-A*34:01M HLA-A*34:02H HLA-A*66:01M
  source 1..11: note = Severe acute respiratory syndrome coronavirus 2
EILGTVSWNLR

SEQ ID NO: 5475 - protein, 11 aa, Severe acute respiratory syndrome-related coronavirus
  REGION 1..11: note = Table A: HLA-A*02:02M
  source 1..11: note = Severe acute respiratory syndrome coronavirus 2
MLAHAEETRKL

SEQ ID NO: 5476 - protein, 11 aa, Severe acute respiratory syndrome-related coronavirus
  REGION 1..11: note = Table A: HLA-B*35:03H HLA-B*54:01H
  source 1..11: note = Severe acute respiratory syndrome coronavirus 2
MPVCVETKAIV

SEQ ID NO: 5477 - protein, 11 aa, Severe acute respiratory syndrome-related coronavirus
  REGION 1..11: note = Table A: HLA-A*74:01H HLA-A*33:01M HLA-A*33:03H HLA-A*26:03M HLA-A*68:01H HLA-A*34:01M HLA-A*34:02M HLA-A*31:01H HLA-A*66:01M
  source 1..11: note = Severe acute respiratory syndrome coronavirus 2
ETKAIVSTIQR

SEQ ID NO: 5478 - protein, 11 aa, Severe acute respiratory syndrome-related coronavirus
  REGION 1..11: note = Table A: HLA-B*58:02M HLA-A*30:02M HLA-B*57:03H
  source 1..11: note = Severe acute respiratory syndrome coronavirus 2
KAIVSTIQRKY

SEQ ID NO: 5479 - protein, 11 aa, Severe acute respiratory syndrome-related coronavirus
  REGION 1..11: note = Table A: HLA-A*30:01H
  source 1..11: note = Severe acute respiratory syndrome coronavirus 2
AIVSTIQRKYK

SEQ ID NO: 5480 - protein, 11 aa, Severe acute respiratory syndrome-related coronavirus
  REGION 1..11: note = Table A: HLA-B*15:01H
  source 1..11: note = Severe acute respiratory syndrome coronavirus 2
GIKIQEGVVDY

SEQ ID NO: 5481 - protein, 11 aa, Severe acute respiratory syndrome-related coronavirus
  REGION 1..11: note = Table A: HLA-A*02:11H
  source 1..11: note = Severe acute respiratory syndrome coronavirus 2
KIQEGVVDYGA

SEQ ID NO: 5482 - protein, 11 aa, Severe acute respiratory syndrome-related coronavirus
  REGION 1..11: note = Table A: HLA-B*44:05H HLA-B*44:03H
  source 1..11: note = Severe acute respiratory syndrome coronavirus 2
QEGVVDYGARF

SEQ ID NO: 5483 - protein, 11 aa, Severe acute respiratory syndrome-related coronavirus
  REGION 1..11: note = Table A: HLA-A*36:01M HLA-A*29:02H
  source 1..11: note = Severe acute respiratory syndrome coronavirus 2
VVDYGARFYFY

SEQ ID NO: 5484 - protein, 11 aa, Severe acute respiratory syndrome-related coronavirus
  REGION 1..11: note = Table A: HLA-C*14:03H
  source 1..11: note = Severe acute respiratory syndrome coronavirus 2
RFYFYTSKTTV

SEQ ID NO: 5485 - protein, 11 aa, Severe acute respiratory syndrome-related coronavirus
  REGION 1..11: note = Table A: HLA-C*14:03H
  source 1..11: note = Severe acute respiratory syndrome coronavirus 2
FYFYTSKTTVA

SEQ ID NO: 5486 - protein, 11 aa, Severe acute respiratory syndrome-related coronavirus
  REGION 1..11: note = Table A: HLA-A*68:02H
  source 1..11: note = Severe acute respiratory syndrome coronavirus 2
YTSKTTVASLI

SEQ ID NO: 5487 - protein, 11 aa, Severe acute respiratory syndrome-related coronavirus
  REGION 1..11: note = Table A: HLA-B*58:01H HLA-B*58:02M HLA-B*57:01H HLA-C*15:02H HLA-A*02:08M HLA-B*57:03H
  source 1..11: note = Severe acute respiratory syndrome coronavirus 2
KTTVASLINTL

SEQ ID NO: 5488 - protein, 11 aa, Severe acute respiratory syndrome-related coronavirus
  REGION 1..11: note = Table A: HLA-B*44:03H HLA-B*18:01H HLA-B*07:05H
  source 1..11: note = Severe acute respiratory syndrome coronavirus 2
NETLVTMPLGY

SEQ ID NO: 5489 - protein, 11 aa, Severe acute respiratory syndrome-related coronavirus
  REGION 1..11: note = Table A: HLA-A*02:11H HLA-A*02:02H
  source 1..11: note = Severe acute respiratory syndrome coronavirus 2
TMPLGYVTHGL

SEQ ID NO: 5490 - protein, 11 aa, Severe acute respiratory syndrome-related coronavirus
  REGION 1..11: note = Table A: HLA-A*30:02H
  source 1..11: note = Severe acute respiratory syndrome coronavirus 2
HGLNLEEAARY

SEQ ID NO: 5491 - protein, 11 aa, Severe acute respiratory syndrome-related coronavirus
  REGION 1..11: note = Table A: HLA-B*58:02H HLA-A*02:11H HLA-C*15:05H HLA-B*57:03M HLA-B*13:02H
  source 1..11: note = Severe acute respiratory syndrome coronavirus 2
RSLKVPATVSV

SEQ ID NO: 5492 - protein, 11 aa, Severe acute respiratory syndrome-related coronavirus
  REGION 1..11: note = Table A: HLA-A*03:02H HLA-A*11:01H HLA-A*25:01H HLA-B*46:01H HLA-A*26:01H HLA-A*26:02M HLA-A*26:03H HLA-A*29:01H HLA-A*29:02H HLA-A*30:02M HLA-A*68:01H HLA-C*07:27H HLA-B*35:01H HLA-B*35:08H HLA-B*38:02M HLA-B*15:01M
  REGION 1..11: note = CONT. FROM ABOVE: HLA-B*15:02M HLA-B*07:05H HLA-B*15:11H
  source 1..11: note = Severe acute respiratory syndrome coronavirus 2
SVSSPDAVTAY

SEQ ID NO: 5493 - protein, 11 aa, Severe acute respiratory syndrome-related coronavirus
  REGION 1..11: note = Table A: HLA-B*35:01M HLA-B*35:08H HLA-B*07:05H
  source 1..11: note = Severe acute respiratory syndrome coronavirus 2
SPDAVTAYNGY

SEQ ID NO: 5494 - protein, 11 aa, Severe acute respiratory syndrome-related coronavirus
  REGION 1..11: note = Table A: HLA-B*58:02M HLA-A*02:11M HLA-A*68:02H HLA-A*02:05M HLA-A*02:06H HLA-A*02:07H HLA-A*02:08M HLA-B*57:03H
  source 1..11: note = Severe acute respiratory syndrome coronavirus 2
KTPEEHFIETI

SEQ ID NO: 5495 - protein, 11 aa, Severe acute respiratory syndrome-related coronavirus
  REGION 1..11: note = Table A: HLA-A*01:01H
  source 1..11: note = Severe acute respiratory syndrome coronavirus 2
FIETISLAGSY

SEQ ID NO: 5496 - protein, 11 aa, Severe acute respiratory syndrome-related coronavirus
  REGION 1..11: note = Table A: HLA-B*48:01H HLA-B*13:01H
  source 1..11: note = Severe acute respiratory syndrome coronavirus 2
GQSTQLGIEFL

SEQ ID NO: 5497 - protein, 11 aa, Severe acute respiratory syndrome-related coronavirus
  REGION 1..11: note = Table A: HLA-A*11:01H HLA-A*11:02H HLA-A*36:01H
  source 1..11: note = Severe acute respiratory syndrome coronavirus 2
QSTQLGIEFLK

SEQ ID NO: 5498 - protein, 11 aa, Severe acute respiratory syndrome-related coronavirus
  REGION 1..11: note = Table A: HLA-A*74:01H HLA-A*11:02H
  source 1..11: note = Severe acute respiratory syndrome coronavirus 2
STQLGIEFLKR

SEQ ID NO: 5499 - protein, 11 aa, Severe acute respiratory syndrome-related coronavirus
  REGION 1..11: note = Table A: HLA-A*25:01H HLA-B*46:01H HLA-A*26:02H HLA-C*15:05H HLA-C*12:02H HLA-B*38:02H HLA-B*15:01H HLA-B*15:02H HLA-B*07:05H
  source 1..11: note = Severe acute respiratory syndrome coronavirus 2
SVYYTSNPTTF

SEQ ID NO: 5500 - protein, 11 aa, Severe acute respiratory syndrome-related coronavirus
  REGION 1..11: note = Table A: HLA-A*24:02H HLA-A*24:07M HLA-A*23:01H
  source 1..11: note = Severe acute respiratory syndrome coronavirus 2
YYTSNPTTFHL

SEQ ID NO: 5501 - protein, 11 aa, Severe acute respiratory syndrome-related coronavirus
  REGION 1..11: note = Table A: HLA-A*25:01H HLA-A*26:01M HLA-A*26:02M HLA-A*26:03M HLA-A*68:02M HLA-A*34:01H HLA-A*66:01H
  source 1..11: note = Severe acute respiratory syndrome coronavirus 2
EVITFDNLKTL

SEQ ID NO: 5502 - protein, 11 aa, Severe acute respiratory syndrome-related coronavirus
  REGION 1..11: note = Table A: HLA-B*07:04H
  source 1..11: note = Severe acute respiratory syndrome coronavirus 2
SLREVRTIKVF

SEQ ID NO: 5503 - protein, 11 aa, Severe acute respiratory syndrome-related coronavirus
  REGION 1..11: note = Table A: HLA-B*58:01H HLA-A*02:11M HLA-A*68:02H HLA-A*02:04H HLA-A*02:05M HLA-A*02:06H HLA-A*02:08H HLA-A*02:02M HLA-A*32:01H HLA-B*40:01H HLA-B*57:03M
  source 1..11: note = Severe acute respiratory syndrome coronavirus 2
KVFTTVDNINL

SEQ ID NO: 5504 - protein, 11 aa, Severe acute respiratory syndrome-related coronavirus
  REGION 1..11: note = Table A: HLA-A*68:02H
  source 1..11: note = Severe acute respiratory syndrome coronavirus 2
TTVDNINLHTQ

SEQ ID NO: 5505 - protein, 11 aa, Severe acute respiratory syndrome-related coronavirus
  REGION 1..11: note = Table A: HLA-A*02:11H HLA-A*68:02H HLA-A*02:07M
  source 1..11: note = Severe acute respiratory syndrome coronavirus 2
TVDNINLHTQV

SEQ ID NO: 5506 - protein, 11 aa, Severe acute respiratory syndrome-related coronavirus
  REGION 1..11: note = Table A: HLA-A*36:01H HLA-A*01:01H HLA-A*30:02H
  source 1..11: note = Severe acute respiratory syndrome coronavirus 2
HTQVVDMSMTY

SEQ ID NO: 5507 - protein, 11 aa, Severe acute respiratory syndrome-related coronavirus
  REGION 1..11: note = Table A: HLA-A*26:01H HLA-A*29:02H HLA-A*30:02M HLA-A*34:02H
  source 1..11: note = Severe acute respiratory syndrome coronavirus 2
MTYGQQFGPTY

SEQ ID NO: 5508 - protein, 11 aa, Severe acute respiratory syndrome-related coronavirus
  REGION 1..11: note = Table A: HLA-A*02:05H HLA-A*02:08M HLA-B*38:02H
  source 1..11: note = Severe acute respiratory syndrome coronavirus 2
QQFGPTYLDGA

SEQ ID NO: 5509 - protein, 11 aa, Severe acute respiratory syndrome-related coronavirus
  REGION 1..11: note = Table A: HLA-A*11:01H
  source 1..11: note = Severe acute respiratory syndrome coronavirus 2
PTYLDGADVTK

SEQ ID NO: 5510 - protein, 11 aa, Severe acute respiratory syndrome-related coronavirus
  REGION 1..11: note = Table A: HLA-A*24:02M HLA-A*24:07M HLA-A*23:01H
  source 1..11: note = Severe acute respiratory syndrome coronavirus 2
TYLDGADVTKI

SEQ ID NO: 5511 - protein, 11 aa, Severe acute respiratory syndrome-related coronavirus
  REGION 1..11: note = Table A: HLA-A*33:01H
  source 1..11: note = Severe acute respiratory syndrome coronavirus 2
DGADVTKIKPH

SEQ ID NO: 5512 - protein, 11 aa, Severe acute respiratory syndrome-related coronavirus
  REGION 1..11: note = Table A: HLA-B*42:01H HLA-B*07:02H HLA-B*07:04H
  source 1..11: note = Severe acute respiratory syndrome coronavirus 2
KPHNSHEGKTF

SEQ ID NO: 5513 - protein, 11 aa, Severe acute respiratory syndrome-related coronavirus
  REGION 1..11: note = Table A: HLA-B*38:02H
  source 1..11: note = Severe acute respiratory syndrome coronavirus 2
TFYVLPNDDTL

SEQ ID NO: 5514 - protein, 11 aa, Severe acute respiratory syndrome-related coronavirus
  REGION 1..11: note = Table A: HLA-A*02:11H HLA-A*68:02H HLA-A*02:04H HLA-A*02:05H HLA-A*02:06M HLA-A*02:07H HLA-B*13:02H
  source 1..11: note = Severe acute respiratory syndrome coronavirus 2
YVLPNDDTLRV

SEQ ID NO: 5515 - protein, 11 aa, Severe acute respiratory syndrome-related coronavirus
  REGION 1..11: note = Table A: HLA-B*56:01H HLA-B*55:02H HLA-B*55:01M HLA-B*35:12H HLA-B*54:01M
  source 1..11: note = Severe acute respiratory syndrome coronavirus 2
LPNDDTLRVEA

SEQ ID NO: 5516 - protein, 11 aa, Severe acute respiratory syndrome-related coronavirus
  REGION 1..11: note = Table A: HLA-C*14:03H HLA-A*33:03H HLA-A*68:02H HLA-A*24:02H HLA-A*24:07H HLA-C*08:03H HLA-A*23:01H
  source 1..11: note = Severe acute respiratory syndrome coronavirus 2
EYYHTTDPSFL

SEQ ID NO: 5517 - protein, 11 aa, Severe acute respiratory syndrome-related coronavirus
  REGION 1..11: note = Table A: HLA-B*27:02H
  source 1..11: note = Severe acute respiratory syndrome coronavirus 2
YHTTDPSFLGR

SEQ ID NO: 5518 - protein, 11 aa, Severe acute respiratory syndrome-related coronavirus
  REGION 1..11: note = Table A: HLA-A*36:01M HLA-A*25:01H HLA-A*26:01M HLA-A*29:02H HLA-A*01:01H HLA-A*30:02H HLA-A*34:02M HLA-A*66:01H
  source 1..11: note = Severe acute respiratory syndrome coronavirus 2
HTTDPSFLGRY

SEQ ID NO: 5519 - protein, 11 aa, Severe acute respiratory syndrome-related coronavirus
  REGION 1..11: note = Table A: HLA-A*36:01H
  source 1..11: note = Severe acute respiratory syndrome coronavirus 2
TTDPSFLGRYM

SEQ ID NO: 5520 - protein, 11 aa, Severe acute respiratory syndrome-related coronavirus
  REGION 1..11: note = Table A: HLA-B*54:01H
  source 1..11: note = Severe acute respiratory syndrome coronavirus 2
DPSFLGRYMSA

SEQ ID NO: 5521 - protein, 11 aa, Severe acute respiratory syndrome-related coronavirus
  REGION 1..11: note = Table A: HLA-B*27:05H
  source 1..11: note = Severe acute respiratory syndrome coronavirus 2
GRYMSALNHTK

SEQ ID NO: 5522 - protein, 11 aa, Severe acute respiratory syndrome-related coronavirus
  REGION 1..11: note = Table A: HLA-A*30:02H
  source 1..11: note = Severe acute respiratory syndrome coronavirus 2
SALNHTKKWKY

SEQ ID NO: 5523 - protein, 11 aa, Severe acute respiratory syndrome-related coronavirus
  REGION 1..11: note = Table A: HLA-C*14:03H HLA-A*24:02M HLA-A*24:07M HLA-C*08:01H HLA-A*23:01M
  source 1..11: note = Severe acute respiratory syndrome coronavirus 2
KYPQVNGLTSI

SEQ ID NO: 5524 - protein, 11 aa, Severe acute respiratory syndrome-related coronavirus
  REGION 1..11: note = Table A: HLA-B*58:01H HLA-A*30:02H
  source 1..11: note = Severe acute respiratory syndrome coronavirus 2
TSIKWADNNCY

SEQ ID NO: 5525 - protein, 11 aa, Severe acute respiratory syndrome-related coronavirus
  REGION 1..11: note = Table A: HLA-A*03:02H HLA-B*27:02H
  source 1..11: note = Severe acute respiratory syndrome coronavirus 2
ALLTLQQIELK

SEQ ID NO: 5526 - protein, 11 aa, Severe acute respiratory syndrome-related coronavirus
  REGION 1..11: note = Table A: HLA-A*36:01H HLA-A*29:01H HLA-A*29:02H HLA-A*30:02H
  source 1..11: note = Severe acute respiratory syndrome coronavirus 2
KFNPPALQDAY

SEQ ID NO: 5527 - protein, 11 aa, Severe acute respiratory syndrome-related coronavirus
  REGION 1..11: note = Table A: HLA-A*29:02H
  source 1..11: note = Severe acute respiratory syndrome coronavirus 2
FNPPALQDAYY

SEQ ID NO: 5528 - protein, 11 aa, Severe acute respiratory syndrome-related coronavirus
  REGION 1..11: note = Table A: HLA-A*68:01H
  source 1..11: note = Severe acute respiratory syndrome coronavirus 2
NPPALQDAYYR

SEQ ID NO: 5529 - protein, 11 aa, Severe acute respiratory syndrome-related coronavirus
  REGION 1..11: note = Table A: HLA-B*38:02H
  source 1..11: note = Severe acute respiratory syndrome coronavirus 2
YRARAGEAANF

SEQ ID NO: 5530 - protein, 11 aa, Severe acute respiratory syndrome-related coronavirus
  REGION 1..11: note = Table A: HLA-B*57:03H
  source 1..11: note = Severe acute respiratory syndrome coronavirus 2
KTVGELGDVRE

SEQ ID NO: 5531 - protein, 11 aa, Severe acute respiratory syndrome-related coronavirus
  REGION 1..11: note = Table A: HLA-B*38:02H
  source 1..11: note = Severe acute respiratory syndrome coronavirus 2
ELGDVRETMSY

SEQ ID NO: 5532 - protein, 11 aa, Severe acute respiratory syndrome-related coronavirus
  REGION 1..11: note = Table A: HLA-A*02:11H HLA-A*02:02M HLA-B*38:02H
  source 1..11: note = Severe acute respiratory syndrome coronavirus 2
YLFQHANLDSC

SEQ ID NO: 5533 - protein, 11 aa, Severe acute respiratory syndrome-related coronavirus
  REGION 1..11: note = Table A: HLA-A*36:01H HLA-A*30:02H HLA-B*57:03H
  source 1..11: note = Severe acute respiratory syndrome coronavirus 2
TTLKGVEAVMY

SEQ ID NO: 5534 - protein, 11 aa, Severe acute respiratory syndrome-related coronavirus
  REGION 1..11: note = Table A: HLA-A*02:02H HLA-A*02:03H
  source 1..11: note = Severe acute respiratory syndrome coronavirus 2
TLKGVEAVMYM

SEQ ID NO: 5535 - protein, 11 aa, Severe acute respiratory syndrome-related coronavirus
  REGION 1..11: note = Table A: HLA-C*14:03H HLA-A*24:02M HLA-A*24:07H HLA-C*08:01H HLA-A*23:01M
  source 1..11: note = Severe acute respiratory syndrome coronavirus 2
MYMGTLSYEQF

SEQ ID NO: 5536 - protein, 11 aa, Severe acute respiratory syndrome-related coronavirus
  REGION 1..11: note = Table A: HLA-A*36:01H
  source 1..11: note = Severe acute respiratory syndrome coronavirus 2
YMGTLSYEQFK

SEQ ID NO: 5537 - protein, 11 aa, Severe acute respiratory syndrome-related coronavirus
  REGION 1..11: note = Table A: HLA-B*45:01H
  source 1..11: note = Severe acute respiratory syndrome coronavirus 2
YEQFKKGVQIP

SEQ ID NO: 5538 - protein, 11 aa, Severe acute respiratory syndrome-related coronavirus
  REGION 1..11: note = Table A: HLA-B*45:01H
  source 1..11: note = Severe acute respiratory syndrome coronavirus 2
QESPFVMMSAP

SEQ ID NO: 5539 - protein, 11 aa, Severe acute respiratory syndrome-related coronavirus
  REGION 1..11: note = Table A: HLA-B*55:02H
  source 1..11: note = Severe acute respiratory syndrome coronavirus 2
SPFVMMSAPPA

SEQ ID NO: 5540 - protein, 11 aa, Severe acute respiratory syndrome-related coronavirus
  REGION 1..11: note = Table A: HLA-A*29:02H
  source 1..11: note = Severe acute respiratory syndrome coronavirus 2
FVMMSAPPAQY

SEQ ID NO: 5541 - protein, 11 aa, Severe acute respiratory syndrome-related coronavirus
  REGION 1..11: note = Table A: HLA-A*02:02H
  source 1..11: note = Severe acute respiratory syndrome coronavirus 2
MMSAPPAQYEL

SEQ ID NO: 5542 - protein, 11 aa, Severe acute respiratory syndrome-related coronavirus
  REGION 1..11: note = Table A: HLA-A*03:02H HLA-A*11:01H HLA-A*11:02H HLA-A*36:01H HLA-A*68:01H HLA-A*68:02H HLA-A*34:02M
  source 1..11: note = Severe acute respiratory syndrome coronavirus 2
MSAPPAQYELK

SEQ ID NO: 5543 - protein, 11 aa, Severe acute respiratory syndrome-related coronavirus
  REGION 1..11: note = Table A: HLA-B*40:06H HLA-B*50:01M
  source 1..11: note = Severe acute respiratory syndrome coronavirus 2
YELKHGTFTCA

SEQ ID NO: 5544 - protein, 11 aa, Severe acute respiratory syndrome-related coronavirus
  REGION 1..11: note = Table A: HLA-A*34:02H
  source 1..11: note = Severe acute respiratory syndrome coronavirus 2
YTGNYQCGHYK

SEQ ID NO: 5545 - protein, 11 aa, Severe acute respiratory syndrome-related coronavirus
  REGION 1..11: note = Table A: HLA-A*24:07H
  source 1..11: note = Severe acute respiratory syndrome coronavirus 2
HYKHITSKETL

SEQ ID NO: 5546 - protein, 11 aa, Severe acute respiratory syndrome-related coronavirus
  REGION 1..11: note = Table A: HLA-B*15:03M
  source 1..11: note = Severe acute respiratory syndrome coronavirus 2
YKHITSKETLY

SEQ ID NO: 5547 - protein, 11 aa, Severe acute respiratory syndrome-related coronavirus
  REGION 1..11: note = Table A: HLA-B*18:01H HLA-B*35:01H
  source 1..11: note = Severe acute respiratory syndrome coronavirus 2
DGALLTKSSEY

SEQ ID NO: 5548 - protein, 11 aa, Severe acute respiratory syndrome-related coronavirus
  REGION 1..11: note = Table A: HLA-B*44:02H HLA-B*44:05M HLA-B*45:01H HLA-B*44:03M HLA-B*18:01H HLA-B*38:02H HLA-B*40:01M HLA-B*40:02H HLA-B*07:05H HLA-B*13:01H HLA-B*49:01H
  source 1..11: note = Severe acute respiratory syndrome coronavirus 2
SEYKGPITDVF

SEQ ID NO: 5549 - protein, 11 aa, Severe acute respiratory syndrome-related coronavirus
  REGION 1..11: note = Table A: HLA-A*33:03H HLA-A*29:02H HLA-A*30:02H
  source 1..11: note = Severe acute respiratory syndrome coronavirus 2
EYKGPITDVFY

SEQ ID NO: 5550 - protein, 11 aa, Severe acute respiratory syndrome-related coronavirus
  REGION 1..11: note = Table A: HLA-A*36:01M HLA-A*01:01M
  source 1..11: note = Severe acute respiratory syndrome coronavirus 2
ITDVFYKENSY

SEQ ID NO: 5551 - protein, 11 aa, Severe acute respiratory syndrome-related coronavirus
  REGION 1..11: note = Table A: HLA-A*24:02H HLA-A*24:07H HLA-A*23:01H
  source 1..11: note = Severe acute respiratory syndrome coronavirus 2
FYKENSYTTTI

SEQ ID NO: 5552 - protein, 11 aa, Severe acute respiratory syndrome-related coronavirus
  REGION 1..11: note = Table A: HLA-B*45:01H
  source 1..11: note = Severe acute respiratory syndrome coronavirus 2
KENSYTTTIKP

SEQ ID NO: 5553 - protein, 11 aa, Severe acute respiratory syndrome-related coronavirus
  REGION 1..11: note = Table A: HLA-C*14:03H HLA-A*30:02H HLA-A*24:07H
  source 1..11: note = Severe acute respiratory syndrome coronavirus 2
SYTTTIKPVTY

SEQ ID NO: 5554 - protein, 11 aa, Severe acute respiratory syndrome-related coronavirus
  REGION 1..11: note = Table A: HLA-A*34:02M
  source 1..11: note = Severe acute respiratory syndrome coronavirus 2
YTTTIKPVTYK

SEQ ID NO: 5555 - protein, 11 aa, Severe acute respiratory syndrome-related coronavirus
  REGION 1..11: note = Table A: HLA-A*36:01H HLA-A*01:01H
  source 1..11: note = Severe acute respiratory syndrome coronavirus 2
CTEIDPKLDNY

SEQ ID NO: 5556 - protein, 11 aa, Severe acute respiratory syndrome-related coronavirus
  REGION 1..11: note = Table A: HLA-B*44:02M HLA-B*44:05M HLA-C*16:04H HLA-B*44:03H HLA-B*18:01M HLA-A*30:02M HLA-B*38:02H HLA-B*39:01H HLA-B*07:05H
  source 1..11: note = Severe acute respiratory syndrome coronavirus 2
TEIDPKLDNYY

SEQ ID NO: 5557 - protein, 11 aa, Severe acute respiratory syndrome-related coronavirus
  REGION 1..11: note = Table A: HLA-A*36:01M HLA-A*34:02H
  source 1..11: note = Severe acute respiratory syndrome coronavirus 2
EIDPKLDNYYK

SEQ ID NO: 5558 - protein, 11 aa, Severe acute respiratory syndrome-related coronavirus
  REGION 1..11: note = Table A: HLA-A*33:01H
  source 1..11: note = Severe acute respiratory syndrome coronavirus 2
DNYYKKDNSYF

SEQ ID NO: 5559 - protein, 11 aa, Severe acute respiratory syndrome-related coronavirus
  REGION 1..11: note = Table A: HLA-B*35:01M HLA-B*35:07M HLA-B*38:02H HLA-B*15:11M
  source 1..11: note = Severe acute respiratory syndrome coronavirus 2
QPIDLVPNQPY

SEQ ID NO: 5560 - protein, 11 aa, Severe acute respiratory syndrome-related coronavirus
  REGION 1..11: note = Table A: HLA-B*42:01H HLA-B*55:02H HLA-C*15:05M HLA-B*35:01H HLA-B*07:02M HLA-B*07:04H HLA-B*07:05M HLA-B*15:11H
  source 1..11: note = Severe acute respiratory syndrome coronavirus 2
VPNQPYPNASF

SEQ ID NO: 5561 - protein, 11 aa, Severe acute respiratory syndrome-related coronavirus
  REGION 1..11: note = Table A: HLA-B*53:01M HLA-C*15:05H HLA-B*35:01H HLA-B*35:07H HLA-B*38:02H HLA-B*07:05H
  source 1..11: note = Severe acute respiratory syndrome coronavirus 2
QPYPNASFDNF

SEQ ID NO: 5562 - protein, 11 aa, Severe acute respiratory syndrome-related coronavirus
  REGION 1..11: note = Table A: HLA-B*53:01M HLA-B*35:01H HLA-B*35:07H
  source 1..11: note = Severe acute respiratory syndrome coronavirus 2
YPNASFDNFKF

SEQ ID NO: 5563 - protein, 11 aa, Severe acute respiratory syndrome-related coronavirus
  REGION 1..11: note = Table A: HLA-A*02:05H HLA-C*08:01H HLA-C*08:03H
  source 1..11: note = Severe acute respiratory syndrome coronavirus 2
NIKFADDLNQL

SEQ ID NO: 5564 - protein, 11 aa, Severe acute respiratory syndrome-related coronavirus
  REGION 1..11: note = Table A: HLA-A*36:01H HLA-A*01:01H HLA-B*35:01H HLA-B*35:08H HLA-B*35:07H HLA-B*38:02H
  source 1..11: note = Severe acute respiratory syndrome coronavirus 2
FADDLNQLTGY

SEQ ID NO: 5565 - protein, 11 aa, Severe acute respiratory syndrome-related coronavirus
  REGION 1..11: note = Table A: HLA-B*07:04H
  source 1..11: note = Severe acute respiratory syndrome coronavirus 2
KPASRELKVTF

SEQ ID NO: 5566 - protein, 11 aa, Severe acute respiratory syndrome-related coronavirus
  REGION 1..11: note = Table A: HLA-B*53:01H HLA-B*35:03M HLA-C*15:05H HLA-B*35:01H HLA-B*35:02M HLA-B*35:08M HLA-B*35:12M HLA-B*38:02H
  source 1..11: note = Severe acute respiratory syndrome coronavirus 2
FPDLNGDVVAI

SEQ ID NO: 5567 - protein, 11 aa, Severe acute respiratory syndrome-related coronavirus
  REGION 1..11: note = Table A: HLA-A*68:02H
  source 1..11: note = Severe acute respiratory syndrome coronavirus 2
DVVAIDYKHYT

SEQ ID NO: 5568 - protein, 11 aa, Severe acute respiratory syndrome-related coronavirus
  REGION 1..11: note = Table A: HLA-A*03:01H
  source 1..11: note = Severe acute respiratory syndrome coronavirus 2
IDYKHYTPSFK

SEQ ID NO: 5569 - protein, 11 aa, Severe acute respiratory syndrome-related coronavirus
  REGION 1..11: note = Table A: HLA-A*33:01H
  source 1..11: note = Severe acute respiratory syndrome coronavirus 2
DYKHYTPSFKK

SEQ ID NO: 5570 - protein, 11 aa, Severe acute respiratory syndrome-related coronavirus
  REGION 1..11: note = Table A: HLA-B*07:04H
  source 1..11: note = Severe acute respiratory syndrome coronavirus 2
TPSFKKGAKLL

SEQ ID NO: 5571 - protein, 11 aa, Severe acute respiratory syndrome-related coronavirus
  REGION 1..11: note = Table A: HLA-B*57:03H
  source 1..11: note = Severe acute respiratory syndrome coronavirus 2
GAKLLHKPIVW

SEQ ID NO: 5572 - protein, 11 aa, Severe acute respiratory syndrome-related coronavirus
  REGION 1..11: note = Table A: HLA-A*02:11M
  source 1..11: note = Severe acute respiratory syndrome coronavirus 2
KLLHKPIVWHV

SEQ ID NO: 5573 - protein, 11 aa, Severe acute respiratory syndrome-related coronavirus
  REGION 1..11: note = Table A: HLA-A*03:01H HLA-A*03:02H HLA-A*34:02H
  source 1..11: note = Severe acute respiratory syndrome coronavirus 2
IVWHVNNATNK

SEQ ID NO: 5574 - protein, 11 aa, Severe acute respiratory syndrome-related coronavirus
  REGION 1..11: note = Table A: HLA-B*58:01H HLA-A*03:02H HLA-A*36:01H HLA-A*25:01H HLA-B*46:01H HLA-A*26:01M HLA-A*26:02H HLA-A*29:02H HLA-A*30:02H HLA-C*12:02H HLA-B*35:01M HLA-B*35:08H HLA-B*35:07M HLA-B*38:02M HLA-A*32:01H HLA-B*15:01H
  REGION 1..11: note = CONT. FROM ABOVE: HLA-B*15:02H HLA-B*07:05H HLA-B*15:11H
  source 1..11: note = Severe acute respiratory syndrome coronavirus 2
HVNNATNKATY

SEQ ID NO: 5575 - protein, 11 aa, Severe acute respiratory syndrome-related coronavirus
  REGION 1..11: note = Table A: HLA-A*74:01M HLA-A*31:01H
  source 1..11: note = Severe acute respiratory syndrome coronavirus 2
ATYKPNTWCIR

SEQ ID NO: 5576 - protein, 11 aa, Severe acute respiratory syndrome-related coronavirus
  REGION 1..11: note = Table A: HLA-B*58:02H HLA-B*57:01M HLA-A*25:01H HLA-B*46:01H HLA-A*30:02H HLA-C*12:02H HLA-B*38:02H HLA-B*15:01H HLA-B*57:03M
  source 1..11: note = Severe acute respiratory syndrome coronavirus 2
STKPVETSNSF

SEQ ID NO: 5577 - protein, 11 aa, Severe acute respiratory syndrome-related coronavirus
  REGION 1..11: note = Table A: HLA-B*55:02H HLA-C*15:05H
  source 1..11: note = Severe acute respiratory syndrome coronavirus 2
KPVETSNSFDV

SEQ ID NO: 5578 - protein, 11 aa, Severe acute respiratory syndrome-related coronavirus
  REGION 1..11: note = Table A: HLA-B*45:01H
  source 1..11: note = Severe acute respiratory syndrome coronavirus 2
SEDAQGMDNLA

SEQ ID NO: 5579 - protein, 11 aa, Severe acute respiratory syndrome-related coronavirus
  REGION 1..11: note = Table A: HLA-B*44:05M HLA-B*40:01M HLA-B*40:02M HLA-B*41:02M
  source 1..11: note = Severe acute respiratory syndrome coronavirus 2
VENPTIQKDVL

SEQ ID NO: 5580 - protein, 11 aa, Severe acute respiratory syndrome-related coronavirus
  REGION 1..11: note = Table A: HLA-B*57:03M
  source 1..11: note = Severe acute respiratory syndrome coronavirus 2
KTTEVVGDIIL

SEQ ID NO: 5581 - protein, 11 aa, Severe acute respiratory syndrome-related coronavirus
  REGION 1..11: note = Table A: HLA-A*03:02H HLA-A*11:01H HLA-A*11:02H HLA-A*36:01H HLA-A*68:01H HLA-A*34:02H
  source 1..11: note = Severe acute respiratory syndrome coronavirus 2
TTEVVGDIILK

SEQ ID NO: 5582 - protein, 11 aa, Severe acute respiratory syndrome-related coronavirus
  REGION 1..11: note = Table A: HLA-B*45:01H HLA-B*40:06H
  source 1..11: note = Severe acute respiratory syndrome coronavirus 2
TEVVGDIILKP

SEQ ID NO: 5583 - protein, 11 aa, Severe acute respiratory syndrome-related coronavirus
  REGION 1..11: note = Table A: HLA-A*68:02H
  source 1..11: note = Severe acute respiratory syndrome coronavirus 2
EVVGDIILKPA

SEQ ID NO: 5584 - protein, 11 aa, Severe acute respiratory syndrome-related coronavirus
  REGION 1..11: note = Table A: HLA-B*08:01H
  source 1..11: note = Severe acute respiratory syndrome coronavirus 2
DIILKPANNSL

SEQ ID NO: 5585 - protein, 11 aa, Severe acute respiratory syndrome-related coronavirus
  REGION 1..11: note = Table A: HLA-A*03:02H
  source 1..11: note = Severe acute respiratory syndrome coronavirus 2
IILKPANNSLK

SEQ ID NO: 5586 - protein, 11 aa, Severe acute respiratory syndrome-related coronavirus
  REGION 1..11: note = Table A: HLA-C*08:03H
  source 1..11: note = Severe acute respiratory syndrome coronavirus 2
KITEEVGHTDL

SEQ ID NO: 5587 - protein, 11 aa, Severe acute respiratory syndrome-related coronavirus
  REGION 1..11: note = Table A: HLA-A*36:01H HLA-A*01:01H HLA-C*04:03H
  source 1..11: note = Severe acute respiratory syndrome coronavirus 2
ITEEVGHTDLM

SEQ ID NO: 5588 - protein, 11 aa, Severe acute respiratory syndrome-related coronavirus
  REGION 1..11: note = Table A: HLA-B*45:01H
  source 1..11: note = Severe acute respiratory syndrome coronavirus 2
TEEVGHTDLMA

SEQ ID NO: 5589 - protein, 11 aa, Severe acute respiratory syndrome-related coronavirus
  REGION 1..11: note = Table A: HLA-B*45:01M HLA-B*40:06H HLA-B*50:01M
  source 1..11: note = Severe acute respiratory syndrome coronavirus 2
EEVGHTDLMAA

SEQ ID NO: 5590 - protein, 11 aa, Severe acute respiratory syndrome-related coronavirus
  REGION 1..11: note = Table A: HLA-A*25:01H HLA-A*26:01H HLA-A*26:02H
  source 1..11: note = Severe acute respiratory syndrome coronavirus 2
EVGHTDLMAAY

SEQ ID NO: 5591 - protein, 11 aa, Severe acute respiratory syndrome-related coronavirus
  REGION 1..11: note = Table A: HLA-A*02:02H
  source 1..11: note = Severe acute respiratory syndrome coronavirus 2
LMAAYVDNSSL

SEQ ID NO: 5592 - protein, 11 aa, Severe acute respiratory syndrome-related coronavirus
  REGION 1..11: note = Table A: HLA-A*11:01H HLA-B*27:02H HLA-A*30:02H HLA-A*23:01H
  source 1..11: note = Severe acute respiratory syndrome coronavirus 2
AYVDNSSLTIK

SEQ ID NO: 5593 - protein, 11 aa, Severe acute respiratory syndrome-related coronavirus
  REGION 1..11: note = Table A: HLA-A*11:303H HLA-A*03:01H HLA-A*03:02M HLA-A*11:01H HLA-A*11:02H HLA-A*36:01H HLA-A*68:01H HLA-A*02:07H HLA-A*34:02M HLA-C*07:27H
  source 1..11: note = Severe acute respiratory syndrome coronavirus 2
YVDNSSLTIKK

SEQ ID NO: 5594 - protein, 11 aa, Severe acute respiratory syndrome-related coronavirus
  REGION 1..11: note = Table A: HLA-A*74:01H
  source 1..11: note = Severe acute respiratory syndrome coronavirus 2
LTIKKPNELSR

SEQ ID NO: 5595 - protein, 11 aa, Severe acute respiratory syndrome-related coronavirus
  REGION 1..11: note = Table A: HLA-B*42:01H HLA-C*15:05H HLA-B*07:02H HLA-B*07:04M
  source 1..11: note = Severe acute respiratory syndrome coronavirus 2
KPNELSRVLGL

SEQ ID NO: 5596 - protein, 11 aa, Severe acute respiratory syndrome-related coronavirus
  REGION 1..11: note = Table A: HLA-A*02:11H HLA-A*02:08H HLA-B*57:03H
  source 1..11: note = Severe acute respiratory syndrome coronavirus 2
KTLATHGLAAV

SEQ ID NO: 5597 - protein, 11 aa, Severe acute respiratory syndrome-related coronavirus
  REGION 1..11: note = Table A: HLA-C*08:01H HLA-B*38:02H
  source 1..11: note = Severe acute respiratory syndrome coronavirus 2
AAVNSVPWDTI

SEQ ID NO: 5598 - protein, 11 aa, Severe acute respiratory syndrome-related coronavirus
  REGION 1..11: note = Table A: HLA-A*26:01H HLA-A*30:02M
  source 1..11: note = Severe acute respiratory syndrome coronavirus 2
NSVPWDTIANY

SEQ ID NO: 5599 - protein, 11 aa, Severe acute respiratory syndrome-related coronavirus
  REGION 1..11: note = Table A: HLA-A*02:05H
  source 1..11: note = Severe acute respiratory syndrome coronavirus 2
SVPWDTIANYA

SEQ ID NO: 5600 - protein, 11 aa, Severe acute respiratory syndrome-related coronavirus
  REGION 1..11: note = Table A: HLA-B*55:02H HLA-B*07:04H
  source 1..11: note = Severe acute respiratory syndrome coronavirus 2
KPFLNKVVSTT

SEQ ID NO: 5601 - protein, 11 aa, Severe acute respiratory syndrome-related coronavirus
  REGION 1..11: note = Table A: HLA-A*02:08H
  source 1..11: note = Severe acute respiratory syndrome coronavirus 2
KVVSTTTNIVT

SEQ ID NO: 5602 - protein, 11 aa, Severe acute respiratory syndrome-related coronavirus
  REGION 1..11: note = Table A: HLA-A*11:303H HLA-A*74:01H HLA-A*03:01H HLA-A*03:02M HLA-A*11:01M HLA-A*11:02M HLA-A*36:01H HLA-B*57:01H HLA-A*33:01H HLA-A*33:03M HLA-B*27:02H HLA-A*30:02H HLA-A*68:01H HLA-A*68:02H HLA-A*34:01H
  REGION 1..11: note = CONT. FROM ABOVE: HLA-A*34:02H HLA-C*07:27H HLA-A*31:01M HLA- A*66:01H
  source 1..11: note = Severe acute respiratory syndrome coronavirus 2
VVSTTTNIVTR

SEQ ID NO: 5603 - protein, 11 aa, Severe acute respiratory syndrome-related coronavirus
  REGION 1..11: note = Table A: HLA-A*74:01H
  source 1..11: note = Severe acute respiratory syndrome coronavirus 2
TTNIVTRCLNR

SEQ ID NO: 5604 - protein, 11 aa, Severe acute respiratory syndrome-related coronavirus
  REGION 1..11: note = Table A: HLA-A*24:07H
  source 1..11: note = Severe acute respiratory syndrome coronavirus 2
NYMPYFFTLLL

SEQ ID NO: 5605 - protein, 11 aa, Severe acute respiratory syndrome-related coronavirus
  REGION 1..11: note = Table A: HLA-B*38:02H
  source 1..11: note = Severe acute respiratory syndrome coronavirus 2
SRIKASMPTTI

SEQ ID NO: 5606 - protein, 11 aa, Severe acute respiratory syndrome-related coronavirus
  REGION 1..11: note = Table A: HLA-A*02:11H HLA-A*02:07H
  source 1..11: note = Severe acute respiratory syndrome coronavirus 2
SMPTTIAKNTV

SEQ ID NO: 5607 - protein, 11 aa, Severe acute respiratory syndrome-related coronavirus
  REGION 1..11: note = Table A: HLA-B*56:01H HLA-B*55:02H HLA-A*34:02H HLA-B*54:01H
  source 1..11: note = Severe acute respiratory syndrome coronavirus 2
MPTTIAKNTVK

SEQ ID NO: 5608 - protein, 11 aa, Severe acute respiratory syndrome-related coronavirus
  REGION 1..11: note = Table A: HLA-A*02:08H
  source 1..11: note = Severe acute respiratory syndrome coronavirus 2
TTIAKNTVKSV

SEQ ID NO: 5609 - protein, 11 aa, Severe acute respiratory syndrome-related coronavirus
  REGION 1..11: note = Table A: HLA-B*15:03H
  source 1..11: note = Severe acute respiratory syndrome coronavirus 2
AKNTVKSVGKF

SEQ ID NO: 5610 - protein, 11 aa, Severe acute respiratory syndrome-related coronavirus
  REGION 1..11: note = Table A: HLA-B*58:02H HLA-B*57:03M
  source 1..11: note = Severe acute respiratory syndrome coronavirus 2
ASFNYLKSPNF

SEQ ID NO: 5611 - protein, 11 aa, Severe acute respiratory syndrome-related coronavirus
  REGION 1..11: note = Table A: HLA-A*24:07H HLA-A*23:01H
  source 1..11: note = Severe acute respiratory syndrome coronavirus 2
NYLKSPNFSKL

SEQ ID NO: 5612 - protein, 11 aa, Severe acute respiratory syndrome-related coronavirus
  REGION 1..11: note = Table A: HLA-B*58:02M HLA-A*74:01H HLA-A*02:11M HLA-A*02:08H HLA-B*57:03M
  source 1..11: note = Severe acute respiratory syndrome coronavirus 2
KSPNFSKLINI

SEQ ID NO: 5613 - protein, 11 aa, Severe acute respiratory syndrome-related coronavirus
  REGION 1..11: note = Table A: HLA-B*42:01H HLA-B*55:02H HLA-C*15:05H HLA-B*07:04M
  source 1..11: note = Severe acute respiratory syndrome coronavirus 2
SPNFSKLINII

SEQ ID NO: 5614 - protein, 11 aa, Severe acute respiratory syndrome-related coronavirus
  REGION 1..11: note = Table A: HLA-A*24:02H HLA-A*24:07M HLA-A*23:01H
  source 1..11: note = Severe acute respiratory syndrome coronavirus 2
IYSTAALGVLM

SEQ ID NO: 5615 - protein, 11 aa, Severe acute respiratory syndrome-related coronavirus
  REGION 1..11: note = Table A: HLA-A*30:02H
  source 1..11: note = Severe acute respiratory syndrome coronavirus 2
VLMSNLGMPSY

SEQ ID NO: 5616 - protein, 11 aa, Severe acute respiratory syndrome-related coronavirus
  REGION 1..11: note = Table A: HLA-B*51:01M
  source 1..11: note = Severe acute respiratory syndrome coronavirus 2
EGYLNSTNVTI

SEQ ID NO: 5617 - protein, 11 aa, Severe acute respiratory syndrome-related coronavirus
  REGION 1..11: note = Table A: HLA-A*02:07H
  source 1..11: note = Severe acute respiratory syndrome coronavirus 2
GLDSLDTYPSL

SEQ ID NO: 5618 - protein, 11 aa, Severe acute respiratory syndrome-related coronavirus
  REGION 1..11: note = Table A: HLA-A*68:01H HLA-A*68:02M HLA-A*34:02H HLA-A*66:01H
  source 1..11: note = Severe acute respiratory syndrome coronavirus 2
DTYPSLETIQI

SEQ ID NO: 5619 - protein, 11 aa, Severe acute respiratory syndrome-related coronavirus
  REGION 1..11: note = Table A: HLA-C*15:05H HLA-B*54:01H
  source 1..11: note = Severe acute respiratory syndrome coronavirus 2
YPSLETIQITI

SEQ ID NO: 5620 - protein, 11 aa, Severe acute respiratory syndrome-related coronavirus
  REGION 1..11: note = Table A: HLA-A*26:03H HLA-A*68:01H HLA-A*34:01H HLA-A*34:02H HLA-A*66:01M
  source 1..11: note = Severe acute respiratory syndrome coronavirus 2
ETIQITISSFK

SEQ ID NO: 5621 - protein, 11 aa, Severe acute respiratory syndrome-related coronavirus
  REGION 1..11: note = Table A: HLA-A*02:11H HLA-A*02:04H
  source 1..11: note = Severe acute respiratory syndrome coronavirus 2
YVLGLAAIMQL

SEQ ID NO: 5622 - protein, 11 aa, Severe acute respiratory syndrome-related coronavirus
  REGION 1..11: note = Table A: HLA-A*24:07H
  source 1..11: note = Severe acute respiratory syndrome coronavirus 2
YFAVHFISNSW

SEQ ID NO: 5623 - protein, 11 aa, Severe acute respiratory syndrome-related coronavirus
  REGION 1..11: note = Table A: HLA-C*03:03H HLA-C*03:04M HLA-C*17:01H
  source 1..11: note = Severe acute respiratory syndrome coronavirus 2
FAVHFISNSWL

SEQ ID NO: 5624 - protein, 11 aa, Severe acute respiratory syndrome-related coronavirus
  REGION 1..11: note = Table A: HLA-A*74:01H
  source 1..11: note = Severe acute respiratory syndrome coronavirus 2
VQMAPISAMVR

SEQ ID NO: 5625 - protein, 11 aa, Severe acute respiratory syndrome-related coronavirus
  REGION 1..11: note = Table A: HLA-A*02:11H HLA-A*02:02H
  source 1..11: note = Severe acute respiratory syndrome coronavirus 2
QMAPISAMVRM

SEQ ID NO: 5626 - protein, 11 aa, Severe acute respiratory syndrome-related coronavirus
  REGION 1..11: note = Table A: HLA-C*15:05H
  source 1..11: note = Severe acute respiratory syndrome coronavirus 2
APISAMVRMYI

SEQ ID NO: 5627 - protein, 11 aa, Severe acute respiratory syndrome-related coronavirus
  REGION 1..11: note = Table A: HLA-A*33:03H HLA-A*68:01H HLA-A*34:01H
  source 1..11: note = Severe acute respiratory syndrome coronavirus 2
ECTTIVNGVRR

SEQ ID NO: 5628 - protein, 11 aa, Severe acute respiratory syndrome-related coronavirus
  REGION 1..11: note = Table A: HLA-C*14:02H HLA-C*14:03H HLA-A*24:07M HLA-A*23:01H
  source 1..11: note = Severe acute respiratory syndrome coronavirus 2
FYVYANGGKGF

SEQ ID NO: 5629 - protein, 11 aa, Severe acute respiratory syndrome-related coronavirus
  REGION 1..11: note = Table A: HLA-C*14:03H
  source 1..11: note = Severe acute respiratory syndrome coronavirus 2
TFISDEVARDL

SEQ ID NO: 5630 - protein, 11 aa, Severe acute respiratory syndrome-related coronavirus
  REGION 1..11: note = Table A: HLA-C*04:03H HLA-C*15:02H HLA-A*02:07H HLA-C*08:01H HLA-C*08:02M
  source 1..11: note = Severe acute respiratory syndrome coronavirus 2
ISDEVARDLSL

SEQ ID NO: 5631 - protein, 11 aa, Severe acute respiratory syndrome-related coronavirus
  REGION 1..11: note = Table A: HLA-B*18:01H
  source 1..11: note = Severe acute respiratory syndrome coronavirus 2
DEVARDLSLQF

SEQ ID NO: 5632 - protein, 11 aa, Severe acute respiratory syndrome-related coronavirus
  REGION 1..11: note = Table A: HLA-A*33:03H HLA-A*68:01H HLA-A*68:02H HLA-A*34:01M HLA-A*34:02M HLA-A*66:01H
  source 1..11: note = Severe acute respiratory syndrome coronavirus 2
EVARDLSLQFK

SEQ ID NO: 5633 - protein, 11 aa, Severe acute respiratory syndrome-related coronavirus
  REGION 1..11: note = Table A: HLA-A*74:01H
  source 1..11: note = Severe acute respiratory syndrome coronavirus 2
VARDLSLQFKR

SEQ ID NO: 5634 - protein, 11 aa, Severe acute respiratory syndrome-related coronavirus
  REGION 1..11: note = Table A: HLA-B*53:01H HLA-B*55:02H HLA-A*30:02M HLA-C*15:05M HLA-B*35:01H HLA-B*35:08M HLA-B*35:07M HLA-B*38:02H HLA-B*07:02H HLA-B*15:01H HLA-B*15:02H HLA-B*15:03H HLA-B*07:05M HLA-B*15:11M
  source 1..11: note = Severe acute respiratory syndrome coronavirus 2
RPINPTDQSSY

SEQ ID NO: 5635 - protein, 11 aa, Severe acute respiratory syndrome-related coronavirus
  REGION 1..11: note = Table A: HLA-A*68:02H
  source 1..11: note = Severe acute respiratory syndrome coronavirus 2
QSSYIVDSVTV

SEQ ID NO: 5636 - protein, 11 aa, Severe acute respiratory syndrome-related coronavirus
  REGION 1..11: note = Table A: HLA-A*11:303H HLA-A*03:01H HLA-A*03:02H HLA-A*11:01M HLA-A*11:02M HLA-A*34:02H HLA-C*07:27H
  source 1..11: note = Severe acute respiratory syndrome coronavirus 2
SSYIVDSVTVK

SEQ ID NO: 5637 - protein, 11 aa, Severe acute respiratory syndrome-related coronavirus
  REGION 1..11: note = Table A: HLA-B*58:01H HLA-A*36:01M HLA-B*57:01H HLA-A*30:02M HLA-B*57:03H
  source 1..11: note = Severe acute respiratory syndrome coronavirus 2
VTVKNGSIHLY

SEQ ID NO: 5638 - protein, 11 aa, Severe acute respiratory syndrome-related coronavirus
  REGION 1..11: note = Table A: HLA-A*24:07M HLA-A*66:01H
  source 1..11: note = Severe acute respiratory syndrome coronavirus 2
TVKNGSIHLYF

SEQ ID NO: 5639 - protein, 11 aa, Severe acute respiratory syndrome-related coronavirus
  REGION 1..11: note = Table A: HLA-C*14:02H HLA-C*14:03M HLA-A*29:02H HLA-A*30:02M HLA-A*24:07H
  source 1..11: note = Severe acute respiratory syndrome coronavirus 2
LYFDKAGQKTY

SEQ ID NO: 5640 - protein, 11 aa, Severe acute respiratory syndrome-related coronavirus
  REGION 1..11: note = Table A: HLA-C*04:03H
  source 1..11: note = Severe acute respiratory syndrome coronavirus 2
YFDKAGQKTYE

SEQ ID NO: 5641 - protein, 11 aa, Severe acute respiratory syndrome-related coronavirus
  REGION 1..11: note = Table A: HLA-A*33:01H
  source 1..11: note = Severe acute respiratory syndrome coronavirus 2
FDKAGQKTYER

SEQ ID NO: 5642 - protein, 11 aa, Severe acute respiratory syndrome-related coronavirus
  REGION 1..11: note = Table A: HLA-B*58:02H HLA-B*57:03H
  source 1..11: note = Severe acute respiratory syndrome coronavirus 2
KTYERHSLSHF

SEQ ID NO: 5643 - protein, 11 aa, Severe acute respiratory syndrome-related coronavirus
  REGION 1..11: note = Table A: HLA-A*02:04H HLA-A*02:02M HLA-B*38:02H
  source 1..11: note = Severe acute respiratory syndrome coronavirus 2
SLSHFVNLDNL

SEQ ID NO: 5644 - protein, 11 aa, Severe acute respiratory syndrome-related coronavirus
  REGION 1..11: note = Table A: HLA-A*36:01H
  source 1..11: note = Severe acute respiratory syndrome coronavirus 2
LSHFVNLDNLR

SEQ ID NO: 5645 - protein, 11 aa, Severe acute respiratory syndrome-related coronavirus
  REGION 1..11: note = Table A: HLA-B*38:02H
  source 1..11: note = Severe acute respiratory syndrome coronavirus 2
SHFVNLDNLRA

SEQ ID NO: 5646 - protein, 11 aa, Severe acute respiratory syndrome-related coronavirus
  REGION 1..11: note = Table A: HLA-B*57:03H
  source 1..11: note = Severe acute respiratory syndrome coronavirus 2
KSASVYYSQLM

SEQ ID NO: 5647 - protein, 11 aa, Severe acute respiratory syndrome-related coronavirus
  REGION 1..11: note = Table A: HLA-A*02:11H HLA-A*68:02M HLA-A*02:05H HLA-A*02:06H HLA-A*02:07H HLA-A*02:08H HLA-A*02:02H
  source 1..11: note = Severe acute respiratory syndrome coronavirus 2
LVSDVGDSAEV

SEQ ID NO: 5648 - protein, 11 aa, Severe acute respiratory syndrome-related coronavirus
  REGION 1..11: note = Table A: HLA-A*26:03H HLA-A*68:01H HLA-A*34:02H
  source 1..11: note = Severe acute respiratory syndrome coronavirus 2
DVGDSAEVAVK

SEQ ID NO: 5649 - protein, 11 aa, Severe acute respiratory syndrome-related coronavirus
  REGION 1..11: note = Table A: HLA-C*04:03H
  source 1..11: note = Severe acute respiratory syndrome coronavirus 2
VGDSAEVAVKM

SEQ ID NO: 5650 - protein, 11 aa, Severe acute respiratory syndrome-related coronavirus
  REGION 1..11: note = Table A: HLA-B*44:03H
  source 1..11: note = Severe acute respiratory syndrome coronavirus 2
AEVAVKMFDAY

SEQ ID NO: 5651 - protein, 11 aa, Severe acute respiratory syndrome-related coronavirus
  REGION 1..11: note = Table A: HLA-A*68:02H
  source 1..11: note = Severe acute respiratory syndrome coronavirus 2
EVAVKMFDAYV

SEQ ID NO: 5652 - protein, 11 aa, Severe acute respiratory syndrome-related coronavirus
  REGION 1..11: note = Table A: HLA-C*15:05H HLA-B*51:01H HLA-B*38:02H
  source 1..11: note = Severe acute respiratory syndrome coronavirus 2
DAYVNTFSSTF

SEQ ID NO: 5653 - protein, 11 aa, Severe acute respiratory syndrome-related coronavirus
  REGION 1..11: note = Table A: HLA-A*11:01H HLA-A*11:02M HLA-A*34:02H
  source 1..11: note = Severe acute respiratory syndrome coronavirus 2
STFNVPMEKLK

SEQ ID NO: 5654 - protein, 11 aa, Severe acute respiratory syndrome-related coronavirus
  REGION 1..11: note = Table A: HLA-B*56:01M HLA-B*08:01H HLA-B*55:02M HLA-B*55:01M HLA-B*54:01M
  source 1..11: note = Severe acute respiratory syndrome coronavirus 2
VPMEKLKTLVA

SEQ ID NO: 5655 - protein, 11 aa, Severe acute respiratory syndrome-related coronavirus
  REGION 1..11: note = Table A: HLA-B*58:01H HLA-B*58:02H HLA-A*02:11H HLA-C*15:05H HLA-A*02:08M HLA-C*08:03H HLA-B*57:03H
  source 1..11: note = Severe acute respiratory syndrome coronavirus 2
KTLVATAEAEL

SEQ ID NO: 5656 - protein, 11 aa, Severe acute respiratory syndrome-related coronavirus
  REGION 1..11: note = Table A: HLA-A*11:01H HLA-A*02:11H HLA-A*68:02M HLA-A*02:05M HLA-A*02:06H HLA-A*02:08M HLA-A*02:02M
  source 1..11: note = Severe acute respiratory syndrome coronavirus 2
ATAEAELAKNV

SEQ ID NO: 5657 - protein, 11 aa, Severe acute respiratory syndrome-related coronavirus
  REGION 1..11: note = Table A: HLA-B*44:02M HLA-B*44:05H HLA-C*16:04H HLA-B*45:01M HLA-B*44:03M HLA-A*02:02H HLA-B*40:01H HLA-B*40:02H HLA-B*40:06H HLA-B*41:02H HLA-B*49:01H HLA-B*50:01H
  source 1..11: note = Severe acute respiratory syndrome coronavirus 2
AEAELAKNVSL

SEQ ID NO: 5658 - protein, 11 aa, Severe acute respiratory syndrome-related coronavirus
  REGION 1..11: note = Table A: HLA-B*38:02H
  source 1..11: note = Severe acute respiratory syndrome coronavirus 2
LAKNVSLDNVL

SEQ ID NO: 5659 - protein, 11 aa, Severe acute respiratory syndrome-related coronavirus
  REGION 1..11: note = Table A: HLA-B*57:03H
  source 1..11: note = Severe acute respiratory syndrome coronavirus 2
VSLDNVLSTFI

SEQ ID NO: 5660 - protein, 11 aa, Severe acute respiratory syndrome-related coronavirus
  REGION 1..11: note = Table A: HLA-A*34:01H HLA-A*66:01H
  source 1..11: note = Severe acute respiratory syndrome coronavirus 2
NVLSTFISAAR

SEQ ID NO: 5661 - protein, 11 aa, Severe acute respiratory syndrome-related coronavirus
  REGION 1..11: note = Table A: HLA-B*57:03H
  source 1..11: note = Severe acute respiratory syndrome coronavirus 2
STFISAARQGF

SEQ ID NO: 5662 - protein, 11 aa, Severe acute respiratory syndrome-related coronavirus
  REGION 1..11: note = Table A: HLA-B*27:02H
  source 1..11: note = Severe acute respiratory syndrome coronavirus 2
QGFVDSDVETK

SEQ ID NO: 5663 - protein, 11 aa, Severe acute respiratory syndrome-related coronavirus
  REGION 1..11: note = Table A: HLA-A*02:11H
  source 1..11: note = Severe acute respiratory syndrome coronavirus 2
YMLTYNKVENM

SEQ ID NO: 5664 - protein, 11 aa, Severe acute respiratory syndrome-related coronavirus
  REGION 1..11: note = Table A: HLA-A*74:01H HLA-A*33:01M HLA-A*33:03H HLA-A*31:01M
  source 1..11: note = Severe acute respiratory syndrome coronavirus 2
TYNKVENMTPR

SEQ ID NO: 5665 - protein, 11 aa, Severe acute respiratory syndrome-related coronavirus
  REGION 1..11: note = Table A: HLA-B*45:01M HLA-B*50:01H
  source 1..11: note = Severe acute respiratory syndrome coronavirus 2
VENMTPRDLGA

SEQ ID NO: 5666 - protein, 11 aa, Severe acute respiratory syndrome-related coronavirus
  REGION 1..11: note = Table A: HLA-A*02:11H
  source 1..11: note = Severe acute respiratory syndrome coronavirus 2
KSHNIALIWNV

SEQ ID NO: 5667 - protein, 11 aa, Severe acute respiratory syndrome-related coronavirus
  REGION 1..11: note = Table A: HLA-A*02:11H HLA-A*02:07H
  source 1..11: note = Severe acute respiratory syndrome coronavirus 2
LIWNVKDFMSL

SEQ ID NO: 5668 - protein, 11 aa, Severe acute respiratory syndrome-related coronavirus
  REGION 1..11: note = Table A: HLA-B*45:01H
  source 1..11: note = Severe acute respiratory syndrome coronavirus 2
SEQLRKQIRSA

SEQ ID NO: 5669 - protein, 11 aa, Severe acute respiratory syndrome-related coronavirus
  REGION 1..11: note = Table A: HLA-B*07:04H
  source 1..11: note = Severe acute respiratory syndrome coronavirus 2
AAKKNNLPFKL

SEQ ID NO: 5670 - protein, 11 aa, Severe acute respiratory syndrome-related coronavirus
  REGION 1..11: note = Table A: HLA-B*13:01H HLA-B*13:02M
  source 1..11: note = Severe acute respiratory syndrome coronavirus 2
RQVVNVVTTKI

SEQ ID NO: 5671 - protein, 11 aa, Severe acute respiratory syndrome-related coronavirus
  REGION 1..11: note = Table A: HLA-C*15:05H HLA-C*08:03H
  source 1..11: note = Severe acute respiratory syndrome coronavirus 2
VVNVVTTKIAL

SEQ ID NO: 5672 - protein, 11 aa, Severe acute respiratory syndrome-related coronavirus
  REGION 1..11: note = Table A: HLA-A*32:01H
  source 1..11: note = Severe acute respiratory syndrome coronavirus 2
ALKGGKIVNNW

SEQ ID NO: 5673 - protein, 11 aa, Severe acute respiratory syndrome-related coronavirus
  REGION 1..11: note = Table A: HLA-A*36:01H
  source 1..11: note = Severe acute respiratory syndrome coronavirus 2
KGGKIVNNWLK

SEQ ID NO: 5674 - protein, 11 aa, Severe acute respiratory syndrome-related coronavirus
  REGION 1..11: note = Table A: HLA-A*02:11M HLA-A*68:02H
  source 1..11: note = Severe acute respiratory syndrome coronavirus 2
AIFYLITPVHV

SEQ ID NO: 5675 - protein, 11 aa, Severe acute respiratory syndrome-related coronavirus
  REGION 1..11: note = Table A: HLA-C*14:03H HLA-A*24:07H
  source 1..11: note = Severe acute respiratory syndrome coronavirus 2
IFYLITPVHVM

SEQ ID NO: 5676 - protein, 11 aa, Severe acute respiratory syndrome-related coronavirus
  REGION 1..11: note = Table A: HLA-A*34:02H
  source 1..11: note = Severe acute respiratory syndrome coronavirus 2
YLITPVHVMSK

SEQ ID NO: 5677 - protein, 11 aa, Severe acute respiratory syndrome-related coronavirus
  REGION 1..11: note = Table A: HLA-B*58:01H HLA-A*36:01H HLA-A*01:01H HLA-A*34:02H HLA-B*35:08H
  source 1..11: note = Severe acute respiratory syndrome coronavirus 2
HTDFSSEIIGY

SEQ ID NO: 5678 - protein, 11 aa, Severe acute respiratory syndrome-related coronavirus
  REGION 1..11: note = Table A: HLA-A*11:01H HLA-A*11:02H HLA-B*27:02H HLA-A*34:02H
  source 1..11: note = Severe acute respiratory syndrome coronavirus 2
TDFSSEIIGYK

SEQ ID NO: 5679 - protein, 11 aa, Severe acute respiratory syndrome-related coronavirus
  REGION 1..11: note = Table A: HLA-A*26:03H
  source 1..11: note = Severe acute respiratory syndrome coronavirus 2
EIIGYKAIDGG

SEQ ID NO: 5680 - protein, 11 aa, Severe acute respiratory syndrome-related coronavirus
  REGION 1..11: note = Table A: HLA-A*74:01H HLA-A*33:01M HLA-A*33:03M HLA-A*31:01M
  source 1..11: note = Severe acute respiratory syndrome coronavirus 2
GYKAIDGGVTR

SEQ ID NO: 5681 - protein, 11 aa, Severe acute respiratory syndrome-related coronavirus
  REGION 1..11: note = Table A: HLA-B*58:02M HLA-A*02:11H HLA-C*08:01H HLA-B*57:03H
  source 1..11: note = Severe acute respiratory syndrome coronavirus 2
KAIDGGVTRDI

SEQ ID NO: 5682 - protein, 11 aa, Severe acute respiratory syndrome-related coronavirus
  REGION 1..11: note = Table A: HLA-B*38:01H HLA-B*38:02H
  source 1..11: note = Severe acute respiratory syndrome coronavirus 2
TRDIASTDTCF

SEQ ID NO: 5683 - protein, 11 aa, Severe acute respiratory syndrome-related coronavirus
  REGION 1..11: note = Table A: HLA-A*03:02H
  source 1..11: note = Severe acute respiratory syndrome coronavirus 2
IASTDTCFANK

SEQ ID NO: 5684 - protein, 11 aa, Severe acute respiratory syndrome-related coronavirus
  REGION 1..11: note = Table A: HLA-B*58:01H HLA-B*57:01H HLA-B*53:01M HLA-B*57:03M HLA-B*13:01H
  source 1..11: note = Severe acute respiratory syndrome coronavirus 2
FANKHADFDTW

SEQ ID NO: 5685 - protein, 11 aa, Severe acute respiratory syndrome-related coronavirus
  REGION 1..11: note = Table A: HLA-A*36:01H
  source 1..11: note = Severe acute respiratory syndrome coronavirus 2
HADFDTWFSQR

SEQ ID NO: 5686 - protein, 11 aa, Severe acute respiratory syndrome-related coronavirus
  REGION 1..11: note = Table A: HLA-A*36:01M HLA-A*26:01M HLA-A*01:01H HLA-A*34:02M HLA-A*66:01H
  source 1..11: note = Severe acute respiratory syndrome coronavirus 2
DTWFSQRGGSY

SEQ ID NO: 5687 - protein, 11 aa, Severe acute respiratory syndrome-related coronavirus
  REGION 1..11: note = Table A: HLA-B*57:03H
  source 1..11: note = Severe acute respiratory syndrome coronavirus 2
IAAVITREVGF

SEQ ID NO: 5688 - protein, 11 aa, Severe acute respiratory syndrome-related coronavirus
  REGION 1..11: note = Table A: HLA-A*02:11H
  source 1..11: note = Severe acute respiratory syndrome coronavirus 2
AVITREVGFVV

SEQ ID NO: 5689 - protein, 11 aa, Severe acute respiratory syndrome-related coronavirus
  REGION 1..11: note = Table A: HLA-B*50:01H
  source 1..11: note = Severe acute respiratory syndrome coronavirus 2
REVGFVVPGLP

SEQ ID NO: 5690 - protein, 11 aa, Severe acute respiratory syndrome-related coronavirus
  REGION 1..11: note = Table A: HLA-C*03:03H HLA-C*03:04H HLA-C*17:01H
  source 1..11: note = Severe acute respiratory syndrome coronavirus 2
FVVPGLPGTIL

SEQ ID NO: 5691 - protein, 11 aa, Severe acute respiratory syndrome-related coronavirus
  REGION 1..11: note = Table A: HLA-A*74:01H HLA-A*68:01H
  source 1..11: note = Severe acute respiratory syndrome coronavirus 2
VVPGLPGTILR

SEQ ID NO: 5692 - protein, 11 aa, Severe acute respiratory syndrome-related coronavirus
  REGION 1..11: note = Table A: HLA-B*58:02M HLA-C*15:02H HLA-B*57:03H
  source 1..11: note = Severe acute respiratory syndrome coronavirus 2
RTTNGDFLHFL

SEQ ID NO: 5693 - protein, 11 aa, Severe acute respiratory syndrome-related coronavirus
  REGION 1..11: note = Table A: HLA-A*02:11H
  source 1..11: note = Severe acute respiratory syndrome coronavirus 2
FLHFLPRVFSA

SEQ ID NO: 5694 - protein, 11 aa, Severe acute respiratory syndrome-related coronavirus
  REGION 1..11: note = Table A: HLA-A*30:02M HLA-B*15:01H
  source 1..11: note = Severe acute respiratory syndrome coronavirus 2
RVFSAVGNICY

SEQ ID NO: 5695 - protein, 11 aa, Severe acute respiratory syndrome-related coronavirus
  REGION 1..11: note = Table A: HLA-C*16:01H HLA-B*46:01M HLA-C*03:02H HLA-C*12:02H HLA-C*12:03H
  source 1..11: note = Severe acute respiratory syndrome coronavirus 2
ICYTPSKLIEY

SEQ ID NO: 5696 - protein, 11 aa, Severe acute respiratory syndrome-related coronavirus
  REGION 1..11: note = Table A: HLA-C*15:05H HLA-B*35:01H
  source 1..11: note = Severe acute respiratory syndrome coronavirus 2
TPSKLIEYTDF

SEQ ID NO: 5697 - protein, 11 aa, Severe acute respiratory syndrome-related coronavirus
  REGION 1..11: note = Table A: HLA-B*50:01H
  source 1..11: note = Severe acute respiratory syndrome coronavirus 2
IEYTDFATSAC

SEQ ID NO: 5698 - protein, 11 aa, Severe acute respiratory syndrome-related coronavirus
  REGION 1..11: note = Table A: HLA-C*04:03H HLA-C*08:02H
  source 1..11: note = Severe acute respiratory syndrome coronavirus 2
YTDFATSACVL

SEQ ID NO: 5699 - protein, 11 aa, Severe acute respiratory syndrome-related coronavirus
  REGION 1..11: note = Table A: HLA-A*11:02H
  source 1..11: note = Severe acute respiratory syndrome coronavirus 2
CVLAAECTIFK

SEQ ID NO: 5700 - protein, 11 aa, Severe acute respiratory syndrome-related coronavirus
  REGION 1..11: note = Table A: HLA-B*35:01H
  source 1..11: note = Severe acute respiratory syndrome coronavirus 2
DTNVLEGSVAY

SEQ ID NO: 5701 - protein, 11 aa, Severe acute respiratory syndrome-related coronavirus
  REGION 1..11: note = Table A: HLA-A*33:03H
  source 1..11: note = Severe acute respiratory syndrome coronavirus 2
ESLRPDTRYVL

SEQ ID NO: 5702 - protein, 11 aa, Severe acute respiratory syndrome-related coronavirus
  REGION 1..11: note = Table A: HLA-A*34:01H
  source 1..11: note = Severe acute respiratory syndrome coronavirus 2
FPNTYLEGSVR

SEQ ID NO: 5703 - protein, 11 aa, Severe acute respiratory syndrome-related coronavirus
  REGION 1..11: note = Table A: HLA-B*27:02H
  source 1..11: note = Severe acute respiratory syndrome coronavirus 2
VRVVTTFDSEY

SEQ ID NO: 5704 - protein, 11 aa, Severe acute respiratory syndrome-related coronavirus
  REGION 1..11: note = Table A: HLA-A*34:01H
  source 1..11: note = Severe acute respiratory syndrome coronavirus 2
EAGVCVSTSGR

SEQ ID NO: 5705 - protein, 11 aa, Severe acute respiratory syndrome-related coronavirus
  REGION 1..11: note = Table A: HLA-A*30:02H
  source 1..11: note = Severe acute respiratory syndrome coronavirus 2
SGRWVLNNDYY

SEQ ID NO: 5706 - protein, 11 aa, Severe acute respiratory syndrome-related coronavirus
  REGION 1..11: note = Table A: HLA-B*27:05H
  source 1..11: note = Severe acute respiratory syndrome coronavirus 2
GRWVLNNDYYR

SEQ ID NO: 5707 - protein, 11 aa, Severe acute respiratory syndrome-related coronavirus
  REGION 1..11: note = Table A: HLA-A*02:07H
  source 1..11: note = Severe acute respiratory syndrome coronavirus 2
GVDAVNLLTNM

SEQ ID NO: 5708 - protein, 11 aa, Severe acute respiratory syndrome-related coronavirus
  REGION 1..11: note = Table A: HLA-A*02:11H HLA-A*68:02H
  source 1..11: note = Severe acute respiratory syndrome coronavirus 2
FTPLIQPIGAL

SEQ ID NO: 5709 - protein, 11 aa, Severe acute respiratory syndrome-related coronavirus
  REGION 1..11: note = Table A: HLA-B*58:02H HLA-C*15:05H HLA-B*57:03H
  source 1..11: note = Severe acute respiratory syndrome coronavirus 2
ASIVAGGIVAI

SEQ ID NO: 5710 - protein, 11 aa, Severe acute respiratory syndrome-related coronavirus
  REGION 1..11: note = Table A: HLA-A*68:02H
  source 1..11: note = Severe acute respiratory syndrome coronavirus 2
IVAGGIVAIVV

SEQ ID NO: 5711 - protein, 11 aa, Severe acute respiratory syndrome-related coronavirus
  REGION 1..11: note = Table A: HLA-B*55:02H
  source 1..11: note = Severe acute respiratory syndrome coronavirus 2
RAFGEYSHVVA

SEQ ID NO: 5712 - protein, 11 aa, Severe acute respiratory syndrome-related coronavirus
  REGION 1..11: note = Table A: HLA-C*14:03H
  source 1..11: note = Severe acute respiratory syndrome coronavirus 2
AFGEYSHVVAF

SEQ ID NO: 5713 - protein, 11 aa, Severe acute respiratory syndrome-related coronavirus
  REGION 1..11: note = Table A: HLA-A*24:02H HLA-A*24:07H
  source 1..11: note = Severe acute respiratory syndrome coronavirus 2
EYSHVVAFNTL

SEQ ID NO: 5714 - protein, 11 aa, Severe acute respiratory syndrome-related coronavirus
  REGION 1..11: note = Table A: HLA-B*38:02H
  source 1..11: note = Severe acute respiratory syndrome coronavirus 2
SHVVAFNTLLF

SEQ ID NO: 5715 - protein, 11 aa, Severe acute respiratory syndrome-related coronavirus
  REGION 1..11: note = Table A: HLA-B*35:01H
  source 1..11: note = Severe acute respiratory syndrome coronavirus 2
TPVYSFLPGVY

SEQ ID NO: 5716 - protein, 11 aa, Severe acute respiratory syndrome-related coronavirus
  REGION 1..11: note = Table A: HLA-A*02:04H HLA-A*02:07H
  source 1..11: note = Severe acute respiratory syndrome coronavirus 2
FLPGVYSVIYL

SEQ ID NO: 5717 - protein, 11 aa, Severe acute respiratory syndrome-related coronavirus
  REGION 1..11: note = Table A: HLA-A*24:07H
  source 1..11: note = Severe acute respiratory syndrome coronavirus 2
VYSVIYLYLTF

SEQ ID NO: 5718 - protein, 11 aa, Severe acute respiratory syndrome-related coronavirus
  REGION 1..11: note = Table A: HLA-A*02:11H HLA-A*68:02H
  source 1..11: note = Severe acute respiratory syndrome coronavirus 2
LTNDVSFLAHI

SEQ ID NO: 5719 - protein, 11 aa, Severe acute respiratory syndrome-related coronavirus
  REGION 1..11: note = Table A: HLA-A*68:02H
  source 1..11: note = Severe acute respiratory syndrome coronavirus 2
DVSFLAHIQWM

SEQ ID NO: 5720 - protein, 11 aa, Severe acute respiratory syndrome-related coronavirus
  REGION 1..11: note = Table A: HLA-A*02:11H
  source 1..11: note = Severe acute respiratory syndrome coronavirus 2
VMFTPLVPFWI

SEQ ID NO: 5721 - protein, 11 aa, Severe acute respiratory syndrome-related coronavirus
  REGION 1..11: note = Table A: HLA-A*25:01M HLA-B*46:01H HLA-A*26:01H HLA-A*26:02H HLA-C*03:02H HLA-A*30:02H HLA-A*68:02H HLA-C*15:05H HLA-C*12:02H HLA-C*08:01H HLA-A*23:01H HLA-B*38:02M HLA-A*32:01H HLA-B*15:01M HLA-B*15:02H HLA-B*07:05H
  REGION 1..11: note = CONT. FROM ABOVE: HLA-B*57:03H
  source 1..11: note = Severe acute respiratory syndrome coronavirus 2
VVFNGVSFSTF

SEQ ID NO: 5722 - protein, 11 aa, Severe acute respiratory syndrome-related coronavirus
  REGION 1..11: note = Table A: HLA-A*25:01H HLA-A*26:01H HLA-A*26:02H HLA-B*38:02H HLA-B*57:03H
  source 1..11: note = Severe acute respiratory syndrome coronavirus 2
STFEEAALCTF

SEQ ID NO: 5723 - protein, 11 aa, Severe acute respiratory syndrome-related coronavirus
  REGION 1..11: note = Table A: HLA-A*02:11H
  source 1..11: note = Severe acute respiratory syndrome coronavirus 2
CTFLLNKEMYL

SEQ ID NO: 5724 - protein, 11 aa, Severe acute respiratory syndrome-related coronavirus
  REGION 1..11: note = Table A: HLA-A*02:11H HLA-A*02:04H HLA-A*02:02H
  source 1..11: note = Severe acute respiratory syndrome coronavirus 2
FLLNKEMYLKL

SEQ ID NO: 5725 - protein, 11 aa, Severe acute respiratory syndrome-related coronavirus
  REGION 1..11: note = Table A: HLA-A*74:01H
  source 1..11: note = Severe acute respiratory syndrome coronavirus 2
LLNKEMYLKLR

SEQ ID NO: 5726 - protein, 11 aa, Severe acute respiratory syndrome-related coronavirus
  REGION 1..11: note = Table A: HLA-B*58:01H HLA-A*36:01H HLA-A*01:01H HLA-B*57:03H
  source 1..11: note = Severe acute respiratory syndrome coronavirus 2
RSDVLLPLTQY

SEQ ID NO: 5727 - protein, 11 aa, Severe acute respiratory syndrome-related coronavirus
  REGION 1..11: note = Table A: HLA-A*33:01H HLA-A*33:03H
  source 1..11: note = Severe acute respiratory syndrome coronavirus 2
DVLLPLTQYNR

SEQ ID NO: 5728 - protein, 11 aa, Severe acute respiratory syndrome-related coronavirus
  REGION 1..11: note = Table A: HLA-A*29:02H HLA-A*30:02H
  source 1..11: note = Severe acute respiratory syndrome coronavirus 2
VLLPLTQYNRY

SEQ ID NO: 5729 - protein, 11 aa, Severe acute respiratory syndrome-related coronavirus
  REGION 1..11: note = Table A: HLA-A*02:02H
  source 1..11: note = Severe acute respiratory syndrome coronavirus 2
LLPLTQYNRYL

SEQ ID NO: 5730 - protein, 11 aa, Severe acute respiratory syndrome-related coronavirus
  REGION 1..11: note = Table A: HLA-A*30:02H
  source 1..11: note = Severe acute respiratory syndrome coronavirus 2
RYLALYNKYKY

SEQ ID NO: 5731 - protein, 11 aa, Severe acute respiratory syndrome-related coronavirus
  REGION 1..11: note = Table A: HLA-A*74:01H
  source 1..11: note = Severe acute respiratory syndrome coronavirus 2
ALYNKYKYFSG

SEQ ID NO: 5732 - protein, 11 aa, Severe acute respiratory syndrome-related coronavirus
  REGION 1..11: note = Table A: HLA-C*14:02H HLA-C*14:03M HLA-A*36:01H HLA-A*29:01M HLA-A*29:02M HLA-B*07:05H
  source 1..11: note = Severe acute respiratory syndrome coronavirus 2
YFSGAMDTTSY

SEQ ID NO: 5733 - protein, 11 aa, Severe acute respiratory syndrome-related coronavirus
  REGION 1..11: note = Table A: HLA-A*33:03H HLA-A*66:01H
  source 1..11: note = Severe acute respiratory syndrome coronavirus 2
FSGAMDTTSYR

SEQ ID NO: 5734 - protein, 11 aa, Severe acute respiratory syndrome-related coronavirus
  REGION 1..11: note = Table A: HLA-B*56:01H HLA-B*55:02H HLA-B*55:01H HLA-A*02:01H HLA-B*54:01H
  source 1..11: note = Severe acute respiratory syndrome coronavirus 2
GAMDTTSYREA

SEQ ID NO: 5735 - protein, 11 aa, Severe acute respiratory syndrome-related coronavirus
  REGION 1..11: note = Table A: HLA-B*38:02H HLA-B*39:01H
  source 1..11: note = Severe acute respiratory syndrome coronavirus 2
NDFSNSGSDVL

SEQ ID NO: 5736 - protein, 11 aa, Severe acute respiratory syndrome-related coronavirus
  REGION 1..11: note = Table A: HLA-A*02:11H HLA-A*02:05H HLA-A*02:06H HLA-A*02:08H HLA-A*02:01H HLA-A*02:03H HLA-B*38:02H HLA-B*39:06H
  source 1..11: note = Severe acute respiratory syndrome coronavirus 2
YQPPQTSITSA

SEQ ID NO: 5737 - protein, 11 aa, Severe acute respiratory syndrome-related coronavirus
  REGION 1..11: note = Table A: HLA-C*15:05H HLA-B*07:05H
  source 1..11: note = Severe acute respiratory syndrome coronavirus 2
QPPQTSITSAV

SEQ ID NO: 5738 - protein, 11 aa, Severe acute respiratory syndrome-related coronavirus
  REGION 1..11: note = Table A: HLA-A*36:01H HLA-A*68:01H HLA-A*34:02H HLA-A*66:01H
  source 1..11: note = Severe acute respiratory syndrome coronavirus 2
ITSAVLQSGFR

SEQ ID NO: 5739 - protein, 11 aa, Severe acute respiratory syndrome-related coronavirus
  REGION 1..11: note = Table A: HLA-A*11:01H HLA-A*11:02H HLA-A*34:02H
  source 1..11: note = Severe acute respiratory syndrome coronavirus 2
TSAVLQSGFRK

SEQ ID NO: 5740 - protein, 11 aa, Severe acute respiratory syndrome-related coronavirus
  REGION 1..11: note = Table A: HLA-A*02:11H
  source 1..11: note = Severe acute respiratory syndrome coronavirus 2
KMAFPSGKVEG

SEQ ID NO: 5741 - protein, 11 aa, Severe acute respiratory syndrome-related coronavirus
  REGION 1..11: note = Table A: HLA-A*02:08H
  source 1..11: note = Severe acute respiratory syndrome coronavirus 2
MAFPSGKVEGC

SEQ ID NO: 5742 - protein, 11 aa, Severe acute respiratory syndrome-related coronavirus
  REGION 1..11: note = Table A: HLA-A*74:01H HLA-A*26:03M HLA-B*27:02H HLA-A*68:01H HLA-A*34:01M HLA-A*66:01H
  source 1..11: note = Severe acute respiratory syndrome coronavirus 2
FLVQAGNVQLR

SEQ ID NO: 5743 - protein, 11 aa, Severe acute respiratory syndrome-related coronavirus
  REGION 1..11: note = Table A: HLA-A*11:303H HLA-A*74:01M HLA-A*03:01M HLA-A*03:02H HLA-A*11:01M HLA-A*11:02M HLA-A*36:01M HLA-A*34:02H HLA-C*07:27H
  source 1..11: note = Severe acute respiratory syndrome coronavirus 2
KVDTANPKTPK

SEQ ID NO: 5744 - protein, 11 aa, Severe acute respiratory syndrome-related coronavirus
  REGION 1..11: note = Table A: HLA-A*68:01H HLA-A*34:02M HLA-A*66:01H
  source 1..11: note = Severe acute respiratory syndrome coronavirus 2
DTANPKTPKYK

SEQ ID NO: 5745 - protein, 11 aa, Severe acute respiratory syndrome-related coronavirus
  REGION 1..11: note = Table A: HLA-A*24:02H HLA-A*24:07H HLA-A*23:01M HLA-B*57:03H
  source 1..11: note = Severe acute respiratory syndrome coronavirus 2
KFVRIQPGQTF

SEQ ID NO: 5746 - protein, 11 aa, Severe acute respiratory syndrome-related coronavirus
  REGION 1..11: note = Table A: HLA-B*46:01H HLA-A*30:02H HLA-B*15:01H
  source 1..11: note = Severe acute respiratory syndrome coronavirus 2
ACYNGSPSGVY

SEQ ID NO: 5747 - protein, 11 aa, Severe acute respiratory syndrome-related coronavirus
  REGION 1..11: note = Table A: HLA-B*42:01M HLA-B*55:02H HLA-C*15:05M HLA-B*55:01H HLA-B*07:02M HLA-B*07:04H HLA-B*07:05M
  source 1..11: note = Severe acute respiratory syndrome coronavirus 2
RPNFTIKGSFL

SEQ ID NO: 5748 - protein, 11 aa, Severe acute respiratory syndrome-related coronavirus
  REGION 1..11: note = Table A: HLA-A*02:11H HLA-A*02:07H HLA-A*02:02M HLA-A*02:03H
  source 1..11: note = Severe acute respiratory syndrome coronavirus 2
YMHHMELPTGV

SEQ ID NO: 5749 - protein, 11 aa, Severe acute respiratory syndrome-related coronavirus
  REGION 1..11: note = Table A: HLA-B*55:02H HLA-B*38:01H HLA-B*38:02M HLA-B*39:06M HLA-B*39:01H HLA-B*15:10H
  source 1..11: note = Severe acute respiratory syndrome coronavirus 2
HHMELPTGVHA

SEQ ID NO: 5750 - protein, 11 aa, Severe acute respiratory syndrome-related coronavirus
  REGION 1..11: note = Table A: HLA-B*35:03M HLA-C*15:05M HLA-B*35:02H HLA-B*35:12H HLA-B*07:02H HLA-B*07:04M HLA-B*07:05H
  source 1..11: note = Severe acute respiratory syndrome coronavirus 2
LPTGVHAGTDL

SEQ ID NO: 5751 - protein, 11 aa, Severe acute respiratory syndrome-related coronavirus
  REGION 1..11: note = Table A: HLA-B*38:02H HLA-B*39:01H
  source 1..11: note = Severe acute respiratory syndrome coronavirus 2
VHAGTDLEGNF

SEQ ID NO: 5752 - protein, 11 aa, Severe acute respiratory syndrome-related coronavirus
  REGION 1..11: note = Table A: HLA-A*36:01H HLA-B*35:01H HLA-B*35:08H
  source 1..11: note = Severe acute respiratory syndrome coronavirus 2
HAGTDLEGNFY

SEQ ID NO: 5753 - protein, 11 aa, Severe acute respiratory syndrome-related coronavirus
  REGION 1..11: note = Table A: HLA-A*33:03H HLA-A*34:01H
  source 1..11: note = Severe acute respiratory syndrome coronavirus 2
EGNFYGPFVDR

SEQ ID NO: 5754 - protein, 11 aa, Severe acute respiratory syndrome-related coronavirus
  REGION 1..11: note = Table A: HLA-A*02:02H
  source 1..11: note = Severe acute respiratory syndrome coronavirus 2
FYGPFVDRQTA

SEQ ID NO: 5755 - protein, 11 aa, Severe acute respiratory syndrome-related coronavirus
  REGION 1..11: note = Table A: HLA-B*56:01M HLA-B*55:02M HLA-C*15:05H HLA-B*55:01H HLA-B*54:01H HLA-B*07:02H HLA-B*07:05H
  source 1..11: note = Severe acute respiratory syndrome coronavirus 2
GPFVDRQTAQA

SEQ ID NO: 5756 - protein, 11 aa, Severe acute respiratory syndrome-related coronavirus
  REGION 1..11: note = Table A: HLA-A*68:02H
  source 1..11: note = Severe acute respiratory syndrome coronavirus 2
QAAGTDTTITV

SEQ ID NO: 5757 - protein, 11 aa, Severe acute respiratory syndrome-related coronavirus
  REGION 1..11: note = Table A: HLA-A*25:01H
  source 1..11: note = Severe acute respiratory syndrome coronavirus 2
DTTITVNVLAW

SEQ ID NO: 5758 - protein, 11 aa, Severe acute respiratory syndrome-related coronavirus
  REGION 1..11: note = Table A: HLA-A*24:02H HLA-A*24:07H HLA-A*23:01H HLA-B*57:03H
  source 1..11: note = Severe acute respiratory syndrome coronavirus 2
LYAAVINGDRW

SEQ ID NO: 5759 - protein, 11 aa, Severe acute respiratory syndrome-related coronavirus
  REGION 1..11: note = Table A: HLA-C*08:01H HLA-B*57:03H
  source 1..11: note = Severe acute respiratory syndrome coronavirus 2
AAVINGDRWFL

SEQ ID NO: 5760 - protein, 11 aa, Severe acute respiratory syndrome-related coronavirus
  REGION 1..11: note = Table A: HLA-A*74:01M
  source 1..11: note = Severe acute respiratory syndrome coronavirus 2
VINGDRWFLNR

SEQ ID NO: 5761 - protein, 11 aa, Severe acute respiratory syndrome-related coronavirus
  REGION 1..11: note = Table A: HLA-A*24:07H
  source 1..11: note = Severe acute respiratory syndrome coronavirus 2
RWFLNRFTTTL

SEQ ID NO: 5762 - protein, 11 aa, Severe acute respiratory syndrome-related coronavirus
  REGION 1..11: note = Table A: HLA-A*24:07H
  source 1..11: note = Severe acute respiratory syndrome coronavirus 2
RFTTTLNDFNL

SEQ ID NO: 5763 - protein, 11 aa, Severe acute respiratory syndrome-related coronavirus
  REGION 1..11: note = Table A: HLA-A*68:02H
  source 1..11: note = Severe acute respiratory syndrome coronavirus 2
FTTTLNDFNLV

SEQ ID NO: 5764 - protein, 11 aa, Severe acute respiratory syndrome-related coronavirus
  REGION 1..11: note = Table A: HLA-A*03:02H
  source 1..11: note = Severe acute respiratory syndrome coronavirus 2
TLNDFNLVAMK

SEQ ID NO: 5765 - protein, 11 aa, Severe acute respiratory syndrome-related coronavirus
  REGION 1..11: note = Table A: HLA-A*36:01H
  source 1..11: note = Severe acute respiratory syndrome coronavirus 2
LNDFNLVAMKY

SEQ ID NO: 5766 - protein, 11 aa, Severe acute respiratory syndrome-related coronavirus
  REGION 1..11: note = Table A: HLA-A*02:11H HLA-A*68:02H
  source 1..11: note = Severe acute respiratory syndrome coronavirus 2
YNYEPLTQDHV

SEQ ID NO: 5767 - protein, 11 aa, Severe acute respiratory syndrome-related coronavirus
  REGION 1..11: note = Table A: HLA-C*08:02H
  source 1..11: note = Severe acute respiratory syndrome coronavirus 2
TQDHVDILGPL

SEQ ID NO: 5768 - protein, 11 aa, Severe acute respiratory syndrome-related coronavirus
  REGION 1..11: note = Table A: HLA-B*38:02H HLA-B*39:06H HLA-B*54:01H HLA-B*39:01H
  source 1..11: note = Severe acute respiratory syndrome coronavirus 2
DHVDILGPLSA

SEQ ID NO: 5769 - protein, 11 aa, Severe acute respiratory syndrome-related coronavirus
  REGION 1..11: note = Table A: HLA-A*02:11H HLA-A*02:02H HLA-A*02:03H
  source 1..11: note = Severe acute respiratory syndrome coronavirus 2
ILGPLSAQTGI

SEQ ID NO: 5770 - protein, 11 aa, Severe acute respiratory syndrome-related coronavirus
  REGION 1..11: note = Table A: HLA-B*55:02H HLA-C*15:05M HLA-B*07:05H
  source 1..11: note = Severe acute respiratory syndrome coronavirus 2
GPLSAQTGIAV

SEQ ID NO: 5771 - protein, 11 aa, Severe acute respiratory syndrome-related coronavirus
  REGION 1..11: note = Table A: HLA-B*57:03H
  source 1..11: note = Severe acute respiratory syndrome coronavirus 2
ASLKELLQNGM

SEQ ID NO: 5772 - protein, 11 aa, Severe acute respiratory syndrome-related coronavirus
  REGION 1..11: note = Table A: HLA-A*02:02H HLA-A*02:03H
  source 1..11: note = Severe acute respiratory syndrome coronavirus 2
GMNGRTILGSA

SEQ ID NO: 5773 - protein, 11 aa, Severe acute respiratory syndrome-related coronavirus
  REGION 1..11: note = Table A: HLA-B*45:01H HLA-B*49:01H HLA-B*50:01H
  source 1..11: note = Severe acute respiratory syndrome coronavirus 2
LEDEFTPFDVV

SEQ ID NO: 5774 - protein, 11 aa, Severe acute respiratory syndrome-related coronavirus
  REGION 1..11: note = Table A: HLA-B*56:01H HLA-B*55:02H HLA-C*15:05H HLA-B*54:01H
  source 1..11: note = Severe acute respiratory syndrome coronavirus 2
TPFDVVRQCSG

SEQ ID NO: 5775 - protein, 11 aa, Severe acute respiratory syndrome-related coronavirus
  REGION 1..11: note = Table A: HLA-A*68:01H
  source 1..11: note = Severe acute respiratory syndrome coronavirus 2
SGVTFQSAVKR

SEQ ID NO: 5776 - protein, 11 aa, Severe acute respiratory syndrome-related coronavirus
  REGION 1..11: note = Table A: HLA-B*58:02M HLA-B*57:03H
  source 1..11: note = Severe acute respiratory syndrome coronavirus 2
VTFQSAVKRTI

SEQ ID NO: 5777 - protein, 11 aa, Severe acute respiratory syndrome-related coronavirus
  REGION 1..11: note = Table A: HLA-B*58:02M HLA-A*74:01H HLA-B*57:03M
  source 1..11: note = Severe acute respiratory syndrome coronavirus 2
RTIKGTHHWLL

SEQ ID NO: 5778 - protein, 11 aa, Severe acute respiratory syndrome-related coronavirus
  REGION 1..11: note = Table A: HLA-B*07:04H
  source 1..11: note = Severe acute respiratory syndrome coronavirus 2
TIKGTHHWLLL

SEQ ID NO: 5779 - protein, 11 aa, Severe acute respiratory syndrome-related coronavirus
  REGION 1..11: note = Table A: HLA-A*24:07H
  source 1..11: note = Severe acute respiratory syndrome coronavirus 2
FFLYENAFLPF

SEQ ID NO: 5780 - protein, 11 aa, Severe acute respiratory syndrome-related coronavirus
  REGION 1..11: note = Table A: HLA-A*02:04H HLA-A*02:02H
  source 1..11: note = Severe acute respiratory syndrome coronavirus 2
FLYENAFLPFA

SEQ ID NO: 5781 - protein, 11 aa, Severe acute respiratory syndrome-related coronavirus
  REGION 1..11: note = Table A: HLA-C*14:03H HLA-A*02:07H
  source 1..11: note = Severe acute respiratory syndrome coronavirus 2
FLPFAMGIIAM

SEQ ID NO: 5782 - protein, 11 aa, Severe acute respiratory syndrome-related coronavirus
  REGION 1..11: note = Table A: HLA-B*35:07H
  source 1..11: note = Severe acute respiratory syndrome coronavirus 2
FAMGIIAMSAF

SEQ ID NO: 5783 - protein, 11 aa, Severe acute respiratory syndrome-related coronavirus
  REGION 1..11: note = Table A: HLA-A*02:11H HLA-A*02:02H
  source 1..11: note = Severe acute respiratory syndrome coronavirus 2
MMFVKHKHAFL

SEQ ID NO: 5784 - protein, 11 aa, Severe acute respiratory syndrome-related coronavirus
  REGION 1..11: note = Table A: HLA-B*46:01H HLA-A*29:02H HLA-C*03:02H HLA-B*38:02H HLA-B*15:01H HLA-B*15:02M
  source 1..11: note = Severe acute respiratory syndrome coronavirus 2
FLLPSLATVAY

SEQ ID NO: 5785 - protein, 11 aa, Severe acute respiratory syndrome-related coronavirus
  REGION 1..11: note = Table A: HLA-A*74:01H HLA-A*33:03H HLA-A*34:02H
  source 1..11: note = Severe acute respiratory syndrome coronavirus 2
MVYMPASWVMR

SEQ ID NO: 5786 - protein, 11 aa, Severe acute respiratory syndrome-related coronavirus
  REGION 1..11: note = Table A: HLA-A*24:02M HLA-A*24:07H HLA-A*23:01M
  source 1..11: note = Severe acute respiratory syndrome coronavirus 2
VYMPASWVMRI

SEQ ID NO: 5787 - protein, 11 aa, Severe acute respiratory syndrome-related coronavirus
  REGION 1..11: note = Table A: HLA-A*36:01H HLA-B*27:02H HLA-A*34:01H HLA-A*34:02H HLA-A*66:01H
  source 1..11: note = Severe acute respiratory syndrome coronavirus 2
DMVDTSLSGFK

SEQ ID NO: 5788 - protein, 11 aa, Severe acute respiratory syndrome-related coronavirus
  REGION 1..11: note = Table A: HLA-A*02:07H HLA-C*08:01H HLA-B*38:02H
  source 1..11: note = Severe acute respiratory syndrome coronavirus 2
MVDTSLSGFKL

SEQ ID NO: 5789 - protein, 11 aa, Severe acute respiratory syndrome-related coronavirus
  REGION 1..11: note = Table A: HLA-B*58:01H HLA-B*57:01H HLA-A*25:01M HLA-B*53:01M HLA-B*35:07H HLA-B*15:13H HLA-B*38:02H HLA-A*32:01M HLA-B*15:02H HLA-B*57:03M
  source 1..11: note = Severe acute respiratory syndrome coronavirus 2
TVYDDGARRVW

SEQ ID NO: 5790 - protein, 11 aa, Severe acute respiratory syndrome-related coronavirus
  REGION 1..11: note = Table A: HLA-B*57:03H
  source 1..11: note = Severe acute respiratory syndrome coronavirus 2
RVWTLMNVLTL

SEQ ID NO: 5791 - protein, 11 aa, Severe acute respiratory syndrome-related coronavirus
  REGION 1..11: note = Table A: HLA-A*03:02H HLA-A*11:01H HLA-A*11:02M HLA-A*34:02H
  source 1..11: note = Severe acute respiratory syndrome coronavirus 2
TLMNVLTLVYK

SEQ ID NO: 5792 - protein, 11 aa, Severe acute respiratory syndrome-related coronavirus
  REGION 1..11: note = Table A: HLA-A*02:11H HLA-A*02:05M HLA-A*02:06H HLA-A*02:08H
  source 1..11: note = Severe acute respiratory syndrome coronavirus 2
KVYYGNALDQA

SEQ ID NO: 5793 - protein, 11 aa, Severe acute respiratory syndrome-related coronavirus
  REGION 1..11: note = Table A: HLA-A*23:01H
  source 1..11: note = Severe acute respiratory syndrome coronavirus 2
VYYGNALDQAI

SEQ ID NO: 5794 - protein, 11 aa, Severe acute respiratory syndrome-related coronavirus
  REGION 1..11: note = Table A: HLA-A*02:07H
  source 1..11: note = Severe acute respiratory syndrome coronavirus 2
ALDQAISMWAL

SEQ ID NO: 5795 - protein, 11 aa, Severe acute respiratory syndrome-related coronavirus
  REGION 1..11: note = Table A: HLA-B*07:05H
  source 1..11: note = Severe acute respiratory syndrome coronavirus 2
SNYSGVVTTVM

SEQ ID NO: 5796 - protein, 11 aa, Severe acute respiratory syndrome-related coronavirus
  REGION 1..11: note = Table A: HLA-A*24:02H HLA-A*24:07M HLA-A*23:01M
  source 1..11: note = Severe acute respiratory syndrome coronavirus 2
NYSGVVTTVMF

SEQ ID NO: 5797 - protein, 11 aa, Severe acute respiratory syndrome-related coronavirus
  REGION 1..11: note = Table A: HLA-B*35:03H HLA-C*15:05M HLA-B*07:05H
  source 1..11: note = Severe acute respiratory syndrome coronavirus 2
CPIFFITGNTL

SEQ ID NO: 5798 - protein, 11 aa, Severe acute respiratory syndrome-related coronavirus
  REGION 1..11: note = Table A: HLA-B*38:02H
  source 1..11: note = Severe acute respiratory syndrome coronavirus 2
FRLTLGVYDYL

SEQ ID NO: 5799 - protein, 11 aa, Severe acute respiratory syndrome-related coronavirus
  REGION 1..11: note = Table A: HLA-C*04:01H HLA-C*04:03H HLA-A*24:02M HLA-A*24:07H HLA-C*08:01H HLA-A*23:01M
  source 1..11: note = Severe acute respiratory syndrome coronavirus 2
VYDYLVSTQEF

SEQ ID NO: 5800 - protein, 11 aa, Severe acute respiratory syndrome-related coronavirus
  REGION 1..11: note = Table A: HLA-B*27:02H
  source 1..11: note = Severe acute respiratory syndrome coronavirus 2
YDYLVSTQEFR

SEQ ID NO: 5801 - protein, 11 aa, Severe acute respiratory syndrome-related coronavirus
  REGION 1..11: note = Table A: HLA-A*02:11H HLA-A*02:02H
  source 1..11: note = Severe acute respiratory syndrome coronavirus 2
YLVSTQEFRYM

SEQ ID NO: 5802 - protein, 11 aa, Severe acute respiratory syndrome-related coronavirus
  REGION 1..11: note = Table A: HLA-A*03:01H HLA-A*03:02H
  source 1..11: note = Severe acute respiratory syndrome coronavirus 2
YMNSQGLLPPK

SEQ ID NO: 5803 - protein, 11 aa, Severe acute respiratory syndrome-related coronavirus
  REGION 1..11: note = Table A: HLA-B*13:02H
  source 1..11: note = Severe acute respiratory syndrome coronavirus 2
SQGLLPPKNSI

SEQ ID NO: 5804 - protein, 11 aa, Severe acute respiratory syndrome-related coronavirus
  REGION 1..11: note = Table A: HLA-A*02:07H HLA-A*24:07H
  source 1..11: note = Severe acute respiratory syndrome coronavirus 2
LLPPKNSIDAF

SEQ ID NO: 5805 - protein, 11 aa, Severe acute respiratory syndrome-related coronavirus
  REGION 1..11: note = Table A: HLA-A*74:01H
  source 1..11: note = Severe acute respiratory syndrome coronavirus 2
KLNIKLLGVGG

SEQ ID NO: 5806 - protein, 11 aa, Severe acute respiratory syndrome-related coronavirus
  REGION 1..11: note = Table A: HLA-A*11:01H HLA-A*11:02H HLA-C*07:27H
  source 1..11: note = Severe acute respiratory syndrome coronavirus 2
ATVQSKMSDVK

SEQ ID NO: 5807 - protein, 11 aa, Severe acute respiratory syndrome-related coronavirus
  REGION 1..11: note = Table A: HLA-A*68:02H HLA-A*02:04H
  source 1..11: note = Severe acute respiratory syndrome coronavirus 2
SVVLLSVLQQL

SEQ ID NO: 5808 - protein, 11 aa, Severe acute respiratory syndrome-related coronavirus
  REGION 1..11: note = Table A: HLA-A*03:01H HLA-A*03:02H HLA-A*11:01H HLA-A*11:02H
  source 1..11: note = Severe acute respiratory syndrome coronavirus 2
VQLHNDILLAK

SEQ ID NO: 5809 - protein, 11 aa, Severe acute respiratory syndrome-related coronavirus
  REGION 1..11: note = Table A: HLA-B*40:01H
  source 1..11: note = Severe acute respiratory syndrome coronavirus 2
TEAFEKMVSLL

SEQ ID NO: 5810 - protein, 11 aa, Severe acute respiratory syndrome-related coronavirus
  REGION 1..11: note = Table A: HLA-A*03:02H HLA-A*11:01H HLA-A*11:02H
  source 1..11: note = Severe acute respiratory syndrome coronavirus 2
LSMQGAVDINK

SEQ ID NO: 5811 - protein, 11 aa, Severe acute respiratory syndrome-related coronavirus
  REGION 1..11: note = Table A: HLA-B*44:05H HLA-A*02:11H HLA-A*02:04H HLA-A*02:02M HLA-B*38:02H
  source 1..11: note = Severe acute respiratory syndrome coronavirus 2
SMQGAVDINKL

SEQ ID NO: 5812 - protein, 11 aa, Severe acute respiratory syndrome-related coronavirus
  REGION 1..11: note = Table A: HLA-B*44:05H HLA-B*40:01H HLA-B*40:02H HLA-B*41:02H
  source 1..11: note = Severe acute respiratory syndrome coronavirus 2
CEEMLDNRATL

SEQ ID NO: 5813 - protein, 11 aa, Severe acute respiratory syndrome-related coronavirus
  REGION 1..11: note = Table A: HLA-A*02:11M HLA-A*02:07H HLA-A*02:01H HLA-A*02:02H HLA-B*38:02M HLA-B*13:02H
  source 1..11: note = Severe acute respiratory syndrome coronavirus 2
MLDNRATLQAI

SEQ ID NO: 5814 - protein, 11 aa, Severe acute respiratory syndrome-related coronavirus
  REGION 1..11: note = Table A: HLA-B*57:03H
  source 1..11: note = Severe acute respiratory syndrome coronavirus 2
RATLQAIASEF

SEQ ID NO: 5815 - protein, 11 aa, Severe acute respiratory syndrome-related coronavirus
  REGION 1..11: note = Table A: HLA-C*16:01H HLA-B*46:01H HLA-C*03:02H HLA-A*30:02H HLA-C*12:02H HLA-B*35:01H HLA-B*35:07H
  source 1..11: note = Severe acute respiratory syndrome coronavirus 2
IASEFSSLPSY

SEQ ID NO: 5816 - protein, 11 aa, Severe acute respiratory syndrome-related coronavirus
  REGION 1..11: note = Table A: HLA-B*45:01M HLA-B*40:06H HLA-B*50:01M
  source 1..11: note = Severe acute respiratory syndrome coronavirus 2
SEFSSLPSYAA

SEQ ID NO: 5817 - protein, 11 aa, Severe acute respiratory syndrome-related coronavirus
  REGION 1..11: note = Table A: HLA-A*02:05H HLA-A*02:06H HLA-A*02:07H HLA-A*02:01H HLA-A*02:02H
  source 1..11: note = Severe acute respiratory syndrome coronavirus 2
SLPSYAAFATA

SEQ ID NO: 5818 - protein, 11 aa, Severe acute respiratory syndrome-related coronavirus
  REGION 1..11: note = Table A: HLA-B*35:01M HLA-B*35:07H HLA-B*38:02H
  source 1..11: note = Severe acute respiratory syndrome coronavirus 2
YAAFATAQEAY

SEQ ID NO: 5819 - protein, 11 aa, Severe acute respiratory syndrome-related coronavirus
  REGION 1..11: note = Table A: HLA-A*68:02H
  source 1..11: note = Severe acute respiratory syndrome coronavirus 2
ATAQEAYEQAV

SEQ ID NO: 5820 - protein, 11 aa, Severe acute respiratory syndrome-related coronavirus
  REGION 1..11: note = Table A: HLA-A*02:08H
  source 1..11: note = Severe acute respiratory syndrome coronavirus 2
AVANGDSEVVL

SEQ ID NO: 5821 - protein, 11 aa, Severe acute respiratory syndrome-related coronavirus
  REGION 1..11: note = Table A: HLA-A*11:303H HLA-A*03:02M HLA-A*11:01M HLA-A*11:02H HLA-A*36:01H HLA-B*27:02M HLA-A*30:02H HLA-A*68:01M HLA-A*34:02H HLA-C*07:27H
  source 1..11: note = Severe acute respiratory syndrome coronavirus 2
VANGDSEVVLK

SEQ ID NO: 5822 - protein, 11 aa, Severe acute respiratory syndrome-related coronavirus
  REGION 1..11: note = Table A: HLA-B*15:03H
  source 1..11: note = Severe acute respiratory syndrome coronavirus 2
KKSLNVAKSEF

SEQ ID NO: 5823 - protein, 11 aa, Severe acute respiratory syndrome-related coronavirus
  REGION 1..11: note = Table A: HLA-A*74:01H
  source 1..11: note = Severe acute respiratory syndrome coronavirus 2
SLNVAKSEFDR

SEQ ID NO: 5824 - protein, 11 aa, Severe acute respiratory syndrome-related coronavirus
  REGION 1..11: note = Table A: HLA-A*74:01H HLA-A*33:01H HLA-A*33:03H HLA-A*26:03H HLA-A*68:01H HLA-A*34:02H HLA-A*31:01H HLA-A*66:01H
  source 1..11: note = Severe acute respiratory syndrome coronavirus 2
SEFDRDAAMQR

SEQ ID NO: 5825 - protein, 11 aa, Severe acute respiratory syndrome-related coronavirus
  REGION 1..11: note = Table A: HLA-A*03:01M HLA-A*03:02H HLA-A*36:01M HLA-A*29:01H HLA-A*29:02M HLA-A*30:02M HLA-A*02:02M HLA-B*38:02H HLA-B*15:01M HLA-B*15:03H HLA-B*07:05H
  source 1..11: note = Severe acute respiratory syndrome coronavirus 2
KMADQAMTQMY

SEQ ID NO: 5826 - protein, 11 aa, Severe acute respiratory syndrome-related coronavirus
  REGION 1..11: note = Table A: HLA-A*11:01H HLA-A*36:01H HLA-A*34:02M
  source 1..11: note = Severe acute respiratory syndrome coronavirus 2
MADQAMTQMYK

SEQ ID NO: 5827 - protein, 11 aa, Severe acute respiratory syndrome-related coronavirus
  REGION 1..11: note = Table A: HLA-B*45:01M HLA-B*50:01H
  source 1..11: note = Severe acute respiratory syndrome coronavirus 2
SEDKRAKVTSA

SEQ ID NO: 5828 - protein, 11 aa, Severe acute respiratory syndrome-related coronavirus
  REGION 1..11: note = Table A: HLA-B*07:04H
  source 1..11: note = Severe acute respiratory syndrome coronavirus 2
RAKVTSAMQTM

SEQ ID NO: 5829 - protein, 11 aa, Severe acute respiratory syndrome-related coronavirus
  REGION 1..11: note = Table A: HLA-B*58:01H HLA-C*15:05H HLA-B*57:03M
  source 1..11: note = Severe acute respiratory syndrome coronavirus 2
KVTSAMQTMLF

SEQ ID NO: 5830 - protein, 11 aa, Severe acute respiratory syndrome-related coronavirus
  REGION 1..11: note = Table A: HLA-A*74:01H
  source 1..11: note = Severe acute respiratory syndrome coronavirus 2
AMQTMLFTMLR

SEQ ID NO: 5831 - protein, 11 aa, Severe acute respiratory syndrome-related coronavirus
  REGION 1..11: note = Table A: HLA-B*13:01H
  source 1..11: note = Severe acute respiratory syndrome coronavirus 2
KLDNDALNNII

SEQ ID NO: 5832 - protein, 11 aa, Severe acute respiratory syndrome-related coronavirus
  REGION 1..11: note = Table A: HLA-A*33:01M HLA-A*33:03M HLA-B*27:02H HLA-A*68:01M HLA-A*34:01H HLA-A*34:02H HLA-A*66:01M
  source 1..11: note = Severe acute respiratory syndrome coronavirus 2
DALNNIINNAR

SEQ ID NO: 5833 - protein, 11 aa, Severe acute respiratory syndrome-related coronavirus
  REGION 1..11: note = Table A: HLA-B*56:01H HLA-B*55:02H HLA-C*15:05H HLA-B*55:01M HLA-C*08:01H HLA-B*54:01H HLA-B*07:05H
  source 1..11: note = Severe acute respiratory syndrome coronavirus 2
VPLNIIPLTTA

SEQ ID NO: 5834 - protein, 11 aa, Severe acute respiratory syndrome-related coronavirus
  REGION 1..11: note = Table A: HLA-A*03:02H HLA-A*11:01M HLA-A*11:02M HLA-A*36:01H HLA-B*27:02H HLA-A*68:01H HLA-A*34:02M HLA-C*07:27H HLA-A*66:01H
  source 1..11: note = Severe acute respiratory syndrome coronavirus 2
MVVIPDYNTYK

SEQ ID NO: 5835 - protein, 11 aa, Severe acute respiratory syndrome-related coronavirus
  REGION 1..11: note = Table A: HLA-A*68:02H
  source 1..11: note = Severe acute respiratory syndrome coronavirus 2
NTCDGTTFTYA

SEQ ID NO: 5836 - protein, 11 aa, Severe acute respiratory syndrome-related coronavirus
  REGION 1..11: note = Table A: HLA-A*02:11H HLA-A*02:01M HLA-A*02:02H
  source 1..11: note = Severe acute respiratory syndrome coronavirus 2
ALWEIQQVVDA

SEQ ID NO: 5837 - protein, 11 aa, Severe acute respiratory syndrome-related coronavirus
  REGION 1..11: note = Table A: HLA-C*04:03H HLA-A*02:11H HLA-A*02:06H HLA-A*02:07H HLA-A*02:08H HLA-C*08:01H HLA-C*08:02M HLA-C*05:01H HLA-B*13:01H
  source 1..11: note = Severe acute respiratory syndrome coronavirus 2
VVDADSKIVQL

SEQ ID NO: 5838 - protein, 11 aa, Severe acute respiratory syndrome-related coronavirus
  REGION 1..11: note = Table A: HLA-B*44:05M HLA-B*40:01H HLA-B*40:02M HLA-B*49:01H
  source 1..11: note = Severe acute respiratory syndrome coronavirus 2
SEISMDNSPNL

SEQ ID NO: 5839 - protein, 11 aa, Severe acute respiratory syndrome-related coronavirus
  REGION 1..11: note = Table A: HLA-B*58:01M HLA-B*57:01M HLA-A*32:01H HLA-B*57:03M
  source 1..11: note = Severe acute respiratory syndrome coronavirus 2
ISMDNSPNLAW

SEQ ID NO: 5840 - protein, 11 aa, Severe acute respiratory syndrome-related coronavirus
  REGION 1..11: note = Table A: HLA-B*57:03H
  source 1..11: note = Severe acute respiratory syndrome coronavirus 2
TALRANSAVKL

SEQ ID NO: 5841 - protein, 11 aa, Severe acute respiratory syndrome-related coronavirus
  REGION 1..11: note = Table A: HLA-B*39:01H
  source 1..11: note = Severe acute respiratory syndrome coronavirus 2
LQNNELSPVAL

SEQ ID NO: 5842 - protein, 11 aa, Severe acute respiratory syndrome-related coronavirus
  REGION 1..11: note = Table A: HLA-A*33:01H HLA-A*33:03M HLA-A*68:01H
  source 1..11: note = Severe acute respiratory syndrome coronavirus 2
QNNELSPVALR

SEQ ID NO: 5843 - protein, 11 aa, Severe acute respiratory syndrome-related coronavirus
  REGION 1..11: note = Table A: HLA-B*56:01M HLA-B*55:02M HLA-B*55:01H HLA-B*54:01H
  source 1..11: note = Severe acute respiratory syndrome coronavirus 2
SPVALRQMSCA

SEQ ID NO: 5844 - protein, 11 aa, Severe acute respiratory syndrome-related coronavirus
  REGION 1..11: note = Table A: HLA-B*35:01H
  source 1..11: note = Severe acute respiratory syndrome coronavirus 2
TACTDDNALAY

SEQ ID NO: 5845 - protein, 11 aa, Severe acute respiratory syndrome-related coronavirus
  REGION 1..11: note = Table A: HLA-A*66:01H
  source 1..11: note = Severe acute respiratory syndrome coronavirus 2
LAYYNTTKGGR

SEQ ID NO: 5846 - protein, 11 aa, Severe acute respiratory syndrome-related coronavirus
  REGION 1..11: note = Table A: HLA-C*14:03H HLA-A*30:02H HLA-A*24:07H HLA-A*23:01H
  source 1..11: note = Severe acute respiratory syndrome coronavirus 2
AYYNTTKGGRF

SEQ ID NO: 5847 - protein, 11 aa, Severe acute respiratory syndrome-related coronavirus
  REGION 1..11: note = Table A: HLA-B*07:04H
  source 1..11: note = Severe acute respiratory syndrome coronavirus 2
TTKGGRFVLAL

SEQ ID NO: 5848 - protein, 11 aa, Severe acute respiratory syndrome-related coronavirus
  REGION 1..11: note = Table A: HLA-B*58:01H HLA-B*57:01H HLA-B*44:03H HLA-B*57:03M HLA-B*13:01M
  source 1..11: note = Severe acute respiratory syndrome coronavirus 2
ALLSDLQDLKW

SEQ ID NO: 5849 - protein, 11 aa, Severe acute respiratory syndrome-related coronavirus
  REGION 1..11: note = Table A: HLA-A*02:02H
  source 1..11: note = Severe acute respiratory syndrome coronavirus 2
LLSDLQDLKWA

SEQ ID NO: 5850 - protein, 11 aa, Severe acute respiratory syndrome-related coronavirus
  REGION 1..11: note = Table A: HLA-B*46:01H HLA-B*53:01H HLA-B*35:03H HLA-B*35:01H HLA-B*35:08M HLA-B*35:07H HLA-B*38:02H HLA-B*54:01H HLA-B*07:04H HLA-B*15:02M HLA-B*15:11H
  source 1..11: note = Severe acute respiratory syndrome coronavirus 2
FPKSDGTGTIY

SEQ ID NO: 5851 - protein, 11 aa, Severe acute respiratory syndrome-related coronavirus
  REGION 1..11: note = Table A: HLA-A*24:07H
  source 1..11: note = Severe acute respiratory syndrome coronavirus 2
IYTELEPPCRF

SEQ ID NO: 5852 - protein, 11 aa, Severe acute respiratory syndrome-related coronavirus
  REGION 1..11: note = Table A: HLA-A*03:02H
  source 1..11: note = Severe acute respiratory syndrome coronavirus 2
VTDTPKGPKVK

SEQ ID NO: 5853 - protein, 11 aa, Severe acute respiratory syndrome-related coronavirus
  REGION 1..11: note = Table A: HLA-A*02:11M HLA-A*02:04H HLA-A*02:02M HLA-A*02:03H
  source 1..11: note = Severe acute respiratory syndrome coronavirus 2
YLYFIKGLNNL

SEQ ID NO: 5854 - protein, 11 aa, Severe acute respiratory syndrome-related coronavirus
  REGION 1..11: note = Table A: HLA-A*02:11H HLA-A*02:04H HLA-A*02:02H
  source 1..11: note = Severe acute respiratory syndrome coronavirus 2
GLNNLNRGMVL

SEQ ID NO: 5855 - protein, 11 aa, Severe acute respiratory syndrome-related coronavirus
  REGION 1..11: note = Table A: HLA-A*34:01H HLA-A*34:02H HLA-A*66:01H
  source 1..11: note = Severe acute respiratory syndrome coronavirus 2
MVLGSLAATVR

SEQ ID NO: 5856 - protein, 11 aa, Severe acute respiratory syndrome-related coronavirus
  REGION 1..11: note = Table A: HLA-A*02:11H HLA-A*02:04H HLA-A*02:01H
  source 1..11: note = Severe acute respiratory syndrome coronavirus 2
VLGSLAATVRL

SEQ ID NO: 5857 - protein, 11 aa, Severe acute respiratory syndrome-related coronavirus
  REGION 1..11: note = Table A: HLA-A*25:01H HLA-A*26:01H HLA-A*26:02H HLA-A*26:03M HLA-A*68:01H HLA-A*34:01H HLA-A*34:02H HLA-A*66:01H
  source 1..11: note = Severe acute respiratory syndrome coronavirus 2
EVPANSTVLSF

SEQ ID NO: 5858 - protein, 11 aa, Severe acute respiratory syndrome-related coronavirus
  REGION 1..11: note = Table A: HLA-B*46:01H
  source 1..11: note = Severe acute respiratory syndrome coronavirus 2
CAFAVDAAKAY

SEQ ID NO: 5859 - protein, 11 aa, Severe acute respiratory syndrome-related coronavirus
  REGION 1..11: note = Table A: HLA-A*03:02H
  source 1..11: note = Severe acute respiratory syndrome coronavirus 2
AFAVDAAKAYK

SEQ ID NO: 5860 - protein, 11 aa, Severe acute respiratory syndrome-related coronavirus
  REGION 1..11: note = Table A: HLA-A*36:01H
  source 1..11: note = Severe acute respiratory syndrome coronavirus 2
AVDAAKAYKDY

SEQ ID NO: 5861 - protein, 11 aa, Severe acute respiratory syndrome-related coronavirus
  REGION 1..11: note = Table A: HLA-A*68:02H
  source 1..11: note = Severe acute respiratory syndrome coronavirus 2
DAAKAYKDYLA

SEQ ID NO: 5862 - protein, 11 aa, Severe acute respiratory syndrome-related coronavirus
  REGION 1..11: note = Table A: HLA-C*08:03H HLA-B*40:02H
  source 1..11: note = Severe acute respiratory syndrome coronavirus 2
KDYLASGGQPI

SEQ ID NO: 5863 - protein, 11 aa, Severe acute respiratory syndrome-related coronavirus
  REGION 1..11: note = Table A: HLA-B*38:01H HLA-B*38:02M HLA-B*39:01H HLA-B*15:10H
  source 1..11: note = Severe acute respiratory syndrome coronavirus 2
THTGTGQAITV

SEQ ID NO: 5864 - protein, 11 aa, Severe acute respiratory syndrome-related coronavirus
  REGION 1..11: note = Table A: HLA-B*35:01H HLA-B*35:08H
  source 1..11: note = Severe acute respiratory syndrome coronavirus 2
TPEANMDQESF

SEQ ID NO: 5865 - protein, 11 aa, Severe acute respiratory syndrome-related coronavirus
  REGION 1..11: note = Table A: HLA-A*26:01H
  source 1..11: note = Severe acute respiratory syndrome coronavirus 2
ESFGGASCCLY

SEQ ID NO: 5866 - protein, 11 aa, Severe acute respiratory syndrome-related coronavirus
  REGION 1..11: note = Table A: HLA-B*38:02H
  source 1..11: note = Severe acute respiratory syndrome coronavirus 2
CHIDHPNPKGF

SEQ ID NO: 5867 - protein, 11 aa, Severe acute respiratory syndrome-related coronavirus
  REGION 1..11: note = Table A: HLA-B*38:02H
  source 1..11: note = Severe acute respiratory syndrome coronavirus 2
DHPNPKGFCDL

SEQ ID NO: 5868 - protein, 11 aa, Severe acute respiratory syndrome-related coronavirus
  REGION 1..11: note = Table A: HLA-A*11:01H HLA-A*34:02H
  source 1..11: note = Severe acute respiratory syndrome coronavirus 2
CANDPVGFTLK

SEQ ID NO: 5869 - protein, 11 aa, Severe acute respiratory syndrome-related coronavirus
  REGION 1..11: note = Table A: HLA-B*51:01H HLA-B*54:01H
  source 1..11: note = Severe acute respiratory syndrome coronavirus 2
DPVGFTLKNTV

SEQ ID NO: 5870 - protein, 11 aa, Severe acute respiratory syndrome-related coronavirus
  REGION 1..11: note = Table A: HLA-B*39:06H
  source 1..11: note = Severe acute respiratory syndrome coronavirus 2
DQLREPMLQSA

SEQ ID NO: 5871 - protein, 11 aa, Severe acute respiratory syndrome-related coronavirus
  REGION 1..11: note = Table A: HLA-A*74:01H HLA-A*11:01H HLA-A*11:02H HLA-A*33:01H HLA-A*33:03H HLA-A*26:03M HLA-A*68:01H HLA-A*34:01M HLA-A*34:02M HLA-A*31:01M HLA-A*66:01H
  source 1..11: note = Severe acute respiratory syndrome coronavirus 2
QSADAQSFLNR

SEQ ID NO: 5872 - protein, 11 aa, Severe acute respiratory syndrome-related coronavirus
  REGION 1..11: note = Table A: HLA-B*38:02H
  source 1..11: note = Severe acute respiratory syndrome coronavirus 2
SADAQSFLNRV

SEQ ID NO: 5873 - protein, 11 aa, Severe acute respiratory syndrome-related coronavirus
  REGION 1..11: note = Table A: HLA-A*33:01H HLA-B*54:01H
  source 1..11: note = Severe acute respiratory syndrome coronavirus 2
DAQSFLNRVCG

SEQ ID NO: 5874 - protein, 11 aa, Severe acute respiratory syndrome-related coronavirus
  REGION 1..11: note = Table A: HLA-A*74:01H HLA-A*03:02H HLA-A*11:01M HLA-A*11:02H HLA-A*68:01M HLA-A*31:01H
  source 1..11: note = Severe acute respiratory syndrome coronavirus 2
GTGTSTDVVYR

SEQ ID NO: 5875 - protein, 11 aa, Severe acute respiratory syndrome-related coronavirus
  REGION 1..11: note = Table A: HLA-B*57:01H HLA-B*57:03H
  source 1..11: note = Severe acute respiratory syndrome coronavirus 2
GTSTDVVYRAF

SEQ ID NO: 5876 - protein, 11 aa, Severe acute respiratory syndrome-related coronavirus
  REGION 1..11: note = Table A: HLA-A*33:03H HLA-A*30:02H
  source 1..11: note = Severe acute respiratory syndrome coronavirus 2
IYNDKVAGFAK

SEQ ID NO: 5877 - protein, 11 aa, Severe acute respiratory syndrome-related coronavirus
  REGION 1..11: note = Table A: HLA-A*74:01H
  source 1..11: note = Severe acute respiratory syndrome coronavirus 2
KVAGFAKFLKT

SEQ ID NO: 5878 - protein, 11 aa, Severe acute respiratory syndrome-related coronavirus
  REGION 1..11: note = Table A: HLA-B*44:05H
  source 1..11: note = Severe acute respiratory syndrome coronavirus 2
DEDDNLIDSYF

SEQ ID NO: 5879 - protein, 11 aa, Severe acute respiratory syndrome-related coronavirus
  REGION 1..11: note = Table A: HLA-A*74:01M HLA-A*33:01H HLA-A*68:01H HLA-A*34:01H HLA-A*66:01H
  source 1..11: note = Severe acute respiratory syndrome coronavirus 2
NLIDSYFVVKR

SEQ ID NO: 5880 - protein, 11 aa, Severe acute respiratory syndrome-related coronavirus
  REGION 1..11: note = Table A: HLA-A*66:01H
  source 1..11: note = Severe acute respiratory syndrome coronavirus 2
DSYFVVKRHTF

SEQ ID NO: 5881 - protein, 11 aa, Severe acute respiratory syndrome-related coronavirus
  REGION 1..11: note = Table A: HLA-A*02:11M HLA-A*02:04H HLA-A*02:05M HLA-A*02:06H HLA-A*02:07H HLA-A*02:02H HLA-A*24:07H HLA-C*08:01M HLA-B*38:01H HLA-B*38:02M HLA-B*40:06H HLA-B*13:01M HLA-B*13:02H
  source 1..11: note = Severe acute respiratory syndrome coronavirus 2
YQHEETIYNLL

SEQ ID NO: 5882 - protein, 11 aa, Severe acute respiratory syndrome-related coronavirus
  REGION 1..11: note = Table A: HLA-A*74:01M
  source 1..11: note = Severe acute respiratory syndrome coronavirus 2
AVAKHDFFKFR

SEQ ID NO: 5883 - protein, 11 aa, Severe acute respiratory syndrome-related coronavirus
  REGION 1..11: note = Table A: HLA-B*38:02H
  source 1..11: note = Severe acute respiratory syndrome coronavirus 2
FRIDGDMVPHI

SEQ ID NO: 5884 - protein, 11 aa, Severe acute respiratory syndrome-related coronavirus
  REGION 1..11: note = Table A: HLA-B*38:01M HLA-B*38:02H HLA-B*39:01M HLA-B*15:10H
  source 1..11: note = Severe acute respiratory syndrome coronavirus 2
RHFDEGNCDTL

SEQ ID NO: 5885 - protein, 11 aa, Severe acute respiratory syndrome-related coronavirus
  REGION 1..11: note = Table A: HLA-A*24:07H
  source 1..11: note = Severe acute respiratory syndrome coronavirus 2
DYFNKKDWYDF

SEQ ID NO: 5886 - protein, 11 aa, Severe acute respiratory syndrome-related coronavirus
  REGION 1..11: note = Table A: HLA-A*36:01H HLA-A*25:01H HLA-B*46:01H HLA-A*26:01H HLA-A*29:02H HLA-C*03:02H HLA-A*30:02H HLA-C*12:02H HLA-B*35:01H HLA-B*35:07H HLA-B*38:02H HLA-B*15:02H HLA-C*02:02H
  source 1..11: note = Severe acute respiratory syndrome coronavirus 2
FVENPDILRVY

SEQ ID NO: 5887 - protein, 11 aa, Severe acute respiratory syndrome-related coronavirus
  REGION 1..11: note = Table A: HLA-B*45:01M HLA-B*40:06H HLA-B*50:01H
  source 1..11: note = Severe acute respiratory syndrome coronavirus 2
VENPDILRVYA

SEQ ID NO: 5888 - protein, 11 aa, Severe acute respiratory syndrome-related coronavirus
  REGION 1..11: note = Table A: HLA-A*74:01H
  source 1..11: note = Severe acute respiratory syndrome coronavirus 2
ILRVYANLGER

SEQ ID NO: 5889 - protein, 11 aa, Severe acute respiratory syndrome-related coronavirus
  REGION 1..11: note = Table A: HLA-A*74:01H HLA-A*30:02H HLA-A*31:01H
  source 1..11: note = Severe acute respiratory syndrome coronavirus 2
RVYANLGERVR

SEQ ID NO: 5890 - protein, 11 aa, Severe acute respiratory syndrome-related coronavirus
  REGION 1..11: note = Table A: HLA-A*68:02M HLA-B*51:01H
  source 1..11: note = Severe acute respiratory syndrome coronavirus 2
DAMRNAGIVGV

SEQ ID NO: 5891 - protein, 11 aa, Severe acute respiratory syndrome-related coronavirus
  REGION 1..11: note = Table A: HLA-A*30:02H
  source 1..11: note = Severe acute respiratory syndrome coronavirus 2
GSGVPVVDSYY

SEQ ID NO: 5892 - protein, 11 aa, Severe acute respiratory syndrome-related coronavirus
  REGION 1..11: note = Table A: HLA-A*24:02H HLA-A*24:07H
  source 1..11: note = Severe acute respiratory syndrome coronavirus 2
YYSLLMPILTL

SEQ ID NO: 5893 - protein, 11 aa, Severe acute respiratory syndrome-related coronavirus
  REGION 1..11: note = Table A: HLA-A*02:11H HLA-A*02:02H
  source 1..11: note = Severe acute respiratory syndrome coronavirus 2
LLMPILTLTRA

SEQ ID NO: 5894 - protein, 11 aa, Severe acute respiratory syndrome-related coronavirus
  REGION 1..11: note = Table A: HLA-B*54:01H
  source 1..11: note = Severe acute respiratory syndrome coronavirus 2
MPILTLTRALT

SEQ ID NO: 5895 - protein, 11 aa, Severe acute respiratory syndrome-related coronavirus
  REGION 1..11: note = Table A: HLA-A*68:02H
  source 1..11: note = Severe acute respiratory syndrome coronavirus 2
LTAESHVDTDL

SEQ ID NO: 5896 - protein, 11 aa, Severe acute respiratory syndrome-related coronavirus
  REGION 1..11: note = Table A: HLA-A*02:07H HLA-B*38:02H HLA-B*13:01H
  source 1..11: note = Severe acute respiratory syndrome coronavirus 2
HVDTDLTKPYI

SEQ ID NO: 5897 - protein, 11 aa, Severe acute respiratory syndrome-related coronavirus
  REGION 1..11: note = Table A: HLA-A*33:01H
  source 1..11: note = Severe acute respiratory syndrome coronavirus 2
DLLKYDFTEER

SEQ ID NO: 5898 - protein, 11 aa, Severe acute respiratory syndrome-related coronavirus
  REGION 1..11: note = Table A: HLA-A*02:02M
  source 1..11: note = Severe acute respiratory syndrome coronavirus 2
LLKYDFTEERL

SEQ ID NO: 5899 - protein, 11 aa, Severe acute respiratory syndrome-related coronavirus
  REGION 1..11: note = Table A: HLA-A*74:01H
  source 1..11: note = Severe acute respiratory syndrome coronavirus 2
RLKLFDRYFKY

SEQ ID NO: 5900 - protein, 11 aa, Severe acute respiratory syndrome-related coronavirus
  REGION 1..11: note = Table A: HLA-C*14:03H HLA-A*24:07H
  source 1..11: note = Severe acute respiratory syndrome coronavirus 2
LFSTVFPPTSF

SEQ ID NO: 5901 - protein, 11 aa, Severe acute respiratory syndrome-related coronavirus
  REGION 1..11: note = Table A: HLA-C*03:03H HLA-A*02:11H HLA-C*03:02H HLA-C*03:04H HLA-A*68:02M HLA-A*02:08H HLA-A*34:01H HLA-A*34:02H HLA-C*08:01H HLA-C*08:03M HLA-B*38:02H HLA-A*66:01H
  source 1..11: note = Severe acute respiratory syndrome coronavirus 2
TVFPPTSFGPL

SEQ ID NO: 5902 - protein, 11 aa, Severe acute respiratory syndrome-related coronavirus
  REGION 1..11: note = Table A: HLA-A*29:02H HLA-A*24:07M HLA-A*23:01H
  source 1..11: note = Severe acute respiratory syndrome coronavirus 2
VFPPTSFGPLV

SEQ ID NO: 5903 - protein, 11 aa, Severe acute respiratory syndrome-related coronavirus
  REGION 1..11: note = Table A: HLA-A*02:11M HLA-B*13:02H
  source 1..11: note = Severe acute respiratory syndrome coronavirus 2
KIFVDGVPFVV

SEQ ID NO: 5904 - protein, 11 aa, Severe acute respiratory syndrome-related coronavirus
  REGION 1..11: note = Table A: HLA-B*53:01H HLA-B*35:01H HLA-A*24:07H HLA-B*35:07H
  source 1..11: note = Severe acute respiratory syndrome coronavirus 2
VPFVVSTGYHF

SEQ ID NO: 5905 - protein, 11 aa, Severe acute respiratory syndrome-related coronavirus
  REGION 1..11: note = Table A: HLA-B*40:02H HLA-B*49:01H
  source 1..11: note = Severe acute respiratory syndrome coronavirus 2
RELGVVHNQDV

SEQ ID NO: 5906 - protein, 11 aa, Severe acute respiratory syndrome-related coronavirus
  REGION 1..11: note = Table A: HLA-A*33:01M HLA-A*33:03M
  source 1..11: note = Severe acute respiratory syndrome coronavirus 2
HNQDVNLHSSR

SEQ ID NO: 5907 - protein, 11 aa, Severe acute respiratory syndrome-related coronavirus
  REGION 1..11: note = Table A: HLA-B*38:01H HLA-B*38:02M
  source 1..11: note = Severe acute respiratory syndrome coronavirus 2
NQDVNLHSSRL

SEQ ID NO: 5908 - protein, 11 aa, Severe acute respiratory syndrome-related coronavirus
  REGION 1..11: note = Table A: HLA-B*27:05M HLA-C*07:01H
  source 1..11: note = Severe acute respiratory syndrome coronavirus 2
SRLSFKELLVY

SEQ ID NO: 5909 - protein, 11 aa, Severe acute respiratory syndrome-related coronavirus
  REGION 1..11: note = Table A: HLA-A*02:02H
  source 1..11: note = Severe acute respiratory syndrome coronavirus 2
RLSFKELLVYA

SEQ ID NO: 5910 - protein, 11 aa, Severe acute respiratory syndrome-related coronavirus
  REGION 1..11: note = Table A: HLA-A*02:02H
  source 1..11: note = Severe acute respiratory syndrome coronavirus 2
VYAADPAMHAA

SEQ ID NO: 5911 - protein, 11 aa, Severe acute respiratory syndrome-related coronavirus
  REGION 1..11: note = Table A: HLA-A*68:02H HLA-A*34:02H
  source 1..11: note = Severe acute respiratory syndrome coronavirus 2
YAADPAMHAAS

SEQ ID NO: 5912 - protein, 11 aa, Severe acute respiratory syndrome-related coronavirus
  REGION 1..11: note = Table A: HLA-A*02:11H HLA-A*02:02H HLA-B*13:02H
  source 1..11: note = Severe acute respiratory syndrome coronavirus 2
AMHAASGNLLL

SEQ ID NO: 5913 - protein, 11 aa, Severe acute respiratory syndrome-related coronavirus
  REGION 1..11: note = Table A: HLA-A*36:01H HLA-B*27:02H HLA-A*68:01H HLA-A*34:02M
  source 1..11: note = Severe acute respiratory syndrome coronavirus 2
HAASGNLLLDK

SEQ ID NO: 5914 - protein, 11 aa, Severe acute respiratory syndrome-related coronavirus
  REGION 1..11: note = Table A: HLA-C*15:05H HLA-B*35:01H HLA-B*15:01H HLA-B*15:02H HLA-B*07:05H HLA-B*57:03H
  source 1..11: note = Severe acute respiratory syndrome coronavirus 2
SVAALTNNVAF

SEQ ID NO: 5915 - protein, 11 aa, Severe acute respiratory syndrome-related coronavirus
  REGION 1..11: note = Table A: HLA-A*02:04H HLA-A*02:01H HLA-B*38:02H HLA-B*13:02H
  source 1..11: note = Severe acute respiratory syndrome coronavirus 2
ALTNNVAFQTV

SEQ ID NO: 5916 - protein, 11 aa, Severe acute respiratory syndrome-related coronavirus
  REGION 1..11: note = Table A: HLA-A*11:01H HLA-A*11:02H
  source 1..11: note = Severe acute respiratory syndrome coronavirus 2
LTNNVAFQTVK

SEQ ID NO: 5917 - protein, 11 aa, Severe acute respiratory syndrome-related coronavirus
  REGION 1..11: note = Table A: HLA-C*12:02H HLA-B*57:03H
  source 1..11: note = Severe acute respiratory syndrome coronavirus 2
VAFQTVKPGNF

SEQ ID NO: 5918 - protein, 11 aa, Severe acute respiratory syndrome-related coronavirus
  REGION 1..11: note = Table A: HLA-B*07:04H
  source 1..11: note = Severe acute respiratory syndrome coronavirus 2
TVKPGNFNKDF

SEQ ID NO: 5919 - protein, 11 aa, Severe acute respiratory syndrome-related coronavirus
  REGION 1..11: note = Table A: HLA-A*36:01H HLA-A*29:02H HLA-C*04:01H HLA-C*04:03M
  source 1..11: note = Severe acute respiratory syndrome coronavirus 2
FYDFAVSKGFF

SEQ ID NO: 5920 - protein, 11 aa, Severe acute respiratory syndrome-related coronavirus
  REGION 1..11: note = Table A: HLA-C*14:03H HLA-A*02:02H HLA-C*08:03M
  source 1..11: note = Severe acute respiratory syndrome coronavirus 2
GFFKEGSSVEL

SEQ ID NO: 5921 - protein, 11 aa, Severe acute respiratory syndrome-related coronavirus
  REGION 1..11: note = Table A: HLA-A*33:03H
  source 1..11: note = Severe acute respiratory syndrome coronavirus 2
FFKEGSSVELK

SEQ ID NO: 5922 - protein, 11 aa, Severe acute respiratory syndrome-related coronavirus
  REGION 1..11: note = Table A: HLA-B*57:03H
  source 1..11: note = Severe acute respiratory syndrome coronavirus 2
GSSVELKHFFF

SEQ ID NO: 5923 - protein, 11 aa, Severe acute respiratory syndrome-related coronavirus
  REGION 1..11: note = Table A: HLA-C*14:03H
  source 1..11: note = Severe acute respiratory syndrome coronavirus 2
FFFAQDGNAAI

SEQ ID NO: 5924 - protein, 11 aa, Severe acute respiratory syndrome-related coronavirus
  REGION 1..11: note = Table A: HLA-A*30:02H HLA-B*15:01H HLA-B*39:01H
  source 1..11: note = Severe acute respiratory syndrome coronavirus 2
AQDGNAAISDY

SEQ ID NO: 5925 - protein, 11 aa, Severe acute respiratory syndrome-related coronavirus
  REGION 1..11: note = Table A: HLA-A*29:02H
  source 1..11: note = Severe acute respiratory syndrome coronavirus 2
GNAAISDYDYY

SEQ ID NO: 5926 - protein, 11 aa, Severe acute respiratory syndrome-related coronavirus
  REGION 1..11: note = Table A: HLA-A*36:01H HLA-A*30:02H
  source 1..11: note = Severe acute respiratory syndrome coronavirus 2
AAISDYDYYRY

SEQ ID NO: 5927 - protein, 11 aa, Severe acute respiratory syndrome-related coronavirus
  REGION 1..11: note = Table A: HLA-A*11:01H HLA-A*11:02H
  source 1..11: note = Severe acute respiratory syndrome coronavirus 2
SAGFPFNKWGK

SEQ ID NO: 5928 - protein, 11 aa, Severe acute respiratory syndrome-related coronavirus
  REGION 1..11: note = Table A: HLA-A*29:01H HLA-A*29:02H HLA-A*30:02H
  source 1..11: note = Severe acute respiratory syndrome coronavirus 2
SYEDQDALFAY

SEQ ID NO: 5929 - protein, 11 aa, Severe acute respiratory syndrome-related coronavirus
  REGION 1..11: note = Table A: HLA-B*27:02H
  source 1..11: note = Severe acute respiratory syndrome coronavirus 2
EDQDALFAYTK

SEQ ID NO: 5930 - protein, 11 aa, Severe acute respiratory syndrome-related coronavirus
  REGION 1..11: note = Table A: HLA-B*39:06H
  source 1..11: note = Severe acute respiratory syndrome coronavirus 2
TQMNLKYAISA

SEQ ID NO: 5931 - protein, 11 aa, Severe acute respiratory syndrome-related coronavirus
  REGION 1..11: note = Table A: HLA-A*33:01H HLA-A*33:03H
  source 1..11: note = Severe acute respiratory syndrome coronavirus 2
NLKYAISAKNR

SEQ ID NO: 5932 - protein, 11 aa, Severe acute respiratory syndrome-related coronavirus
  REGION 1..11: note = Table A: HLA-A*74:01H
  source 1..11: note = Severe acute respiratory syndrome coronavirus 2
KYAISAKNRAR

SEQ ID NO: 5933 - protein, 11 aa, Severe acute respiratory syndrome-related coronavirus
  REGION 1..11: note = Table A: HLA-B*38:02H HLA-B*15:02H
  source 1..11: note = Severe acute respiratory syndrome coronavirus 2
TVAGVSICSTM

SEQ ID NO: 5934 - protein, 11 aa, Severe acute respiratory syndrome-related coronavirus
  REGION 1..11: note = Table A: HLA-A*11:303M HLA-A*74:01H HLA-A*03:01H HLA-A*03:02M HLA-A*11:01H HLA-A*11:02H HLA-A*30:01H HLA-A*30:02H HLA-A*68:01H HLA-A*34:02M HLA-C*07:27M
  source 1..11: note = Severe acute respiratory syndrome coronavirus 2
STMTNRQFHQK

SEQ ID NO: 5935 - protein, 11 aa, Severe acute respiratory syndrome-related coronavirus
  REGION 1..11: note = Table A: HLA-B*07:04H HLA-B*13:02H
  source 1..11: note = Severe acute respiratory syndrome coronavirus 2
RQFHQKLLKSI

SEQ ID NO: 5936 - protein, 11 aa, Severe acute respiratory syndrome-related coronavirus
  REGION 1..11: note = Table A: HLA-A*02:03H
  source 1..11: note = Severe acute respiratory syndrome coronavirus 2
LLKSIAATRGA

SEQ ID NO: 5937 - protein, 11 aa, Severe acute respiratory syndrome-related coronavirus
  REGION 1..11: note = Table A: HLA-B*58:02M HLA-B*57:03H
  source 1..11: note = Severe acute respiratory syndrome coronavirus 2
KSIAATRGATV

SEQ ID NO: 5938 - protein, 11 aa, Severe acute respiratory syndrome-related coronavirus
  REGION 1..11: note = Table A: HLA-A*03:01H HLA-A*03:02M HLA-A*11:01H HLA-A*11:02H HLA-A*36:01H HLA-B*27:02H HLA-A*30:02H
  source 1..11: note = Severe acute respiratory syndrome coronavirus 2
RGATVVIGTSK

SEQ ID NO: 5939 - protein, 11 aa, Severe acute respiratory syndrome-related coronavirus
  REGION 1..11: note = Table A: HLA-B*57:03H
  source 1..11: note = Severe acute respiratory syndrome coronavirus 2
GATVVIGTSKF

SEQ ID NO: 5940 - protein, 11 aa, Severe acute respiratory syndrome-related coronavirus
  REGION 1..11: note = Table A: HLA-A*36:01H HLA-A*30:02M
  source 1..11: note = Severe acute respiratory syndrome coronavirus 2
ATVVIGTSKFY

SEQ ID NO: 5941 - protein, 11 aa, Severe acute respiratory syndrome-related coronavirus
  REGION 1..11: note = Table A: HLA-A*02:11M HLA-A*68:02H HLA-A*02:04M HLA-A*02:05M HLA-A*02:06M HLA-A*02:07H HLA-A*02:08M HLA-A*02:01H HLA-A*02:02M HLA-C*08:01H HLA-B*38:02H HLA-B*13:01H
  source 1..11: note = Severe acute respiratory syndrome coronavirus 2
TVYSDVENPHL

SEQ ID NO: 5942 - protein, 11 aa, Severe acute respiratory syndrome-related coronavirus
  REGION 1..11: note = Table A: HLA-C*14:03H HLA-A*02:02H HLA-A*24:02M HLA-A*24:07M HLA-C*08:01H HLA-A*23:01M
  source 1..11: note = Severe acute respiratory syndrome coronavirus 2
VYSDVENPHLM

SEQ ID NO: 5943 - protein, 11 aa, Severe acute respiratory syndrome-related coronavirus
  REGION 1..11: note = Table A: HLA-B*44:03H
  source 1..11: note = Severe acute respiratory syndrome coronavirus 2
SDVENPHLMGW

SEQ ID NO: 5944 - protein, 11 aa, Severe acute respiratory syndrome-related coronavirus
  REGION 1..11: note = Table A: HLA-B*44:03H HLA-A*30:02H
  source 1..11: note = Severe acute respiratory syndrome coronavirus 2
VENPHLMGWDY

SEQ ID NO: 5945 - protein, 11 aa, Severe acute respiratory syndrome-related coronavirus
  REGION 1..11: note = Table A: HLA-B*56:01H HLA-B*55:02M
  source 1..11: note = Severe acute respiratory syndrome coronavirus 2
RAMPNMLRIMA

SEQ ID NO: 5946 - protein, 11 aa, Severe acute respiratory syndrome-related coronavirus
  REGION 1..11: note = Table A: HLA-B*42:01H HLA-B*35:03H HLA-C*15:05H HLA-B*07:02M HLA-B*07:04M
  source 1..11: note = Severe acute respiratory syndrome coronavirus 2
MPNMLRIMASL

SEQ ID NO: 5947 - protein, 11 aa, Severe acute respiratory syndrome-related coronavirus
  REGION 1..11: note = Table A: HLA-A*74:01H HLA-A*03:02H HLA-A*11:02H
  source 1..11: note = Severe acute respiratory syndrome coronavirus 2
RIMASLVLARK

SEQ ID NO: 5948 - protein, 11 aa, Severe acute respiratory syndrome-related coronavirus
  REGION 1..11: note = Table A: HLA-A*11:02H HLA-A*34:02H
  source 1..11: note = Severe acute respiratory syndrome coronavirus 2
MVMCGGSLYVK

SEQ ID NO: 5949 - protein, 11 aa, Severe acute respiratory syndrome-related coronavirus
  REGION 1..11: note = Table A: HLA-B*38:02H
  source 1..11: note = Severe acute respiratory syndrome coronavirus 2
SLYVKPGGTSS

SEQ ID NO: 5950 - protein, 11 aa, Severe acute respiratory syndrome-related coronavirus
  REGION 1..11: note = Table A: HLA-A*36:01H HLA-A*29:02H HLA-A*30:02M HLA-B*15:01H
  source 1..11: note = Severe acute respiratory syndrome coronavirus 2
GTSSGDATTAY

SEQ ID NO: 5951 - protein, 11 aa, Severe acute respiratory syndrome-related coronavirus
  REGION 1..11: note = Table A: HLA-B*54:01H
  source 1..11: note = Severe acute respiratory syndrome coronavirus 2
YANSVFNICQA

SEQ ID NO: 5952 - protein, 11 aa, Severe acute respiratory syndrome-related coronavirus
  REGION 1..11: note = Table A: HLA-B*58:01H HLA-A*36:01H HLA-A*01:01H HLA-A*30:02H
  source 1..11: note = Severe acute respiratory syndrome coronavirus 2
STDGNKIADKY

SEQ ID NO: 5953 - protein, 11 aa, Severe acute respiratory syndrome-related coronavirus
  REGION 1..11: note = Table A: HLA-A*33:01M HLA-A*33:03H
  source 1..11: note = Severe acute respiratory syndrome coronavirus 2
DGNKIADKYVR

SEQ ID NO: 5954 - protein, 11 aa, Severe acute respiratory syndrome-related coronavirus
  REGION 1..11: note = Table A: HLA-A*30:02H
  source 1..11: note = Severe acute respiratory syndrome coronavirus 2
KYVRNLQHRLY

SEQ ID NO: 5955 - protein, 11 aa, Severe acute respiratory syndrome-related coronavirus
  REGION 1..11: note = Table A: HLA-B*44:05M HLA-B*40:02H
  source 1..11: note = Severe acute respiratory syndrome coronavirus 2
RDVDTDFVNEF

SEQ ID NO: 5956 - protein, 11 aa, Severe acute respiratory syndrome-related coronavirus
  REGION 1..11: note = Table A: HLA-A*36:01H HLA-A*01:01H
  source 1..11: note = Severe acute respiratory syndrome coronavirus 2
DVDTDFVNEFY

SEQ ID NO: 5957 - protein, 11 aa, Severe acute respiratory syndrome-related coronavirus
  REGION 1..11: note = Table A: HLA-A*36:01H HLA-A*01:01H
  source 1..11: note = Severe acute respiratory syndrome coronavirus 2
DTDFVNEFYAY

SEQ ID NO: 5958 - protein, 11 aa, Severe acute respiratory syndrome-related coronavirus
  REGION 1..11: note = Table A: HLA-A*24:02H HLA-A*23:01H
  source 1..11: note = Severe acute respiratory syndrome coronavirus 2
TYASQGLVASI

SEQ ID NO: 5959 - protein, 11 aa, Severe acute respiratory syndrome-related coronavirus
  REGION 1..11: note = Table A: HLA-A*34:02H
  source 1..11: note = Severe acute respiratory syndrome coronavirus 2
YASQGLVASIK

SEQ ID NO: 5960 - protein, 11 aa, Severe acute respiratory syndrome-related coronavirus
  REGION 1..11: note = Table A: HLA-A*30:02H HLA-B*57:03H
  source 1..11: note = Severe acute respiratory syndrome coronavirus 2
ASIKNFKSVLY

SEQ ID NO: 5961 - protein, 11 aa, Severe acute respiratory syndrome-related coronavirus
  REGION 1..11: note = Table A: HLA-A*30:02H HLA-C*02:02H
  source 1..11: note = Severe acute respiratory syndrome coronavirus 2
SIKNFKSVLYY

SEQ ID NO: 5962 - protein, 11 aa, Severe acute respiratory syndrome-related coronavirus
  REGION 1..11: note = Table A: HLA-B*58:02H HLA-B*57:03M
  source 1..11: note = Severe acute respiratory syndrome coronavirus 2
KSVLYYQNNVF

SEQ ID NO: 5963 - protein, 11 aa, Severe acute respiratory syndrome-related coronavirus
  REGION 1..11: note = Table A: HLA-B*27:02H
  source 1..11: note = Severe acute respiratory syndrome coronavirus 2
YQNNVFMSEAK

SEQ ID NO: 5964 - protein, 11 aa, Severe acute respiratory syndrome-related coronavirus
  REGION 1..11: note = Table A: HLA-A*36:01M HLA-A*01:01H HLA-A*30:02H
  source 1..11: note = Severe acute respiratory syndrome coronavirus 2
HTMLVKQGDDY

SEQ ID NO: 5965 - protein, 11 aa, Severe acute respiratory syndrome-related coronavirus
  REGION 1..11: note = Table A: HLA-A*36:01H
  source 1..11: note = Severe acute respiratory syndrome coronavirus 2
KQGDDYVYLPY

SEQ ID NO: 5966 - protein, 11 aa, Severe acute respiratory syndrome-related coronavirus
  REGION 1..11: note = Table A: HLA-A*74:01H HLA-A*66:01H
  source 1..11: note = Severe acute respiratory syndrome coronavirus 2
YVYLPYPDPSR

SEQ ID NO: 5967 - protein, 11 aa, Severe acute respiratory syndrome-related coronavirus
  REGION 1..11: note = Table A: HLA-C*14:03H HLA-A*24:02M HLA-A*24:07H HLA-A*23:01H
  source 1..11: note = Severe acute respiratory syndrome coronavirus 2
VYLPYPDPSRI

SEQ ID NO: 5968 - protein, 11 aa, Severe acute respiratory syndrome-related coronavirus
  REGION 1..11: note = Table A: HLA-A*02:11H HLA-A*02:07H
  source 1..11: note = Severe acute respiratory syndrome coronavirus 2
YLPYPDPSRIL

SEQ ID NO: 5969 - protein, 11 aa, Severe acute respiratory syndrome-related coronavirus
  REGION 1..11: note = Table A: HLA-B*56:01H HLA-B*53:01H HLA-B*55:02H HLA-C*15:05H HLA-B*35:01H HLA-B*35:07H HLA-B*54:01M
  source 1..11: note = Severe acute respiratory syndrome coronavirus 2
LPYPDPSRILG

SEQ ID NO: 5970 - protein, 11 aa, Severe acute respiratory syndrome-related coronavirus
  REGION 1..11: note = Table A: HLA-A*24:07H
  source 1..11: note = Severe acute respiratory syndrome coronavirus 2
PYPDPSRILGA

SEQ ID NO: 5971 - protein, 11 aa, Severe acute respiratory syndrome-related coronavirus
  REGION 1..11: note = Table A: HLA-A*02:11H HLA-A*02:07H
  source 1..11: note = Severe acute respiratory syndrome coronavirus 2
FVDDIVKTDGT

SEQ ID NO: 5972 - protein, 11 aa, Severe acute respiratory syndrome-related coronavirus
  REGION 1..11: note = Table A: HLA-A*36:01M HLA-C*04:03H HLA-B*57:03M
  source 1..11: note = Severe acute respiratory syndrome coronavirus 2
KTDGTLMIERF

SEQ ID NO: 5973 - protein, 11 aa, Severe acute respiratory syndrome-related coronavirus
  REGION 1..11: note = Table A: HLA-A*02:11H HLA-A*02:04H
  source 1..11: note = Severe acute respiratory syndrome coronavirus 2
GTLMIERFVSL

SEQ ID NO: 5974 - protein, 11 aa, Severe acute respiratory syndrome-related coronavirus
  REGION 1..11: note = Table A: HLA-B*27:02H HLA-B*38:02H HLA-B*39:01H
  source 1..11: note = Severe acute respiratory syndrome coronavirus 2
ERFVSLAIDAY

SEQ ID NO: 5975 - protein, 11 aa, Severe acute respiratory syndrome-related coronavirus
  REGION 1..11: note = Table A: HLA-A*03:02H HLA-A*11:01H HLA-B*27:02H
  source 1..11: note = Severe acute respiratory syndrome coronavirus 2
SLAIDAYPLTK

SEQ ID NO: 5976 - protein, 11 aa, Severe acute respiratory syndrome-related coronavirus
  REGION 1..11: note = Table A: HLA-A*29:02H HLA-B*53:01H HLA-B*55:02H HLA-C*15:05H HLA-B*35:01H HLA-B*35:08H HLA-B*35:07H HLA-B*38:02H HLA-B*54:01H HLA-B*15:02H HLA-B*07:05H HLA-B*15:11M
  source 1..11: note = Severe acute respiratory syndrome coronavirus 2
YPLTKHPNQEY

SEQ ID NO: 5977 - protein, 11 aa, Severe acute respiratory syndrome-related coronavirus
  REGION 1..11: note = Table A: HLA-B*38:02H
  source 1..11: note = Severe acute respiratory syndrome coronavirus 2
KHPNQEYADVF

SEQ ID NO: 5978 - protein, 11 aa, Severe acute respiratory syndrome-related coronavirus
  REGION 1..11: note = Table A: HLA-A*36:01H
  source 1..11: note = Severe acute respiratory syndrome coronavirus 2
YADVFHLYLQY

SEQ ID NO: 5979 - protein, 11 aa, Severe acute respiratory syndrome-related coronavirus
  REGION 1..11: note = Table A: HLA-A*74:01H HLA-A*02:11M HLA-A*30:02H HLA-A*02:04H HLA-A*02:05H HLA-A*02:08H HLA-A*02:02H HLA-C*08:01H HLA-B*38:02H HLA-B*13:01M
  source 1..11: note = Severe acute respiratory syndrome coronavirus 2
KLHDELTGHML

SEQ ID NO: 5980 - protein, 11 aa, Severe acute respiratory syndrome-related coronavirus
  REGION 1..11: note = Table A: HLA-A*11:303H HLA-A*74:01M HLA-A*03:02M HLA-A*11:01M HLA-A*11:02M HLA-A*33:03H HLA-A*68:01M HLA-A*34:01H HLA-A*34:02H HLA-C*07:27M HLA-A*31:01H HLA-A*66:01M
  source 1..11: note = Severe acute respiratory syndrome coronavirus 2
SVMLTNDNTSR

SEQ ID NO: 5981 - protein, 11 aa, Severe acute respiratory syndrome-related coronavirus
  REGION 1..11: note = Table A: HLA-A*29:02H HLA-A*30:02M HLA-B*15:01H
  source 1..11: note = Severe acute respiratory syndrome coronavirus 2
VMLTNDNTSRY

SEQ ID NO: 5982 - protein, 11 aa, Severe acute respiratory syndrome-related coronavirus
  REGION 1..11: note = Table A: HLA-A*02:11H HLA-C*08:01H
  source 1..11: note = Severe acute respiratory syndrome coronavirus 2
RYWEPEFYEAM

SEQ ID NO: 5983 - protein, 11 aa, Severe acute respiratory syndrome-related coronavirus
  REGION 1..11: note = Table A: HLA-B*45:01H HLA-B*40:01H HLA-B*40:02H HLA-B*50:01H
  source 1..11: note = Severe acute respiratory syndrome coronavirus 2
YEAMYTPHTVL

SEQ ID NO: 5984 - protein, 11 aa, Severe acute respiratory syndrome-related coronavirus
  REGION 1..11: note = Table A: HLA-A*02:11H HLA-A*02:02H HLA-A*02:03M
  source 1..11: note = Severe acute respiratory syndrome coronavirus 2
AMYTPHTVLQA

SEQ ID NO: 5985 - protein, 11 aa, Severe acute respiratory syndrome-related coronavirus
  REGION 1..11: note = Table A: HLA-A*68:02H
  source 1..11: note = Severe acute respiratory syndrome coronavirus 2
YTPHTVLQAVG

SEQ ID NO: 5986 - protein, 11 aa, Severe acute respiratory syndrome-related coronavirus
  REGION 1..11: note = Table A: HLA-B*56:01M HLA-B*55:02H HLA-B*55:01H HLA-B*54:01M
  source 1..11: note = Severe acute respiratory syndrome coronavirus 2
TPHTVLQAVGA

SEQ ID NO: 5987 - protein, 11 aa, Severe acute respiratory syndrome-related coronavirus
  REGION 1..11: note = Table A: HLA-B*07:04H
  source 1..11: note = Severe acute respiratory syndrome coronavirus 2
HVISTSHKLVL

SEQ ID NO: 5988 - protein, 11 aa, Severe acute respiratory syndrome-related coronavirus
  REGION 1..11: note = Table A: HLA-A*36:01H
  source 1..11: note = Severe acute respiratory syndrome coronavirus 2
GCDVTDVTQLY

SEQ ID NO: 5989 - protein, 11 aa, Severe acute respiratory syndrome-related coronavirus
  REGION 1..11: note = Table A: HLA-A*68:02H
  source 1..11: note = Severe acute respiratory syndrome coronavirus 2
DVTDVTQLYLG

SEQ ID NO: 5990 - protein, 11 aa, Severe acute respiratory syndrome-related coronavirus
  REGION 1..11: note = Table A: HLA-A*36:01H
  source 1..11: note = Severe acute respiratory syndrome coronavirus 2
VTQLYLGGMSY

SEQ ID NO: 5991 - protein, 11 aa, Severe acute respiratory syndrome-related coronavirus
  REGION 1..11: note = Table A: HLA-A*30:02H HLA-B*38:02H HLA-B*15:01H
  source 1..11: note = Severe acute respiratory syndrome coronavirus 2
TQLYLGGMSYY

SEQ ID NO: 5992 - protein, 11 aa, Severe acute respiratory syndrome-related coronavirus
  REGION 1..11: note = Table A: HLA-A*24:07H
  source 1..11: note = Severe acute respiratory syndrome coronavirus 2
SFPLCANGQVF

SEQ ID NO: 5993 - protein, 11 aa, Severe acute respiratory syndrome-related coronavirus
  REGION 1..11: note = Table A: HLA-A*68:02H HLA-A*02:05H HLA-A*02:08H
  source 1..11: note = Severe acute respiratory syndrome coronavirus 2
NVTDFNAIATC

SEQ ID NO: 5994 - protein, 11 aa, Severe acute respiratory syndrome-related coronavirus
  REGION 1..11: note = Table A: HLA-A*33:01M HLA-A*33:03M
  source 1..11: note = Severe acute respiratory syndrome coronavirus 2
DYILANTCTER

SEQ ID NO: 5995 - protein, 11 aa, Severe acute respiratory syndrome-related coronavirus
  REGION 1..11: note = Table A: HLA-A*74:01M HLA-A*30:01H
  source 1..11: note = Severe acute respiratory syndrome coronavirus 2
RLKLFAAETLK

SEQ ID NO: 5996 - protein, 11 aa, Severe acute respiratory syndrome-related coronavirus
  REGION 1..11: note = Table A: HLA-A*02:11H HLA-A*02:02H
  source 1..11: note = Severe acute respiratory syndrome coronavirus 2
KLFAAETLKAT

SEQ ID NO: 5997 - protein, 11 aa, Severe acute respiratory syndrome-related coronavirus
  REGION 1..11: note = Table A: HLA-B*44:02H HLA-B*44:05M HLA-B*44:03H
  source 1..11: note = Severe acute respiratory syndrome coronavirus 2
AETLKATEETF

SEQ ID NO: 5998 - protein, 11 aa, Severe acute respiratory syndrome-related coronavirus
  REGION 1..11: note = Table A: HLA-A*34:02M
  source 1..11: note = Severe acute respiratory syndrome coronavirus 2
ETLKATEETFK

SEQ ID NO: 5999 - protein, 11 aa, Severe acute respiratory syndrome-related coronavirus
  REGION 1..11: note = Table A: HLA-A*02:02H
  source 1..11: note = Severe acute respiratory syndrome coronavirus 2
TLKATEETFKL

SEQ ID NO: 6000 - protein, 11 aa, Severe acute respiratory syndrome-related coronavirus
  REGION 1..11: note = Table A: HLA-B*58:01H HLA-A*36:01M HLA-A*30:02H HLA-B*57:03H
  source 1..11: note = Severe acute respiratory syndrome coronavirus 2
KATEETFKLSY

SEQ ID NO: 6001 - protein, 11 aa, Severe acute respiratory syndrome-related coronavirus
  REGION 1..11: note = Table A: HLA-A*68:02H
  source 1..11: note = Severe acute respiratory syndrome coronavirus 2
ETFKLSYGIAT

SEQ ID NO: 6002 - protein, 11 aa, Severe acute respiratory syndrome-related coronavirus
  REGION 1..11: note = Table A: HLA-B*07:04H
  source 1..11: note = Severe acute respiratory syndrome coronavirus 2
TVREVLSDREL

SEQ ID NO: 6003 - protein, 11 aa, Severe acute respiratory syndrome-related coronavirus
  REGION 1..11: note = Table A: HLA-A*24:07H HLA-A*32:01M
  source 1..11: note = Severe acute respiratory syndrome coronavirus 2
VLSDRELHLSW

SEQ ID NO: 6004 - protein, 11 aa, Severe acute respiratory syndrome-related coronavirus
  REGION 1..11: note = Table A: HLA-A*33:01H HLA-A*33:03M HLA-A*68:01H HLA-A*34:01M HLA-A*34:02H HLA-A*66:01H
  source 1..11: note = Severe acute respiratory syndrome coronavirus 2
EVGKPRPPLNR

SEQ ID NO: 6005 - protein, 11 aa, Severe acute respiratory syndrome-related coronavirus
  REGION 1..11: note = Table A: HLA-B*55:01H HLA-B*07:02H HLA-B*07:04H
  source 1..11: note = Severe acute respiratory syndrome coronavirus 2
KPRPPLNRNYV

SEQ ID NO: 6006 - protein, 11 aa, Severe acute respiratory syndrome-related coronavirus
  REGION 1..11: note = Table A: HLA-A*24:07H
  source 1..11: note = Severe acute respiratory syndrome coronavirus 2
PRPPLNRNYVF

SEQ ID NO: 6007 - protein, 11 aa, Severe acute respiratory syndrome-related coronavirus
  REGION 1..11: note = Table A: HLA-B*15:03H
  source 1..11: note = Severe acute respiratory syndrome coronavirus 2
TKNSKVQIGEY

SEQ ID NO: 6008 - protein, 11 aa, Severe acute respiratory syndrome-related coronavirus
  REGION 1..11: note = Table A: HLA-B*57:03H
  source 1..11: note = Severe acute respiratory syndrome coronavirus 2
NSKVQIGEYTF

SEQ ID NO: 6009 - protein, 11 aa, Severe acute respiratory syndrome-related coronavirus
  REGION 1..11: note = Table A: HLA-A*03:02H HLA-A*11:01H HLA-A*11:02H HLA-A*36:01H
  source 1..11: note = Severe acute respiratory syndrome coronavirus 2
KVQIGEYTFEK

SEQ ID NO: 6010 - protein, 11 aa, Severe acute respiratory syndrome-related coronavirus
  REGION 1..11: note = Table A: HLA-A*36:01H
  source 1..11: note = Severe acute respiratory syndrome coronavirus 2
IGEYTFEKGDY

SEQ ID NO: 6011 - protein, 11 aa, Severe acute respiratory syndrome-related coronavirus
  REGION 1..11: note = Table A: HLA-B*49:01H
  source 1..11: note = Severe acute respiratory syndrome coronavirus 2
FEKGDYGDAVV

SEQ ID NO: 6012 - protein, 11 aa, Severe acute respiratory syndrome-related coronavirus
  REGION 1..11: note = Table A: HLA-A*74:01H HLA-A*36:01M HLA-A*31:01H
  source 1..11: note = Severe acute respiratory syndrome coronavirus 2
KGDYGDAVVYR

SEQ ID NO: 6013 - protein, 11 aa, Severe acute respiratory syndrome-related coronavirus
  REGION 1..11: note = Table A: HLA-A*25:01H HLA-A*26:01H HLA-B*35:01M HLA-B*35:07H HLA-B*38:02H HLA-B*15:02M HLA-B*07:05H HLA-B*15:11H
  source 1..11: note = Severe acute respiratory syndrome coronavirus 2
DAVVYRGTTTY

SEQ ID NO: 6014 - protein, 11 aa, Severe acute respiratory syndrome-related coronavirus
  REGION 1..11: note = Table A: HLA-A*11:01H HLA-A*11:02H HLA-A*34:02H
  source 1..11: note = Severe acute respiratory syndrome coronavirus 2
AVVYRGTTTYK

SEQ ID NO: 6015 - protein, 11 aa, Severe acute respiratory syndrome-related coronavirus
  REGION 1..11: note = Table A: HLA-A*02:02H
  source 1..11: note = Severe acute respiratory syndrome coronavirus 2
VVYRGTTTYKL

SEQ ID NO: 6016 - protein, 11 aa, Severe acute respiratory syndrome-related coronavirus
  REGION 1..11: note = Table A: HLA-A*02:11H HLA-B*57:03M
  source 1..11: note = Severe acute respiratory syndrome coronavirus 2
TTYKLNVGDYF

SEQ ID NO: 6017 - protein, 11 aa, Severe acute respiratory syndrome-related coronavirus
  REGION 1..11: note = Table A: HLA-A*68:02H HLA-B*57:03H
  source 1..11: note = Severe acute respiratory syndrome coronavirus 2
HTVMPLSAPTL

SEQ ID NO: 6018 - protein, 11 aa, Severe acute respiratory syndrome-related coronavirus
  REGION 1..11: note = Table A: HLA-A*02:11H HLA-A*68:02H
  source 1..11: note = Severe acute respiratory syndrome coronavirus 2
TVMPLSAPTLV

SEQ ID NO: 6019 - protein, 11 aa, Severe acute respiratory syndrome-related coronavirus
  REGION 1..11: note = Table A: HLA-B*56:01H HLA-B*55:02H
  source 1..11: note = Severe acute respiratory syndrome coronavirus 2
APTLVPQEHYV

SEQ ID NO: 6020 - protein, 11 aa, Severe acute respiratory syndrome-related coronavirus
  REGION 1..11: note = Table A: HLA-C*14:03H HLA-A*24:02H HLA-A*24:07H HLA-C*08:01H HLA-A*23:01H
  source 1..11: note = Severe acute respiratory syndrome coronavirus 2
LYPTLNISDEF

SEQ ID NO: 6021 - protein, 11 aa, Severe acute respiratory syndrome-related coronavirus
  REGION 1..11: note = Table A: HLA-A*33:03H HLA-B*27:02H
  source 1..11: note = Severe acute respiratory syndrome coronavirus 2
EFSSNVANYQK

SEQ ID NO: 6022 - protein, 11 aa, Severe acute respiratory syndrome-related coronavirus
  REGION 1..11: note = Table A: HLA-A*68:02M
  source 1..11: note = Severe acute respiratory syndrome coronavirus 2
FSSNVANYQKV

SEQ ID NO: 6023 - protein, 11 aa, Severe acute respiratory syndrome-related coronavirus
  REGION 1..11: note = Table A: HLA-A*03:02H HLA-A*11:01H HLA-A*34:02H
  source 1..11: note = Severe acute respiratory syndrome coronavirus 2
VANYQKVGMQK

SEQ ID NO: 6024 - protein, 11 aa, Severe acute respiratory syndrome-related coronavirus
  REGION 1..11: note = Table A: HLA-A*29:02H HLA-A*30:02M
  source 1..11: note = Severe acute respiratory syndrome coronavirus 2
ANYQKVGMQKY

SEQ ID NO: 6025 - protein, 11 aa, Severe acute respiratory syndrome-related coronavirus
  REGION 1..11: note = Table A: HLA-A*11:303M HLA-A*03:01M HLA-A*03:02H HLA-A*11:01H HLA-A*11:02H HLA-A*36:01H HLA-B*27:02H HLA-A*30:01H HLA-A*30:02H HLA-A*68:01H HLA-A*34:02H HLA-C*07:27M
  source 1..11: note = Severe acute respiratory syndrome coronavirus 2
STLQGPPGTGK

SEQ ID NO: 6026 - protein, 11 aa, Severe acute respiratory syndrome-related coronavirus
  REGION 1..11: note = Table A: HLA-A*24:07H HLA-B*57:03H
  source 1..11: note = Severe acute respiratory syndrome coronavirus 2
QGPPGTGKSHF

SEQ ID NO: 6027 - protein, 11 aa, Severe acute respiratory syndrome-related coronavirus
  REGION 1..11: note = Table A: HLA-B*58:01H HLA-B*58:02H HLA-A*36:01M HLA-A*30:02M HLA-B*57:03H
  source 1..11: note = Severe acute respiratory syndrome coronavirus 2
KSHFAIGLALY

SEQ ID NO: 6028 - protein, 11 aa, Severe acute respiratory syndrome-related coronavirus
  REGION 1..11: note = Table A: HLA-A*29:02H HLA-B*38:02H
  source 1..11: note = Severe acute respiratory syndrome coronavirus 2
SHFAIGLALYY

SEQ ID NO: 6029 - protein, 11 aa, Severe acute respiratory syndrome-related coronavirus
  REGION 1..11: note = Table A: HLA-B*46:01H HLA-A*29:02H HLA-A*30:02M HLA-B*38:02H HLA-A*32:01H HLA-B*15:01H HLA-B*15:02H HLA-B*15:03H
  source 1..11: note = Severe acute respiratory syndrome coronavirus 2
ALYYPSARIVY

SEQ ID NO: 6030 - protein, 11 aa, Severe acute respiratory syndrome-related coronavirus
  REGION 1..11: note = Table A: HLA-B*56:01H HLA-B*55:02H HLA-B*54:01H
  source 1..11: note = Severe acute respiratory syndrome coronavirus 2
YPSARIVYTAC

SEQ ID NO: 6031 - protein, 11 aa, Severe acute respiratory syndrome-related coronavirus
  REGION 1..11: note = Table A: HLA-B*35:03H HLA-C*08:01H HLA-B*38:02H
  source 1..11: note = Severe acute respiratory syndrome coronavirus 2
TACSHAAVDAL

SEQ ID NO: 6032 - protein, 11 aa, Severe acute respiratory syndrome-related coronavirus
  REGION 1..11: note = Table A: HLA-A*23:01H
  source 1..11: note = Severe acute respiratory syndrome coronavirus 2
KYLPIDKCSRI

SEQ ID NO: 6033 - protein, 11 aa, Severe acute respiratory syndrome-related coronavirus
  REGION 1..11: note = Table A: HLA-A*30:02M
  source 1..11: note = Severe acute respiratory syndrome coronavirus 2
KFKVNSTLEQY

SEQ ID NO: 6034 - protein, 11 aa, Severe acute respiratory syndrome-related coronavirus
  REGION 1..11: note = Table A: HLA-B*58:01H HLA-A*32:01H HLA-B*57:03H
  source 1..11: note = Severe acute respiratory syndrome coronavirus 2
KVNSTLEQYVF

SEQ ID NO: 6035 - protein, 11 aa, Severe acute respiratory syndrome-related coronavirus
  REGION 1..11: note = Table A: HLA-A*02:07H
  source 1..11: note = Severe acute respiratory syndrome coronavirus 2
ALPETTADIVV

SEQ ID NO: 6036 - protein, 11 aa, Severe acute respiratory syndrome-related coronavirus
  REGION 1..11: note = Table A: HLA-B*53:01H HLA-B*35:03M HLA-B*35:01M HLA-B*35:02H HLA-B*35:08M HLA-B*35:07H HLA-B*35:12M
  source 1..11: note = Severe acute respiratory syndrome coronavirus 2
LPETTADIVVF

SEQ ID NO: 6037 - protein, 11 aa, Severe acute respiratory syndrome-related coronavirus
  REGION 1..11: note = Table A: HLA-A*68:02M HLA-C*08:01H HLA-B*38:02H
  source 1..11: note = Severe acute respiratory syndrome coronavirus 2
TTADIVVFDEI

SEQ ID NO: 6038 - protein, 11 aa, Severe acute respiratory syndrome-related coronavirus
  REGION 1..11: note = Table A: HLA-A*29:01H HLA-A*29:02H
  source 1..11: note = Severe acute respiratory syndrome coronavirus 2
VFDEISMATNY

SEQ ID NO: 6039 - protein, 11 aa, Severe acute respiratory syndrome-related coronavirus
  REGION 1..11: note = Table A: HLA-A*33:01M HLA-A*33:03M HLA-A*68:01M HLA-A*34:01H HLA-A*66:01H
  source 1..11: note = Severe acute respiratory syndrome coronavirus 2
TNYDLSVVNAR

SEQ ID NO: 6040 - protein, 11 aa, Severe acute respiratory syndrome-related coronavirus
  REGION 1..11: note = Table A: HLA-C*04:01H HLA-C*04:03H
  source 1..11: note = Severe acute respiratory syndrome coronavirus 2
NYDLSVVNARL

SEQ ID NO: 6041 - protein, 11 aa, Severe acute respiratory syndrome-related coronavirus
  REGION 1..11: note = Table A: HLA-A*33:01H
  source 1..11: note = Severe acute respiratory syndrome coronavirus 2
YDLSVVNARLR

SEQ ID NO: 6042 - protein, 11 aa, Severe acute respiratory syndrome-related coronavirus
  REGION 1..11: note = Table A: HLA-C*14:03H HLA-A*24:02H HLA-A*24:07M HLA-C*08:01H HLA-C*08:03H HLA-A*23:01M HLA-B*38:02H
  source 1..11: note = Severe acute respiratory syndrome coronavirus 2
HYVYIGDPAQL

SEQ ID NO: 6043 - protein, 11 aa, Severe acute respiratory syndrome-related coronavirus
  REGION 1..11: note = Table A: HLA-A*36:01M HLA-A*33:03H HLA-C*03:03H HLA-A*68:01H
  source 1..11: note = Severe acute respiratory syndrome coronavirus 2
IGDPAQLPAPR

SEQ ID NO: 6044 - protein, 11 aa, Severe acute respiratory syndrome-related coronavirus
  REGION 1..11: note = Table A: HLA-C*15:05H HLA-B*07:02H HLA-B*07:04M
  source 1..11: note = Severe acute respiratory syndrome coronavirus 2
APRTLLTKGTL

SEQ ID NO: 6045 - protein, 11 aa, Severe acute respiratory syndrome-related coronavirus
  REGION 1..11: note = Table A: HLA-B*57:01H HLA-A*68:02H HLA-B*57:03M
  source 1..11: note = Severe acute respiratory syndrome coronavirus 2
LTKGTLEPEYF

SEQ ID NO: 6046 - protein, 11 aa, Severe acute respiratory syndrome-related coronavirus
  REGION 1..11: note = Table A: HLA-A*02:11M HLA-A*68:02H HLA-A*02:04M HLA-A*02:06M HLA-A*02:07H HLA-A*02:01M HLA-C*08:03H HLA-B*38:02H
  source 1..11: note = Severe acute respiratory syndrome coronavirus 2
GTLEPEYFNSV

SEQ ID NO: 6047 - protein, 11 aa, Severe acute respiratory syndrome-related coronavirus
  REGION 1..11: note = Table A: HLA-B*57:03H HLA-B*13:01M
  source 1..11: note = Severe acute respiratory syndrome coronavirus 2
RLMKTIGPDMF

SEQ ID NO: 6048 - protein, 11 aa, Severe acute respiratory syndrome-related coronavirus
  REGION 1..11: note = Table A: HLA-A*02:11M HLA-A*02:02M
  source 1..11: note = Severe acute respiratory syndrome coronavirus 2
LMKTIGPDMFL

SEQ ID NO: 6049 - protein, 11 aa, Severe acute respiratory syndrome-related coronavirus
  REGION 1..11: note = Table A: HLA-A*02:08H
  source 1..11: note = Severe acute respiratory syndrome coronavirus 2
KTIGPDMFLGT

SEQ ID NO: 6050 - protein, 11 aa, Severe acute respiratory syndrome-related coronavirus
  REGION 1..11: note = Table A: HLA-B*56:01M HLA-B*55:02M HLA-B*54:01H
  source 1..11: note = Severe acute respiratory syndrome coronavirus 2
CPAEIVDTVSA

SEQ ID NO: 6051 - protein, 11 aa, Severe acute respiratory syndrome-related coronavirus
  REGION 1..11: note = Table A: HLA-B*49:01H
  source 1..11: note = Severe acute respiratory syndrome coronavirus 2
AEIVDTVSALV

SEQ ID NO: 6052 - protein, 11 aa, Severe acute respiratory syndrome-related coronavirus
  REGION 1..11: note = Table A: HLA-B*38:02H
  source 1..11: note = Severe acute respiratory syndrome coronavirus 2
EIVDTVSALVY

SEQ ID NO: 6053 - protein, 11 aa, Severe acute respiratory syndrome-related coronavirus
  REGION 1..11: note = Table A: HLA-A*68:02H HLA-A*02:02H
  source 1..11: note = Severe acute respiratory syndrome coronavirus 2
TVSALVYDNKL

SEQ ID NO: 6054 - protein, 11 aa, Severe acute respiratory syndrome-related coronavirus
  REGION 1..11: note = Table A: HLA-A*11:02H HLA-A*34:02H
  source 1..11: note = Severe acute respiratory syndrome coronavirus 2
LVYDNKLKAHK

SEQ ID NO: 6055 - protein, 11 aa, Severe acute respiratory syndrome-related coronavirus
  REGION 1..11: note = Table A: HLA-A*74:01M HLA-A*03:02H HLA-A*11:01H HLA-A*11:02H HLA-B*57:01H HLA-A*33:01H HLA-A*33:03M HLA-A*26:03H HLA-A*30:02H HLA-A*68:01H HLA-A*34:01H HLA-A*34:02H HLA-A*31:01M HLA-A*66:01M
  source 1..11: note = Severe acute respiratory syndrome coronavirus 2
ITHDVSSAINR

SEQ ID NO: 6056 - protein, 11 aa, Severe acute respiratory syndrome-related coronavirus
  REGION 1..11: note = Table A: HLA-B*38:01H HLA-B*38:02M
  source 1..11: note = Severe acute respiratory syndrome coronavirus 2
THDVSSAINRP

SEQ ID NO: 6057 - protein, 11 aa, Severe acute respiratory syndrome-related coronavirus
  REGION 1..11: note = Table A: HLA-A*68:02H
  source 1..11: note = Severe acute respiratory syndrome coronavirus 2
DVSSAINRPQI

SEQ ID NO: 6058 - protein, 11 aa, Severe acute respiratory syndrome-related coronavirus
  REGION 1..11: note = Table A: HLA-A*74:01H HLA-A*31:01H
  source 1..11: note = Severe acute respiratory syndrome coronavirus 2
AINRPQIGVVR

SEQ ID NO: 6059 - protein, 11 aa, Severe acute respiratory syndrome-related coronavirus
  REGION 1..11: note = Table A: HLA-B*42:01H HLA-B*07:02H HLA-B*07:04H
  source 1..11: note = Severe acute respiratory syndrome coronavirus 2
RPQIGVVREFL

SEQ ID NO: 6060 - protein, 11 aa, Severe acute respiratory syndrome-related coronavirus
  REGION 1..11: note = Table A: HLA-A*68:02H HLA-A*02:05H HLA-A*02:08H HLA-A*02:02H HLA-B*38:02H
  source 1..11: note = Severe acute respiratory syndrome coronavirus 2
FISPYNSQNAV

SEQ ID NO: 6061 - protein, 11 aa, Severe acute respiratory syndrome-related coronavirus
  REGION 1..11: note = Table A: HLA-B*55:02H HLA-C*15:05H
  source 1..11: note = Severe acute respiratory syndrome coronavirus 2
SPYNSQNAVAS

SEQ ID NO: 6062 - protein, 11 aa, Severe acute respiratory syndrome-related coronavirus
  REGION 1..11: note = Table A: HLA-A*26:01H
  source 1..11: note = Severe acute respiratory syndrome coronavirus 2
QTVDSSQGSEY

SEQ ID NO: 6063 - protein, 11 aa, Severe acute respiratory syndrome-related coronavirus
  REGION 1..11: note = Table A: HLA-B*45:01M HLA-B*40:06H HLA-B*49:01H HLA-B*50:01M
  source 1..11: note = Severe acute respiratory syndrome coronavirus 2
SEYDYVIFTQT

SEQ ID NO: 6064 - protein, 11 aa, Severe acute respiratory syndrome-related coronavirus
  REGION 1..11: note = Table A: HLA-A*68:02H HLA-A*02:05H HLA-A*02:08H
  source 1..11: note = Severe acute respiratory syndrome coronavirus 2
YVIFTQTTETA

SEQ ID NO: 6065 - protein, 11 aa, Severe acute respiratory syndrome-related coronavirus
  REGION 1..11: note = Table A: HLA-B*46:01H
  source 1..11: note = Severe acute respiratory syndrome coronavirus 2
VIFTQTTETAH

SEQ ID NO: 6066 - protein, 11 aa, Severe acute respiratory syndrome-related coronavirus
  REGION 1..11: note = Table A: HLA-A*74:01M HLA-A*33:01M HLA-A*33:03M HLA-A*68:01M HLA-A*34:01H HLA-A*34:02H HLA-A*31:01H HLA-A*66:01H
  source 1..11: note = Severe acute respiratory syndrome coronavirus 2
NVNRFNVAITR

SEQ ID NO: 6067 - protein, 11 aa, Severe acute respiratory syndrome-related coronavirus
  REGION 1..11: note = Table A: HLA-A*02:11M HLA-A*02:02H
  source 1..11: note = Severe acute respiratory syndrome coronavirus 2
IMSDRDLYDKL

SEQ ID NO: 6068 - protein, 11 aa, Severe acute respiratory syndrome-related coronavirus
  REGION 1..11: note = Table A: HLA-A*25:01H HLA-A*26:02H HLA-B*08:01H HLA-A*68:02H HLA-B*14:02H HLA-B*38:02H
  source 1..11: note = Severe acute respiratory syndrome coronavirus 2
DLYDKLQFTSL

SEQ ID NO: 6069 - protein, 11 aa, Severe acute respiratory syndrome-related coronavirus
  REGION 1..11: note = Table A: HLA-A*74:01H HLA-A*03:02H HLA-A*36:01H HLA-A*31:01H
  source 1..11: note = Severe acute respiratory syndrome coronavirus 2
KLQFTSLEIPR

SEQ ID NO: 6070 - protein, 11 aa, Severe acute respiratory syndrome-related coronavirus
  REGION 1..11: note = Table A: HLA-B*40:02H
  source 1..11: note = Severe acute respiratory syndrome coronavirus 2
LEIPRRNVATL

SEQ ID NO: 6071 - protein, 11 aa, Severe acute respiratory syndrome-related coronavirus
  REGION 1..11: note = Table A: HLA-B*56:01H HLA-B*55:02H HLA-B*55:01H
  source 1..11: note = Severe acute respiratory syndrome coronavirus 2
IPRRNVATLQA

SEQ ID NO: 6072 - protein, 11 aa, Severe acute respiratory syndrome-related coronavirus
  REGION 1..11: note = Table A: HLA-A*11:01H HLA-A*02:08H
  source 1..11: note = Severe acute respiratory syndrome coronavirus 2
ATLQAENVTGL

SEQ ID NO: 6073 - protein, 11 aa, Severe acute respiratory syndrome-related coronavirus
  REGION 1..11: note = Table A: HLA-B*38:02H
  source 1..11: note = Severe acute respiratory syndrome coronavirus 2
TLQAENVTGLF

SEQ ID NO: 6074 - protein, 11 aa, Severe acute respiratory syndrome-related coronavirus
  REGION 1..11: note = Table A: HLA-A*03:01M HLA-A*03:02M HLA-A*11:01M HLA-A*11:02M HLA-A*36:01H HLA-B*27:02H HLA-A*34:02H HLA-C*07:27H
  source 1..11: note = Severe acute respiratory syndrome coronavirus 2
LQAENVTGLFK

SEQ ID NO: 6075 - protein, 11 aa, Severe acute respiratory syndrome-related coronavirus
  REGION 1..11: note = Table A: HLA-A*02:05H HLA-A*02:08H
  source 1..11: note = Severe acute respiratory syndrome coronavirus 2
KVITGLHPTQA

SEQ ID NO: 6076 - protein, 11 aa, Severe acute respiratory syndrome-related coronavirus
  REGION 1..11: note = Table A: HLA-A*02:11H HLA-A*02:02M HLA-A*02:03H HLA-B*38:02H
  source 1..11: note = Severe acute respiratory syndrome coronavirus 2
GLHPTQAPTHL

SEQ ID NO: 6077 - protein, 11 aa, Severe acute respiratory syndrome-related coronavirus
  REGION 1..11: note = Table A: HLA-B*56:01H HLA-B*55:02M HLA-B*35:03H HLA-C*15:05H HLA-B*54:01H
  source 1..11: note = Severe acute respiratory syndrome coronavirus 2
HPTQAPTHLSV

SEQ ID NO: 6078 - protein, 11 aa, Severe acute respiratory syndrome-related coronavirus
  REGION 1..11: note = Table A: HLA-B*56:01H HLA-B*53:01H HLA-B*35:01H HLA-B*35:07H HLA-B*07:05H
  source 1..11: note = Severe acute respiratory syndrome coronavirus 2
APTHLSVDTKF

SEQ ID NO: 6079 - protein, 11 aa, Severe acute respiratory syndrome-related coronavirus
  REGION 1..11: note = Table A: HLA-A*26:01H
  source 1..11: note = Severe acute respiratory syndrome coronavirus 2
DIPGIPKDMTY

SEQ ID NO: 6080 - protein, 11 aa, Severe acute respiratory syndrome-related coronavirus
  REGION 1..11: note = Table A: HLA-A*02:11H HLA-A*02:02M
  source 1..11: note = Severe acute respiratory syndrome coronavirus 2
SMMGFKMNYQV

SEQ ID NO: 6081 - protein, 11 aa, Severe acute respiratory syndrome-related coronavirus
  REGION 1..11: note = Table A: HLA-B*13:02H
  source 1..11: note = Severe acute respiratory syndrome coronavirus 2
YQVNGYPNMFI

SEQ ID NO: 6082 - protein, 11 aa, Severe acute respiratory syndrome-related coronavirus
  REGION 1..11: note = Table A: HLA-B*56:01M HLA-B*55:02M HLA-B*55:01H HLA-B*54:01M
  source 1..11: note = Severe acute respiratory syndrome coronavirus 2
YPNMFITREEA

SEQ ID NO: 6083 - protein, 11 aa, Severe acute respiratory syndrome-related coronavirus
  REGION 1..11: note = Table A: HLA-A*02:11H HLA-A*02:06H HLA-A*02:02H
  source 1..11: note = Severe acute respiratory syndrome coronavirus 2
FITREEAIRHV

SEQ ID NO: 6084 - protein, 11 aa, Severe acute respiratory syndrome-related coronavirus
  REGION 1..11: note = Table A: HLA-A*74:01M HLA-A*33:03H HLA-A*31:01H
  source 1..11: note = Severe acute respiratory syndrome coronavirus 2
ITREEAIRHVR

SEQ ID NO: 6085 - protein, 11 aa, Severe acute respiratory syndrome-related coronavirus
  REGION 1..11: note = Table A: HLA-B*38:02H HLA-B*39:01H
  source 1..11: note = Severe acute respiratory syndrome coronavirus 2
TREAVGTNLPL

SEQ ID NO: 6086 - protein, 11 aa, Severe acute respiratory syndrome-related coronavirus
  REGION 1..11: note = Table A: HLA-A*68:01H HLA-A*68:02H HLA-A*34:01H HLA-A*34:02H
  source 1..11: note = Severe acute respiratory syndrome coronavirus 2
EAVGTNLPLQL

SEQ ID NO: 6087 - protein, 11 aa, Severe acute respiratory syndrome-related coronavirus
  REGION 1..11: note = Table A: HLA-B*54:01H
  source 1..11: note = Severe acute respiratory syndrome coronavirus 2
LPLQLGFSTGV

SEQ ID NO: 6088 - protein, 11 aa, Severe acute respiratory syndrome-related coronavirus
  REGION 1..11: note = Table A: HLA-A*30:02H
  source 1..11: note = Severe acute respiratory syndrome coronavirus 2
GVNLVAVPTGY

SEQ ID NO: 6089 - protein, 11 aa, Severe acute respiratory syndrome-related coronavirus
  REGION 1..11: note = Table A: HLA-C*08:01H
  source 1..11: note = Severe acute respiratory syndrome coronavirus 2
VAVPTGYVDTP

SEQ ID NO: 6090 - protein, 11 aa, Severe acute respiratory syndrome-related coronavirus
  REGION 1..11: note = Table A: HLA-B*27:02H HLA-A*23:01H HLA-B*39:01H
  source 1..11: note = Severe acute respiratory syndrome coronavirus 2
GYVDTPNNTDF

SEQ ID NO: 6091 - protein, 11 aa, Severe acute respiratory syndrome-related coronavirus
  REGION 1..11: note = Table A: HLA-A*26:01H HLA-A*68:01H HLA-A*68:02H
  source 1..11: note = Severe acute respiratory syndrome coronavirus 2
DTPNNTDFSRV

SEQ ID NO: 6092 - protein, 11 aa, Severe acute respiratory syndrome-related coronavirus
  REGION 1..11: note = Table A: HLA-B*58:01H HLA-B*57:01H HLA-B*15:01H HLA-B*57:03M
  source 1..11: note = Severe acute respiratory syndrome coronavirus 2
VSAKPPPGDQF

SEQ ID NO: 6093 - protein, 11 aa, Severe acute respiratory syndrome-related coronavirus
  REGION 1..11: note = Table A: HLA-B*07:04H
  source 1..11: note = Severe acute respiratory syndrome coronavirus 2
KPPPGDQFKHL

SEQ ID NO: 6094 - protein, 11 aa, Severe acute respiratory syndrome-related coronavirus
  REGION 1..11: note = Table A: HLA-B*07:04H
  source 1..11: note = Severe acute respiratory syndrome coronavirus 2
LPWNVVRIKIV

SEQ ID NO: 6095 - protein, 11 aa, Severe acute respiratory syndrome-related coronavirus
  REGION 1..11: note = Table A: HLA-B*38:02H HLA-A*32:01H HLA-B*15:01H HLA-B*15:02H
  source 1..11: note = Severe acute respiratory syndrome coronavirus 2
TLKNLSDRVVF

SEQ ID NO: 6096 - protein, 11 aa, Severe acute respiratory syndrome-related coronavirus
  REGION 1..11: note = Table A: HLA-A*24:07H
  source 1..11: note = Severe acute respiratory syndrome coronavirus 2
NLSDRVVFVLW

SEQ ID NO: 6097 - protein, 11 aa, Severe acute respiratory syndrome-related coronavirus
  REGION 1..11: note = Table A: HLA-B*57:03H
  source 1..11: note = Severe acute respiratory syndrome coronavirus 2
RVVFVLWAHGF

SEQ ID NO: 6098 - protein, 11 aa, Severe acute respiratory syndrome-related coronavirus
  REGION 1..11: note = Table A: HLA-B*38:02H
  source 1..11: note = Severe acute respiratory syndrome coronavirus 2
AHGFELTSMKY

SEQ ID NO: 6099 - protein, 11 aa, Severe acute respiratory syndrome-related coronavirus
  REGION 1..11: note = Table A: HLA-A*36:01H HLA-A*30:02H
  source 1..11: note = Severe acute respiratory syndrome coronavirus 2
ATCFSTASDTY

SEQ ID NO: 6100 - protein, 11 aa, Severe acute respiratory syndrome-related coronavirus
  REGION 1..11: note = Table A: HLA-B*38:02H
  source 1..11: note = Severe acute respiratory syndrome coronavirus 2
WHHSIGFDYVY

SEQ ID NO: 6101 - protein, 11 aa, Severe acute respiratory syndrome-related coronavirus
  REGION 1..11: note = Table A: HLA-A*24:07H
  source 1..11: note = Severe acute respiratory syndrome coronavirus 2
PFMIDVQQWGF

SEQ ID NO: 6102 - protein, 11 aa, Severe acute respiratory syndrome-related coronavirus
  REGION 1..11: note = Table A: HLA-A*36:01H HLA-A*30:02M HLA-B*35:01H
  source 1..11: note = Severe acute respiratory syndrome coronavirus 2
TGNLQSNHDLY

SEQ ID NO: 6103 - protein, 11 aa, Severe acute respiratory syndrome-related coronavirus
  REGION 1..11: note = Table A: HLA-B*35:03H HLA-B*35:02H
  source 1..11: note = Severe acute respiratory syndrome coronavirus 2
NAHVASCDAIM

SEQ ID NO: 6104 - protein, 11 aa, Severe acute respiratory syndrome-related coronavirus
  REGION 1..11: note = Table A: HLA-A*74:01H HLA-A*33:03H HLA-A*26:03H HLA-A*68:01M HLA-A*34:01M HLA-A*34:02H HLA-A*66:01M
  source 1..11: note = Severe acute respiratory syndrome coronavirus 2
HVASCDAIMTR

SEQ ID NO: 6105 - protein, 11 aa, Severe acute respiratory syndrome-related coronavirus
  REGION 1..11: note = Table A: HLA-A*02:07H HLA-C*08:01H
  source 1..11: note = Severe acute respiratory syndrome coronavirus 2
TIEYPIIGDEL

SEQ ID NO: 6106 - protein, 11 aa, Severe acute respiratory syndrome-related coronavirus
  REGION 1..11: note = Table A: HLA-A*24:07H
  source 1..11: note = Severe acute respiratory syndrome coronavirus 2
EYPIIGDELKI

SEQ ID NO: 6107 - protein, 11 aa, Severe acute respiratory syndrome-related coronavirus
  REGION 1..11: note = Table A: HLA-A*34:02H
  source 1..11: note = Severe acute respiratory syndrome coronavirus 2
MVVKAALLADK

SEQ ID NO: 6108 - protein, 11 aa, Severe acute respiratory syndrome-related coronavirus
  REGION 1..11: note = Table A: HLA-A*34:01H HLA-A*34:02H HLA-A*66:01H
  source 1..11: note = Severe acute respiratory syndrome coronavirus 2
FPVLHDIGNPK

SEQ ID NO: 6109 - protein, 11 aa, Severe acute respiratory syndrome-related coronavirus
  REGION 1..11: note = Table A: HLA-A*02:11H HLA-A*02:02H HLA-A*02:03H
  source 1..11: note = Severe acute respiratory syndrome coronavirus 2
VLHDIGNPKAI

SEQ ID NO: 6110 - protein, 11 aa, Severe acute respiratory syndrome-related coronavirus
  REGION 1..11: note = Table A: HLA-A*30:02H
  source 1..11: note = Severe acute respiratory syndrome coronavirus 2
AYKIEELFYSY

SEQ ID NO: 6111 - protein, 11 aa, Severe acute respiratory syndrome-related coronavirus
  REGION 1..11: note = Table A: HLA-A*29:02H HLA-A*24:02H HLA-A*24:07M HLA-C*08:01H HLA-A*23:01H
  source 1..11: note = Severe acute respiratory syndrome coronavirus 2
FYSYATHSDKF

SEQ ID NO: 6112 - protein, 11 aa, Severe acute respiratory syndrome-related coronavirus
  REGION 1..11: note = Table A: HLA-A*33:01H HLA-A*33:03H
  source 1..11: note = Severe acute respiratory syndrome coronavirus 2
DRYPANSIVCR

SEQ ID NO: 6113 - protein, 11 aa, Severe acute respiratory syndrome-related coronavirus
  REGION 1..11: note = Table A: HLA-A*24:02H HLA-A*24:07M HLA-A*23:01H
  source 1..11: note = Severe acute respiratory syndrome coronavirus 2
RYPANSIVCRF

SEQ ID NO: 6114 - protein, 11 aa, Severe acute respiratory syndrome-related coronavirus
  REGION 1..11: note = Table A: HLA-A*03:02H
  source 1..11: note = Severe acute respiratory syndrome coronavirus 2
GCDGGSLYVNK

SEQ ID NO: 6115 - protein, 11 aa, Severe acute respiratory syndrome-related coronavirus
  REGION 1..11: note = Table A: HLA-B*38:02M HLA-B*15:10H
  source 1..11: note = Severe acute respiratory syndrome coronavirus 2
FHTPAFDKSAF

SEQ ID NO: 6116 - protein, 11 aa, Severe acute respiratory syndrome-related coronavirus
  REGION 1..11: note = Table A: HLA-A*02:11H HLA-A*68:02M HLA-A*02:05H HLA-A*02:08H
  source 1..11: note = Severe acute respiratory syndrome coronavirus 2
HTPAFDKSAFV

SEQ ID NO: 6117 - protein, 11 aa, Severe acute respiratory syndrome-related coronavirus
  REGION 1..11: note = Table A: HLA-C*08:01H
  source 1..11: note = Severe acute respiratory syndrome coronavirus 2
PAFDKSAFVNL

SEQ ID NO: 6118 - protein, 11 aa, Severe acute respiratory syndrome-related coronavirus
  REGION 1..11: note = Table A: HLA-A*24:07H
  source 1..11: note = Severe acute respiratory syndrome coronavirus 2
AFVNLKQLPFF

SEQ ID NO: 6119 - protein, 11 aa, Severe acute respiratory syndrome-related coronavirus
  REGION 1..11: note = Table A: HLA-A*29:02H
  source 1..11: note = Severe acute respiratory syndrome coronavirus 2
VNLKQLPFFYY

SEQ ID NO: 6120 - protein, 11 aa, Severe acute respiratory syndrome-related coronavirus
  REGION 1..11: note = Table A: HLA-B*56:01H HLA-B*55:02H HLA-C*15:05H HLA-B*55:01H HLA-B*07:04H
  source 1..11: note = Severe acute respiratory syndrome coronavirus 2
SPCESHGKQVV

SEQ ID NO: 6121 - protein, 11 aa, Severe acute respiratory syndrome-related coronavirus
  REGION 1..11: note = Table A: HLA-A*03:02M HLA-A*11:01M HLA-A*11:02M HLA-A*36:01H HLA-A*30:02H HLA-A*34:02H
  source 1..11: note = Severe acute respiratory syndrome coronavirus 2
VVSDIDYVPLK

SEQ ID NO: 6122 - protein, 11 aa, Severe acute respiratory syndrome-related coronavirus
  REGION 1..11: note = Table A: HLA-B*38:02M
  source 1..11: note = Severe acute respiratory syndrome coronavirus 2
RHHANEYRLYL

SEQ ID NO: 6123 - protein, 11 aa, Severe acute respiratory syndrome-related coronavirus
  REGION 1..11: note = Table A: HLA-A*02:11H HLA-B*13:01H HLA-B*13:02H
  source 1..11: note = Severe acute respiratory syndrome coronavirus 2
RLYLDAYNMMI

SEQ ID NO: 6124 - protein, 11 aa, Severe acute respiratory syndrome-related coronavirus
  REGION 1..11: note = Table A: HLA-A*30:02H
  source 1..11: note = Severe acute respiratory syndrome coronavirus 2
SLWVYKQFDTY

SEQ ID NO: 6125 - protein, 11 aa, Severe acute respiratory syndrome-related coronavirus
  REGION 1..11: note = Table A: HLA-A*24:02H HLA-A*24:07M HLA-A*23:01M
  source 1..11: note = Severe acute respiratory syndrome coronavirus 2
VYKQFDTYNLW

SEQ ID NO: 6126 - protein, 11 aa, Severe acute respiratory syndrome-related coronavirus
  REGION 1..11: note = Table A: HLA-A*33:01M HLA-A*66:01M
  source 1..11: note = Severe acute respiratory syndrome coronavirus 2
DTYNLWNTFTR

SEQ ID NO: 6127 - protein, 11 aa, Severe acute respiratory syndrome-related coronavirus
  REGION 1..11: note = Table A: HLA-B*27:05H HLA-B*27:02H HLA-B*38:01H HLA-B*38:02M HLA-B*39:01H
  source 1..11: note = Severe acute respiratory syndrome coronavirus 2
TRLQSLENVAF

SEQ ID NO: 6128 - protein, 11 aa, Severe acute respiratory syndrome-related coronavirus
  REGION 1..11: note = Table A: HLA-B*38:02H
  source 1..11: note = Severe acute respiratory syndrome coronavirus 2
QSLENVAFNVV

SEQ ID NO: 6129 - protein, 11 aa, Severe acute respiratory syndrome-related coronavirus
  REGION 1..11: note = Table A: HLA-C*12:02H HLA-B*57:03H HLA-C*02:02H
  source 1..11: note = Severe acute respiratory syndrome coronavirus 2
VAFNVVNKGHF

SEQ ID NO: 6130 - protein, 11 aa, Severe acute respiratory syndrome-related coronavirus
  REGION 1..11: note = Table A: HLA-B*38:02H HLA-B*39:01H HLA-B*15:10H
  source 1..11: note = Severe acute respiratory syndrome coronavirus 2
GHFDGQQGEVP

SEQ ID NO: 6131 - protein, 11 aa, Severe acute respiratory syndrome-related coronavirus
  REGION 1..11: note = Table A: HLA-A*68:02H
  source 1..11: note = Severe acute respiratory syndrome coronavirus 2
EVPVSIINNTV

SEQ ID NO: 6132 - protein, 11 aa, Severe acute respiratory syndrome-related coronavirus
  REGION 1..11: note = Table A: HLA-B*55:02H HLA-B*35:01H HLA-B*35:07H HLA-B*54:01H HLA-B*15:02H HLA-B*07:05H HLA-B*15:11M
  source 1..11: note = Severe acute respiratory syndrome coronavirus 2
VPVSIINNTVY

SEQ ID NO: 6133 - protein, 11 aa, Severe acute respiratory syndrome-related coronavirus
  REGION 1..11: note = Table A: HLA-A*68:02H
  source 1..11: note = Severe acute respiratory syndrome coronavirus 2
TVYTKVDGVDV

SEQ ID NO: 6134 - protein, 11 aa, Severe acute respiratory syndrome-related coronavirus
  REGION 1..11: note = Table A: HLA-B*57:03H
  source 1..11: note = Severe acute respiratory syndrome coronavirus 2
YTKVDGVDVEL

SEQ ID NO: 6135 - protein, 11 aa, Severe acute respiratory syndrome-related coronavirus
  REGION 1..11: note = Table A: HLA-B*38:01H HLA-B*38:02H
  source 1..11: note = Severe acute respiratory syndrome coronavirus 2
TKVDGVDVELF

SEQ ID NO: 6136 - protein, 11 aa, Severe acute respiratory syndrome-related coronavirus
  REGION 1..11: note = Table A: HLA-B*27:02H
  source 1..11: note = Severe acute respiratory syndrome coronavirus 2
DGVDVELFENK

SEQ ID NO: 6137 - protein, 11 aa, Severe acute respiratory syndrome-related coronavirus
  REGION 1..11: note = Table A: HLA-A*02:04H HLA-B*57:03H
  source 1..11: note = Severe acute respiratory syndrome coronavirus 2
TTLPVNVAFEL

SEQ ID NO: 6138 - protein, 11 aa, Severe acute respiratory syndrome-related coronavirus
  REGION 1..11: note = Table A: HLA-A*24:07H
  source 1..11: note = Severe acute respiratory syndrome coronavirus 2
TLPVNVAFELW

SEQ ID NO: 6139 - protein, 11 aa, Severe acute respiratory syndrome-related coronavirus
  REGION 1..11: note = Table A: HLA-A*36:01H HLA-A*68:02H
  source 1..11: note = Severe acute respiratory syndrome coronavirus 2
IAANTVIWDYK

SEQ ID NO: 6140 - protein, 11 aa, Severe acute respiratory syndrome-related coronavirus
  REGION 1..11: note = Table A: HLA-A*02:11H
  source 1..11: note = Severe acute respiratory syndrome coronavirus 2
VIWDYKRDAPA

SEQ ID NO: 6141 - protein, 11 aa, Severe acute respiratory syndrome-related coronavirus
  REGION 1..11: note = Table A: HLA-A*68:02H HLA-B*51:01H
  source 1..11: note = Severe acute respiratory syndrome coronavirus 2
DAPAHISTIGV

SEQ ID NO: 6142 - protein, 11 aa, Severe acute respiratory syndrome-related coronavirus
  REGION 1..11: note = Table A: HLA-B*56:01M HLA-B*55:02M HLA-C*15:05H HLA-B*55:01H HLA-B*54:01H HLA-B*07:02H
  source 1..11: note = Severe acute respiratory syndrome coronavirus 2
APAHISTIGVC

SEQ ID NO: 6143 - protein, 11 aa, Severe acute respiratory syndrome-related coronavirus
  REGION 1..11: note = Table A: HLA-B*38:02H
  source 1..11: note = Severe acute respiratory syndrome coronavirus 2
AHISTIGVCSM

SEQ ID NO: 6144 - protein, 11 aa, Severe acute respiratory syndrome-related coronavirus
  REGION 1..11: note = Table A: HLA-A*03:02M HLA-A*11:01H HLA-A*11:02H
  source 1..11: note = Severe acute respiratory syndrome coronavirus 2
GVCSMTDIAKK

SEQ ID NO: 6145 - protein, 11 aa, Severe acute respiratory syndrome-related coronavirus
  REGION 1..11: note = Table A: HLA-B*27:05H HLA-B*27:02H
  source 1..11: note = Severe acute respiratory syndrome coronavirus 2
GRVDGQVDLFR

SEQ ID NO: 6146 - protein, 11 aa, Severe acute respiratory syndrome-related coronavirus
  REGION 1..11: note = Table A: HLA-A*11:303H HLA-A*02:11M HLA-A*02:04M HLA-A*02:05H HLA-A*02:06H HLA-A*02:08M HLA-A*02:01M HLA-A*02:02H HLA-A*02:03M HLA-B*38:02H
  source 1..11: note = Severe acute respiratory syndrome coronavirus 2
VLITEGSVKGL

SEQ ID NO: 6147 - protein, 11 aa, Severe acute respiratory syndrome-related coronavirus
  REGION 1..11: note = Table A: HLA-A*02:03H
  source 1..11: note = Severe acute respiratory syndrome coronavirus 2
GLQPSVGPKQA

SEQ ID NO: 6148 - protein, 11 aa, Severe acute respiratory syndrome-related coronavirus
  REGION 1..11: note = Table A: HLA-B*42:01H HLA-C*15:05M HLA-B*07:02M HLA-B*07:04M HLA-B*07:05H
  source 1..11: note = Severe acute respiratory syndrome coronavirus 2
QPSVGPKQASL

SEQ ID NO: 6149 - protein, 11 aa, Severe acute respiratory syndrome-related coronavirus
  REGION 1..11: note = Table A: HLA-B*13:02H
  source 1..11: note = Severe acute respiratory syndrome coronavirus 2
KQASLNGVTLI

SEQ ID NO: 6150 - protein, 11 aa, Severe acute respiratory syndrome-related coronavirus
  REGION 1..11: note = Table A: HLA-A*02:02H
  source 1..11: note = Severe acute respiratory syndrome coronavirus 2
SLNGVTLIGEA

SEQ ID NO: 6151 - protein, 11 aa, Severe acute respiratory syndrome-related coronavirus
  REGION 1..11: note = Table A: HLA-B*38:02M HLA-B*15:01M HLA-B*15:02H HLA-B*13:01H
  source 1..11: note = Severe acute respiratory syndrome coronavirus 2
TLIGEAVKTQF

SEQ ID NO: 6152 - protein, 11 aa, Severe acute respiratory syndrome-related coronavirus
  REGION 1..11: note = Table A: HLA-A*36:01H
  source 1..11: note = Severe acute respiratory syndrome coronavirus 2
IGEAVKTQFNY

SEQ ID NO: 6153 - protein, 11 aa, Severe acute respiratory syndrome-related coronavirus
  REGION 1..11: note = Table A: HLA-B*44:02H HLA-B*44:03H
  source 1..11: note = Severe acute respiratory syndrome coronavirus 2
GEAVKTQFNYY

SEQ ID NO: 6154 - protein, 11 aa, Severe acute respiratory syndrome-related coronavirus
  REGION 1..11: note = Table A: HLA-A*34:02H
  source 1..11: note = Severe acute respiratory syndrome coronavirus 2
EAVKTQFNYYK

SEQ ID NO: 6155 - protein, 11 aa, Severe acute respiratory syndrome-related coronavirus
  REGION 1..11: note = Table A: HLA-B*35:01H
  source 1..11: note = Severe acute respiratory syndrome coronavirus 2
DGVVQQLPETY

SEQ ID NO: 6156 - protein, 11 aa, Severe acute respiratory syndrome-related coronavirus
  REGION 1..11: note = Table A: HLA-A*74:01H
  source 1..11: note = Severe acute respiratory syndrome coronavirus 2
QLPETYFTQSR

SEQ ID NO: 6157 - protein, 11 aa, Severe acute respiratory syndrome-related coronavirus
  REGION 1..11: note = Table A: HLA-A*24:07M
  source 1..11: note = Severe acute respiratory syndrome coronavirus 2
YFTQSRNLQEF

SEQ ID NO: 6158 - protein, 11 aa, Severe acute respiratory syndrome-related coronavirus
  REGION 1..11: note = Table A: HLA-A*33:03H
  source 1..11: note = Severe acute respiratory syndrome coronavirus 2
QSRNLQEFKPR

SEQ ID NO: 6159 - protein, 11 aa, Severe acute respiratory syndrome-related coronavirus
  REGION 1..11: note = Table A: HLA-B*49:01H
  source 1..11: note = Severe acute respiratory syndrome coronavirus 2
QEFKPRSQMEI

SEQ ID NO: 6160 - protein, 11 aa, Severe acute respiratory syndrome-related coronavirus
  REGION 1..11: note = Table A: HLA-C*15:05H HLA-B*07:04H
  source 1..11: note = Severe acute respiratory syndrome coronavirus 2
KPRSQMEIDFL

SEQ ID NO: 6161 - protein, 11 aa, Severe acute respiratory syndrome-related coronavirus
  REGION 1..11: note = Table A: HLA-A*02:11M HLA-A*02:07H HLA-A*02:02H
  source 1..11: note = Severe acute respiratory syndrome coronavirus 2
AMDEFIERYKL

SEQ ID NO: 6162 - protein, 11 aa, Severe acute respiratory syndrome-related coronavirus
  REGION 1..11: note = Table A: HLA-A*02:11H HLA-A*02:05H HLA-A*02:08H HLA-C*08:01H
  source 1..11: note = Severe acute respiratory syndrome coronavirus 2
IVYGDFSHSQL

SEQ ID NO: 6163 - protein, 11 aa, Severe acute respiratory syndrome-related coronavirus
  REGION 1..11: note = Table A: HLA-A*24:07H
  source 1..11: note = Severe acute respiratory syndrome coronavirus 2
VYGDFSHSQLG

SEQ ID NO: 6164 - protein, 11 aa, Severe acute respiratory syndrome-related coronavirus
  REGION 1..11: note = Table A: HLA-B*38:02H HLA-B*57:03H
  source 1..11: note = Severe acute respiratory syndrome coronavirus 2
FSHSQLGGLHL

SEQ ID NO: 6165 - protein, 11 aa, Severe acute respiratory syndrome-related coronavirus
  REGION 1..11: note = Table A: HLA-B*38:01H HLA-B*38:02M
  source 1..11: note = Severe acute respiratory syndrome coronavirus 2
SHSQLGGLHLL

SEQ ID NO: 6166 - protein, 11 aa, Severe acute respiratory syndrome-related coronavirus
  REGION 1..11: note = Table A: HLA-A*02:02H
  source 1..11: note = Severe acute respiratory syndrome coronavirus 2
QLGGLHLLIGL

SEQ ID NO: 6167 - protein, 11 aa, Severe acute respiratory syndrome-related coronavirus
  REGION 1..11: note = Table A: HLA-B*35:03H HLA-B*35:07H
  source 1..11: note = Severe acute respiratory syndrome coronavirus 2
SPFELEDFIPM

SEQ ID NO: 6168 - protein, 11 aa, Severe acute respiratory syndrome-related coronavirus
  REGION 1..11: note = Table A: HLA-B*42:01H HLA-B*53:01M HLA-B*35:03H HLA-C*15:05H HLA-B*35:01H HLA-A*24:07H HLA-B*35:07M HLA-B*07:04H
  source 1..11: note = Severe acute respiratory syndrome coronavirus 2
IPMDSTVKNYF

SEQ ID NO: 6169 - protein, 11 aa, Severe acute respiratory syndrome-related coronavirus
  REGION 1..11: note = Table A: HLA-A*11:303H HLA-A*03:02H HLA-A*36:01H HLA-A*26:03H HLA-C*03:03H HLA-B*27:02H HLA-A*68:01H HLA-A*34:01H HLA-A*34:02M HLA-A*66:01H
  source 1..11: note = Severe acute respiratory syndrome coronavirus 2
FITDAQTGSSK

SEQ ID NO: 6170 - protein, 11 aa, Severe acute respiratory syndrome-related coronavirus
  REGION 1..11: note = Table A: HLA-A*68:02H
  source 1..11: note = Severe acute respiratory syndrome coronavirus 2
SVIDLLLDDFV

SEQ ID NO: 6171 - protein, 11 aa, Severe acute respiratory syndrome-related coronavirus
  REGION 1..11: note = Table A: HLA-A*26:03H HLA-A*68:02M HLA-B*38:02H
  source 1..11: note = Severe acute respiratory syndrome coronavirus 2
EIIKSQDLSVV

SEQ ID NO: 6172 - protein, 11 aa, Severe acute respiratory syndrome-related coronavirus
  REGION 1..11: note = Table A: HLA-B*58:02H HLA-A*02:11H
  source 1..11: note = Severe acute respiratory syndrome coronavirus 2
KSQDLSVVSKV

SEQ ID NO: 6173 - protein, 11 aa, Severe acute respiratory syndrome-related coronavirus
  REGION 1..11: note = Table A: HLA-A*68:02H
  source 1..11: note = Severe acute respiratory syndrome coronavirus 2
DLSVVSKVVKV

SEQ ID NO: 6174 - protein, 11 aa, Severe acute respiratory syndrome-related coronavirus
  REGION 1..11: note = Table A: HLA-B*57:03H
  source 1..11: note = Severe acute respiratory syndrome coronavirus 2
KVTIDYTEISF

SEQ ID NO: 6175 - protein, 11 aa, Severe acute respiratory syndrome-related coronavirus
  REGION 1..11: note = Table A: HLA-A*24:02H HLA-A*24:07M HLA-A*23:01H
  source 1..11: note = Severe acute respiratory syndrome coronavirus 2
FYPKLQSSQAW

SEQ ID NO: 6176 - protein, 11 aa, Severe acute respiratory syndrome-related coronavirus
  REGION 1..11: note = Table A: HLA-A*74:01H
  source 1..11: note = Severe acute respiratory syndrome coronavirus 2
VAMPNLYKMQR

SEQ ID NO: 6177 - protein, 11 aa, Severe acute respiratory syndrome-related coronavirus
  REGION 1..11: note = Table A: HLA-B*07:04H
  source 1..11: note = Severe acute respiratory syndrome coronavirus 2
MPNLYKMQRML

SEQ ID NO: 6178 - protein, 11 aa, Severe acute respiratory syndrome-related coronavirus
  REGION 1..11: note = Table A: HLA-B*39:01H
  source 1..11: note = Severe acute respiratory syndrome coronavirus 2
DLQNYGDSATL

SEQ ID NO: 6179 - protein, 11 aa, Severe acute respiratory syndrome-related coronavirus
  REGION 1..11: note = Table A: HLA-B*27:02H HLA-A*34:02H
  source 1..11: note = Severe acute respiratory syndrome coronavirus 2
QNYGDSATLPK

SEQ ID NO: 6180 - protein, 11 aa, Severe acute respiratory syndrome-related coronavirus
  REGION 1..11: note = Table A: HLA-A*11:02H HLA-A*02:11M HLA-A*02:06H HLA-A*31:01H
  source 1..11: note = Severe acute respiratory syndrome coronavirus 2
ATLPKGIMMNV

SEQ ID NO: 6181 - protein, 11 aa, Severe acute respiratory syndrome-related coronavirus
  REGION 1..11: note = Table A: HLA-A*02:11M HLA-A*02:02H
  source 1..11: note = Severe acute respiratory syndrome coronavirus 2
IMMNVAKYTQL

SEQ ID NO: 6182 - protein, 11 aa, Severe acute respiratory syndrome-related coronavirus
  REGION 1..11: note = Table A: HLA-A*74:01H HLA-A*03:01H HLA-A*03:02H HLA-A*11:01H HLA-A*11:02H HLA-A*36:01H HLA-A*30:02H
  source 1..11: note = Severe acute respiratory syndrome coronavirus 2
RVIHFGAGSDK

SEQ ID NO: 6183 - protein, 11 aa, Severe acute respiratory syndrome-related coronavirus
  REGION 1..11: note = Table A: HLA-B*38:02H
  source 1..11: note = Severe acute respiratory syndrome coronavirus 2
IHFGAGSDKGV

SEQ ID NO: 6184 - protein, 11 aa, Severe acute respiratory syndrome-related coronavirus
  REGION 1..11: note = Table A: HLA-A*74:01H HLA-A*31:01H
  source 1..11: note = Severe acute respiratory syndrome coronavirus 2
KGVAPGTAVLR

SEQ ID NO: 6185 - protein, 11 aa, Severe acute respiratory syndrome-related coronavirus
  REGION 1..11: note = Table A: HLA-A*02:11H HLA-B*13:02H
  source 1..11: note = Severe acute respiratory syndrome coronavirus 2
RQWLPTGTLLV

SEQ ID NO: 6186 - protein, 11 aa, Severe acute respiratory syndrome-related coronavirus
  REGION 1..11: note = Table A: HLA-A*02:02H
  source 1..11: note = Severe acute respiratory syndrome coronavirus 2
LLVDSDLNDFV

SEQ ID NO: 6187 - protein, 11 aa, Severe acute respiratory syndrome-related coronavirus
  REGION 1..11: note = Table A: HLA-B*35:02H
  source 1..11: note = Severe acute respiratory syndrome coronavirus 2
DADSTLIGDCA

SEQ ID NO: 6188 - protein, 11 aa, Severe acute respiratory syndrome-related coronavirus
  REGION 1..11: note = Table A: HLA-B*27:02H
  source 1..11: note = Severe acute respiratory syndrome coronavirus 2
DLIISDMYDPK

SEQ ID NO: 6189 - protein, 11 aa, Severe acute respiratory syndrome-related coronavirus
  REGION 1..11: note = Table A: HLA-A*03:02H
  source 1..11: note = Severe acute respiratory syndrome coronavirus 2
IISDMYDPKTK

SEQ ID NO: 6190 - protein, 11 aa, Severe acute respiratory syndrome-related coronavirus
  REGION 1..11: note = Table A: HLA-A*03:02H HLA-A*36:01H HLA-A*33:01H HLA-A*33:03M HLA-A*34:02H
  source 1..11: note = Severe acute respiratory syndrome coronavirus 2
MYDPKTKNVTK

SEQ ID NO: 6191 - protein, 11 aa, Severe acute respiratory syndrome-related coronavirus
  REGION 1..11: note = Table A: HLA-B*57:03H
  source 1..11: note = Severe acute respiratory syndrome coronavirus 2
VTKENDSKEGF

SEQ ID NO: 6192 - protein, 11 aa, Severe acute respiratory syndrome-related coronavirus
  REGION 1..11: note = Table A: HLA-A*03:02H
  source 1..11: note = Severe acute respiratory syndrome coronavirus 2
KLALGGSVAIK

SEQ ID NO: 6193 - protein, 11 aa, Severe acute respiratory syndrome-related coronavirus
  REGION 1..11: note = Table A: HLA-B*58:01H HLA-B*57:01H HLA-A*32:01M HLA-B*57:03M
  source 1..11: note = Severe acute respiratory syndrome coronavirus 2
SVAIKITEHSW

SEQ ID NO: 6194 - protein, 11 aa, Severe acute respiratory syndrome-related coronavirus
  REGION 1..11: note = Table A: HLA-A*36:01M HLA-A*01:01H
  source 1..11: note = Severe acute respiratory syndrome coronavirus 2
ITEHSWNADLY

SEQ ID NO: 6195 - protein, 11 aa, Severe acute respiratory syndrome-related coronavirus
  REGION 1..11: note = Table A: HLA-B*38:01H HLA-B*38:02M
  source 1..11: note = Severe acute respiratory syndrome coronavirus 2
EHSWNADLYKL

SEQ ID NO: 6196 - protein, 11 aa, Severe acute respiratory syndrome-related coronavirus
  REGION 1..11: note = Table A: HLA-A*24:07H
  source 1..11: note = Severe acute respiratory syndrome coronavirus 2
LYKLMGHFAWW

SEQ ID NO: 6197 - protein, 11 aa, Severe acute respiratory syndrome-related coronavirus
  REGION 1..11: note = Table A: HLA-A*36:01H
  source 1..11: note = Severe acute respiratory syndrome coronavirus 2
SSEAFLIGCNY

SEQ ID NO: 6198 - protein, 11 aa, Severe acute respiratory syndrome-related coronavirus
  REGION 1..11: note = Table A: HLA-B*44:05H HLA-B*40:01H HLA-B*40:02H
  source 1..11: note = Severe acute respiratory syndrome coronavirus 2
SEAFLIGCNYL

SEQ ID NO: 6199 - protein, 11 aa, Severe acute respiratory syndrome-related coronavirus
  REGION 1..11: note = Table A: HLA-A*30:02H
  source 1..11: note = Severe acute respiratory syndrome coronavirus 2
LGKPREQIDGY

SEQ ID NO: 6200 - protein, 11 aa, Severe acute respiratory syndrome-related coronavirus
  REGION 1..11: note = Table A: HLA-B*42:01M HLA-B*56:01H HLA-B*55:02H HLA-C*15:05H HLA-B*55:01H HLA-B*35:07H HLA-B*07:02H HLA-B*07:04M
  source 1..11: note = Severe acute respiratory syndrome coronavirus 2
KPREQIDGYVM

SEQ ID NO: 6201 - protein, 11 aa, Severe acute respiratory syndrome-related coronavirus
  REGION 1..11: note = Table A: HLA-B*45:01H
  source 1..11: note = Severe acute respiratory syndrome coronavirus 2
REQIDGYVMHA

SEQ ID NO: 6202 - protein, 11 aa, Severe acute respiratory syndrome-related coronavirus
  REGION 1..11: note = Table A: HLA-A*24:07H
  source 1..11: note = Severe acute respiratory syndrome coronavirus 2
GYVMHANYIFW

SEQ ID NO: 6203 - protein, 11 aa, Severe acute respiratory syndrome-related coronavirus
  REGION 1..11: note = Table A: HLA-C*14:03H
  source 1..11: note = Severe acute respiratory syndrome coronavirus 2
NYIFWRNTNPI

SEQ ID NO: 6204 - protein, 11 aa, Severe acute respiratory syndrome-related coronavirus
  REGION 1..11: note = Table A: HLA-A*24:07M
  source 1..11: note = Severe acute respiratory syndrome coronavirus 2
IFWRNTNPIQL

SEQ ID NO: 6205 - protein, 11 aa, Severe acute respiratory syndrome-related coronavirus
  REGION 1..11: note = Table A: HLA-A*30:02H
  source 1..11: note = Severe acute respiratory syndrome coronavirus 2
RNTNPIQLSSY

SEQ ID NO: 6206 - protein, 11 aa, Severe acute respiratory syndrome-related coronavirus
  REGION 1..11: note = Table A: HLA-B*53:01M HLA-B*35:01H HLA-B*35:07H
  source 1..11: note = Severe acute respiratory syndrome coronavirus 2
NPIQLSSYSLF

SEQ ID NO: 6207 - protein, 11 aa, Severe acute respiratory syndrome-related coronavirus
  REGION 1..11: note = Table A: HLA-B*57:03H
  source 1..11: note = Severe acute respiratory syndrome coronavirus 2
SSYSLFDMSKF

SEQ ID NO: 6208 - protein, 11 aa, Severe acute respiratory syndrome-related coronavirus
  REGION 1..11: note = Table A: HLA-A*11:303H HLA-A*74:01M HLA-A*03:01M HLA-A*03:02M HLA-A*11:01M HLA-A*11:02H HLA-A*30:01H HLA-A*30:02H HLA-A*34:02M
  source 1..11: note = Severe acute respiratory syndrome coronavirus 2
SLFDMSKFPLK

SEQ ID NO: 6209 - protein, 11 aa, Severe acute respiratory syndrome-related coronavirus
  REGION 1..11: note = Table A: HLA-C*04:03H
  source 1..11: note = Severe acute respiratory syndrome coronavirus 2
LFDMSKFPLKL

SEQ ID NO: 6210 - protein, 11 aa, Severe acute respiratory syndrome-related coronavirus
  REGION 1..11: note = Table A: HLA-B*35:07H HLA-B*07:04H
  source 1..11: note = Severe acute respiratory syndrome coronavirus 2
FPLKLRGTAVM

SEQ ID NO: 6211 - protein, 11 aa, Severe acute respiratory syndrome-related coronavirus
  REGION 1..11: note = Table A: HLA-A*02:02M HLA-B*38:02H
  source 1..11: note = Severe acute respiratory syndrome coronavirus 2
SLKEGQINDMI

SEQ ID NO: 6212 - protein, 11 aa, Severe acute respiratory syndrome-related coronavirus
  REGION 1..11: note = Table A: HLA-A*02:05H HLA-B*13:01H
  source 1..11: note = Severe acute respiratory syndrome coronavirus 2
GQINDMILSLL

SEQ ID NO: 6213 - protein, 11 aa, Severe acute respiratory syndrome-related coronavirus
  REGION 1..11: note = Table A: HLA-A*74:01H
  source 1..11: note = Severe acute respiratory syndrome coronavirus 2
SLLSKGRLIIR

SEQ ID NO: 6214 - protein, 11 aa, Severe acute respiratory syndrome-related coronavirus
  REGION 1..11: note = Table A: HLA-A*68:02H HLA-A*02:05H HLA-A*02:08H HLA-A*31:01M
  source 1..11: note = Severe acute respiratory syndrome coronavirus 2
VVISSDVLVNN

SEQ ID NO: 6215 - protein, 8 aa, Severe acute respiratory syndrome-related coronavirus
  REGION 1..8: note = Table A: HLA-B*15:01H
  source 1..8: note = Severe acute respiratory syndrome coronavirus 2
AQSFLNGF

SEQ ID NO: 6216 - protein, 8 aa, Severe acute respiratory syndrome-related coronavirus
  REGION 1..8: note = Table A: HLA-C*14:02M HLA-C*14:03H HLA-C*15:05H HLA-B*07:05H
  source 1..8: note = Severe acute respiratory syndrome coronavirus 2
SFLNGFAV

SEQ ID NO: 6217 - protein, 9 aa, Severe acute respiratory syndrome-related coronavirus
  REGION 1..9: note = Table A: HLA-A*25:01H HLA-A*33:01M HLA-A*33:03H HLA-A*26:02H HLA-A*26:03H HLA-C*15:05H HLA-B*35:01H HLA-B*51:01H HLA-B*38:02H HLA-B*07:05H
  source 1..9: note = Severe acute respiratory syndrome coronavirus 2
DAQSFLNGF

SEQ ID NO: 6218 - protein, 9 aa, Severe acute respiratory syndrome-related coronavirus
  REGION 1..9: note = Table A: HLA-A*11:303H HLA-C*16:01H HLA-C*16:04H HLA-A*36:01H HLA-B*56:01H HLA-C*06:02H HLA-B*55:02H HLA-A*68:02M HLA-C*15:05M HLA-C*12:03H HLA-C*15:02H HLA-A*02:04H HLA-B*52:01H HLA-C*08:01H HLA-C*08:03M
  REGION 1..9: note = CONT. FROM ABOVE: HLA-B*38:02M HLA-B*39:06H HLA-B*40:06H HLA- B*54:01M HLA-B*39:01H HLA-B*07:05H HLA-B*13:02M
  source 1..9: note = Severe acute respiratory syndrome coronavirus 2
QSFLNGFAV

SEQ ID NO: 6219 - protein, 10 aa, Severe acute respiratory syndrome-related coronavirus
  REGION 1..10: note = Table A: HLA-B*44:05H
  source 1..10: note = Severe acute respiratory syndrome coronavirus 2
ADAQSFLNGF

SEQ ID NO: 6220 - protein, 10 aa, Severe acute respiratory syndrome-related coronavirus
  REGION 1..10: note = Table A: HLA-A*68:02H HLA-A*02:04H HLA-A*02:06H HLA-A*02:01H HLA-C*08:03H HLA-B*38:02H HLA-B*13:02M
  source 1..10: note = Severe acute respiratory syndrome coronavirus 2
AQSFLNGFAV

SEQ ID NO: 6221 - protein, 11 aa, Severe acute respiratory syndrome-related coronavirus
  REGION 1..11: note = Table A: HLA-A*33:01H HLA-A*68:02H HLA-B*54:01H
  source 1..11: note = Severe acute respiratory syndrome coronavirus 2
DAQSFLNGFAV

SEQ ID NO: 6222 - protein, 8 aa, Severe acute respiratory syndrome-related coronavirus
  REGION 1..8: note = Table A: HLA-C*15:05H HLA-B*51:01H HLA-B*54:01H
  source 1..8: note = Severe acute respiratory syndrome coronavirus 2
LPLVSSQC

SEQ ID NO: 6223 - protein, 8 aa, Severe acute respiratory syndrome-related coronavirus
  REGION 1..8: note = Table A: HLA-B*08:01H HLA-B*14:02H HLA-B*14:01H
  source 1..8: note = Severe acute respiratory syndrome coronavirus 2
NLTTRTQL

SEQ ID NO: 6224 - protein, 8 aa, Severe acute respiratory syndrome-related coronavirus
  REGION 1..8: note = Table A: HLA-B*39:06H
  source 1..8: note = Severe acute respiratory syndrome coronavirus 2
TRTQLPPA

SEQ ID NO: 6225 - protein, 8 aa, Severe acute respiratory syndrome-related coronavirus
  REGION 1..8: note = Table A: HLA-B*58:02H HLA-A*36:01H HLA-A*30:02M
  source 1..8: note = Severe acute respiratory syndrome coronavirus 2
RTQLPPAY

SEQ ID NO: 6226 - protein, 8 aa, Severe acute respiratory syndrome-related coronavirus
  REGION 1..8: note = Table A: HLA-C*15:05H
  source 1..8: note = Severe acute respiratory syndrome coronavirus 2
PPAYTNSF

SEQ ID NO: 6227 - protein, 8 aa, Severe acute respiratory syndrome-related coronavirus
  REGION 1..8: note = Table A: HLA-C*14:03H
  source 1..8: note = Severe acute respiratory syndrome coronavirus 2
SFTRGVYY

SEQ ID NO: 6228 - protein, 8 aa, Severe acute respiratory syndrome-related coronavirus
  REGION 1..8: note = Table A: HLA-C*14:02H HLA-C*14:03H
  source 1..8: note = Severe acute respiratory syndrome coronavirus 2
VYYPDKVF

SEQ ID NO: 6229 - protein, 8 aa, Severe acute respiratory syndrome-related coronavirus
  REGION 1..8: note = Table A: HLA-A*33:03H
  source 1..8: note = Severe acute respiratory syndrome coronavirus 2
YYPDKVFR

SEQ ID NO: 6230 - protein, 8 aa, Severe acute respiratory syndrome-related coronavirus
  REGION 1..8: note = Table A: HLA-B*38:02H
  source 1..8: note = Severe acute respiratory syndrome coronavirus 2
LHSTQDLF

SEQ ID NO: 6231 - protein, 8 aa, Severe acute respiratory syndrome-related coronavirus
  REGION 1..8: note = Table A: HLA-A*24:07H
  source 1..8: note = Severe acute respiratory syndrome coronavirus 2
PFFSNVTW

SEQ ID NO: 6232 - protein, 8 aa, Severe acute respiratory syndrome-related coronavirus
  REGION 1..8: note = Table A: HLA-C*14:03H
  source 1..8: note = Severe acute respiratory syndrome coronavirus 2
TWFHAIHV

SEQ ID NO: 6233 - protein, 8 aa, Severe acute respiratory syndrome-related coronavirus
  REGION 1..8: note = Table A: HLA-C*04:03H
  source 1..8: note = Severe acute respiratory syndrome coronavirus 2
RFDNPVLP

SEQ ID NO: 6234 - protein, 8 aa, Severe acute respiratory syndrome-related coronavirus
  REGION 1..8: note = Table A: HLA-B*37:01M
  source 1..8: note = Severe acute respiratory syndrome coronavirus 2
FDNPVLPF

SEQ ID NO: 6235 - protein, 8 aa, Severe acute respiratory syndrome-related coronavirus
  REGION 1..8: note = Table A: HLA-B*35:01H HLA-B*35:07H
  source 1..8: note = Severe acute respiratory syndrome coronavirus 2
LPFNDGVY

SEQ ID NO: 6236 - protein, 8 aa, Severe acute respiratory syndrome-related coronavirus
  REGION 1..8: note = Table A: HLA-C*14:03H
  source 1..8: note = Severe acute respiratory syndrome coronavirus 2
VYFASTEK

SEQ ID NO: 6237 - protein, 8 aa, Severe acute respiratory syndrome-related coronavirus
  REGION 1..8: note = Table A: HLA-B*58:01H HLA-B*58:02M HLA-B*57:01H HLA-B*57:03H
  source 1..8: note = Severe acute respiratory syndrome coronavirus 2
KSNIIRGW

SEQ ID NO: 6238 - protein, 8 aa, Severe acute respiratory syndrome-related coronavirus
  REGION 1..8: note = Table A: HLA-A*36:01H
  source 1..8: note = Severe acute respiratory syndrome coronavirus 2
FGTTLDSK

SEQ ID NO: 6239 - protein, 8 aa, Severe acute respiratory syndrome-related coronavirus
  REGION 1..8: note = Table A: HLA-B*37:01H HLA-B*40:02H HLA-B*41:02H
  source 1..8: note = Severe acute respiratory syndrome coronavirus 2
LDSKTQSL

SEQ ID NO: 6240 - protein, 8 aa, Severe acute respiratory syndrome-related coronavirus
  REGION 1..8: note = Table A: HLA-C*16:01H HLA-C*04:03H HLA-A*02:11H HLA-A*68:02H HLA-C*15:05M HLA-C*12:03H HLA-C*15:02M HLA-A*02:04H HLA-B*14:01H HLA-A*02:02H HLA-A*02:03H HLA-B*52:01H HLA-B*37:01H HLA-B*13:02H HLA-C*07:04H
  source 1..8: note = Severe acute respiratory syndrome coronavirus 2
ATNVVIKV

SEQ ID NO: 6241 - protein, 8 aa, Severe acute respiratory syndrome-related coronavirus
  REGION 1..8: note = Table A: HLA-B*39:06H
  source 1..8: note = Severe acute respiratory syndrome coronavirus 2
TNVVIKVC

SEQ ID NO: 6242 - protein, 8 aa, Severe acute respiratory syndrome-related coronavirus
  REGION 1..8: note = Table A: HLA-B*38:02H HLA-B*15:01H
  source 1..8: note = Severe acute respiratory syndrome coronavirus 2
VVIKVCEF

SEQ ID NO: 6243 - protein, 8 aa, Severe acute respiratory syndrome-related coronavirus
  REGION 1..8: note = Table A: HLA-B*18:01H HLA-B*53:01H HLA-A*34:01H HLA-B*35:01H HLA-B*51:01H HLA-B*35:07H HLA-B*38:02M HLA-B*15:02H HLA-B*07:05H HLA-B*15:11H
  source 1..8: note = Severe acute respiratory syndrome coronavirus 2
DPFLGVYY

SEQ ID NO: 6244 - protein, 8 aa, Severe acute respiratory syndrome-related coronavirus
  REGION 1..8: note = Table A: HLA-B*58:01H HLA-B*58:02H HLA-B*57:03M
  source 1..8: note = Severe acute respiratory syndrome coronavirus 2
KSWMESEF

SEQ ID NO: 6245 - protein, 8 aa, Severe acute respiratory syndrome-related coronavirus
  REGION 1..8: note = Table A: HLA-B*44:02H HLA-B*46:01H HLA-B*44:03H HLA-B*18:01H HLA-C*07:01H HLA-C*03:02H HLA-B*15:02H HLA-B*07:05H HLA-B*41:02H HLA-B*49:01H HLA-B*50:01H
  source 1..8: note = Severe acute respiratory syndrome coronavirus 2
MESEFRVY

SEQ ID NO: 6246 - protein, 8 aa, Severe acute respiratory syndrome-related coronavirus
  REGION 1..8: note = Table A: HLA-B*18:01H HLA-B*40:06H
  source 1..8: note = Severe acute respiratory syndrome coronavirus 2
SEFRVYSS

SEQ ID NO: 6247 - protein, 8 aa, Severe acute respiratory syndrome-related coronavirus
  REGION 1..8: note = Table A: HLA-B*46:01H HLA-B*18:01H HLA-B*37:01H HLA-B*07:05H
  source 1..8: note = Severe acute respiratory syndrome coronavirus 2
FEYVSQPF

SEQ ID NO: 6248 - protein, 8 aa, Severe acute respiratory syndrome-related coronavirus
  REGION 1..8: note = Table A: HLA-C*15:05H HLA-C*07:04H
  source 1..8: note = Severe acute respiratory syndrome coronavirus 2
YVSQPFLM

SEQ ID NO: 6249 - protein, 8 aa, Severe acute respiratory syndrome-related coronavirus
  REGION 1..8: note = Table A: HLA-B*57:03H
  source 1..8: note = Severe acute respiratory syndrome coronavirus 2
KNLREFVF

SEQ ID NO: 6250 - protein, 8 aa, Severe acute respiratory syndrome-related coronavirus
  REGION 1..8: note = Table A: HLA-A*34:02H
  source 1..8: note = Severe acute respiratory syndrome coronavirus 2
NLREFVFK

SEQ ID NO: 6251 - protein, 8 aa, Severe acute respiratory syndrome-related coronavirus
  REGION 1..8: note = Table A: HLA-B*52:01H HLA-B*40:02H HLA-B*40:06H HLA-B*49:01M
  source 1..8: note = Severe acute respiratory syndrome coronavirus 2
REFVFKNI

SEQ ID NO: 6252 - protein, 8 aa, Severe acute respiratory syndrome-related coronavirus
  REGION 1..8: note = Table A: HLA-A*30:02H
  source 1..8: note = Severe acute respiratory syndrome coronavirus 2
VFKNIDGY

SEQ ID NO: 6253 - protein, 8 aa, Severe acute respiratory syndrome-related coronavirus
  REGION 1..8: note = Table A: HLA-A*11:02H
  source 1..8: note = Severe acute respiratory syndrome coronavirus 2
GYFKIYSK

SEQ ID NO: 6254 - protein, 8 aa, Severe acute respiratory syndrome-related coronavirus
  REGION 1..8: note = Table A: HLA-B*39:06H
  source 1..8: note = Severe acute respiratory syndrome coronavirus 2
KHTPINLV

SEQ ID NO: 6255 - protein, 8 aa, Severe acute respiratory syndrome-related coronavirus
  REGION 1..8: note = Table A: HLA-C*15:05M HLA-B*07:02H HLA-B*07:05H
  source 1..8: note = Severe acute respiratory syndrome coronavirus 2
LPQGFSAL

SEQ ID NO: 6256 - protein, 8 aa, Severe acute respiratory syndrome-related coronavirus
  REGION 1..8: note = Table A: HLA-C*04:03H
  source 1..8: note = Severe acute respiratory syndrome coronavirus 2
LVDLPIGI

SEQ ID NO: 6257 - protein, 8 aa, Severe acute respiratory syndrome-related coronavirus
  REGION 1..8: note = Table A: HLA-B*51:01H
  source 1..8: note = Severe acute respiratory syndrome coronavirus 2
DLPIGINI

SEQ ID NO: 6258 - protein, 8 aa, Severe acute respiratory syndrome-related coronavirus
  REGION 1..8: note = Table A: HLA-C*14:03H
  source 1..8: note = Severe acute respiratory syndrome coronavirus 2
RFQTLLAL

SEQ ID NO: 6259 - protein, 8 aa, Severe acute respiratory syndrome-related coronavirus
  REGION 1..8: note = Table A: HLA-A*34:02H
  source 1..8: note = Severe acute respiratory syndrome coronavirus 2
QTLLALHR

SEQ ID NO: 6260 - protein, 8 aa, Severe acute respiratory syndrome-related coronavirus
  REGION 1..8: note = Table A: HLA-B*08:01H
  source 1..8: note = Severe acute respiratory syndrome coronavirus 2
LALHRSYL

SEQ ID NO: 6261 - protein, 8 aa, Severe acute respiratory syndrome-related coronavirus
  REGION 1..8: note = Table A: HLA-B*39:06H
  source 1..8: note = Severe acute respiratory syndrome coronavirus 2
SGWTAGAA

SEQ ID NO: 6262 - protein, 8 aa, Severe acute respiratory syndrome-related coronavirus
  REGION 1..8: note = Table A: HLA-B*58:01H HLA-B*35:01M HLA-B*38:02H
  source 1..8: note = Severe acute respiratory syndrome coronavirus 2
TAGAAAYY

SEQ ID NO: 6263 - protein, 8 aa, Severe acute respiratory syndrome-related coronavirus
  REGION 1..8: note = Table A: HLA-C*15:05H HLA-C*17:01H
  source 1..8: note = Severe acute respiratory syndrome coronavirus 2
AAYYVGYL

SEQ ID NO: 6264 - protein, 8 aa, Severe acute respiratory syndrome-related coronavirus
  REGION 1..8: note = Table A: HLA-B*52:01H
  source 1..8: note = Severe acute respiratory syndrome coronavirus 2
VGYLQPRT

SEQ ID NO: 6265 - protein, 8 aa, Severe acute respiratory syndrome-related coronavirus
  REGION 1..8: note = Table A: HLA-B*08:01H HLA-A*02:02H
  source 1..8: note = Severe acute respiratory syndrome coronavirus 2
YLQPRTFL

SEQ ID NO: 6266 - protein, 8 aa, Severe acute respiratory syndrome-related coronavirus
  REGION 1..8: note = Table A: HLA-A*36:01H
  source 1..8: note = Severe acute respiratory syndrome coronavirus 2
LDPLSETK

SEQ ID NO: 6267 - protein, 8 aa, Severe acute respiratory syndrome-related coronavirus
  REGION 1..8: note = Table A: HLA-B*35:02H
  source 1..8: note = Severe acute respiratory syndrome coronavirus 2
DPLSETKC

SEQ ID NO: 6268 - protein, 8 aa, Severe acute respiratory syndrome-related coronavirus
  REGION 1..8: note = Table A: HLA-B*18:01H HLA-B*40:02H HLA-B*41:02M
  source 1..8: note = Severe acute respiratory syndrome coronavirus 2
VEKGIYQT

SEQ ID NO: 6269 - protein, 8 aa, Severe acute respiratory syndrome-related coronavirus
  REGION 1..8: note = Table A: HLA-A*33:03H
  source 1..8: note = Severe acute respiratory syndrome coronavirus 2
IYQTSNFR

SEQ ID NO: 6270 - protein, 8 aa, Severe acute respiratory syndrome-related coronavirus
  REGION 1..8: note = Table A: HLA-B*52:01H HLA-B*13:02M
  source 1..8: note = Severe acute respiratory syndrome coronavirus 2
YQTSNFRV

SEQ ID NO: 6271 - protein, 8 aa, Severe acute respiratory syndrome-related coronavirus
  REGION 1..8: note = Table A: HLA-B*52:01H
  source 1..8: note = Severe acute respiratory syndrome coronavirus 2
VQPTESIV

SEQ ID NO: 6272 - protein, 8 aa, Severe acute respiratory syndrome-related coronavirus
  REGION 1..8: note = Table A: HLA-A*26:03H HLA-A*34:01M HLA-A*66:01H
  source 1..8: note = Severe acute respiratory syndrome coronavirus 2
EVFNATRF

SEQ ID NO: 6273 - protein, 8 aa, Severe acute respiratory syndrome-related coronavirus
  REGION 1..8: note = Table A: HLA-C*15:05H HLA-B*51:01M HLA-B*54:01H
  source 1..8: note = Severe acute respiratory syndrome coronavirus 2
NATRFASV

SEQ ID NO: 6274 - protein, 8 aa, Severe acute respiratory syndrome-related coronavirus
  REGION 1..8: note = Table A: HLA-B*46:01H HLA-A*30:02H HLA-B*15:01H HLA-B*15:03H
  source 1..8: note = Severe acute respiratory syndrome coronavirus 2
ATRFASVY

SEQ ID NO: 6275 - protein, 8 aa, Severe acute respiratory syndrome-related coronavirus
  REGION 1..8: note = Table A: HLA-B*58:01H
  source 1..8: note = Severe acute respiratory syndrome coronavirus 2
RFASVYAW

SEQ ID NO: 6276 - protein, 8 aa, Severe acute respiratory syndrome-related coronavirus
  REGION 1..8: note = Table A: HLA-A*74:01H HLA-A*11:02H HLA-A*31:01H
  source 1..8: note = Severe acute respiratory syndrome coronavirus 2
ASVYAWNR

SEQ ID NO: 6277 - protein, 8 aa, Severe acute respiratory syndrome-related coronavirus
  REGION 1..8: note = Table A: HLA-A*11:02H
  source 1..8: note = Severe acute respiratory syndrome coronavirus 2
SVYAWNRK

SEQ ID NO: 6278 - protein, 8 aa, Severe acute respiratory syndrome-related coronavirus
  REGION 1..8: note = Table A: HLA-B*58:01H HLA-A*36:01M HLA-A*01:01H HLA-C*04:03M HLA-B*35:01H HLA-B*35:08H HLA-B*38:02H
  source 1..8: note = Severe acute respiratory syndrome coronavirus 2
VADYSVLY

SEQ ID NO: 6279 - protein, 8 aa, Severe acute respiratory syndrome-related coronavirus
  REGION 1..8: note = Table A: HLA-B*54:01H
  source 1..8: note = Severe acute respiratory syndrome coronavirus 2
YSVLYNSA

SEQ ID NO: 6280 - protein, 8 aa, Severe acute respiratory syndrome-related coronavirus
  REGION 1..8: note = Table A: HLA-B*46:01H HLA-B*38:02H HLA-B*15:01H HLA-B*15:02H
  source 1..8: note = Severe acute respiratory syndrome coronavirus 2
VLYNSASF

SEQ ID NO: 6281 - protein, 8 aa, Severe acute respiratory syndrome-related coronavirus
  REGION 1..8: note = Table A: HLA-C*15:05H HLA-B*07:05H
  source 1..8: note = Severe acute respiratory syndrome coronavirus 2
NSASFSTF

SEQ ID NO: 6282 - protein, 8 aa, Severe acute respiratory syndrome-related coronavirus
  REGION 1..8: note = Table A: HLA-A*03:02H HLA-A*11:01H HLA-A*11:02H HLA-A*36:01H HLA-A*34:02M
  source 1..8: note = Severe acute respiratory syndrome coronavirus 2
SASFSTFK

SEQ ID NO: 6283 - protein, 8 aa, Severe acute respiratory syndrome-related coronavirus
  REGION 1..8: note = Table A: HLA-A*02:11H
  source 1..8: note = Severe acute respiratory syndrome coronavirus 2
STFKCYGV

SEQ ID NO: 6284 - protein, 8 aa, Severe acute respiratory syndrome-related coronavirus
  REGION 1..8: note = Table A: HLA-C*15:05H HLA-C*17:01H
  source 1..8: note = Severe acute respiratory syndrome coronavirus 2
YGVSPTKL

SEQ ID NO: 6285 - protein, 8 aa, Severe acute respiratory syndrome-related coronavirus
  REGION 1..8: note = Table A: HLA-C*15:05H HLA-B*55:01H HLA-B*07:02M HLA-B*07:04H HLA-B*07:05H
  source 1..8: note = Severe acute respiratory syndrome coronavirus 2
SPTKLNDL

SEQ ID NO: 6286 - protein, 8 aa, Severe acute respiratory syndrome-related coronavirus
  REGION 1..8: note = Table A: HLA-A*24:02H HLA-C*08:01H HLA-A*23:01H
  source 1..8: note = Severe acute respiratory syndrome coronavirus 2
VYADSFVI

SEQ ID NO: 6287 - protein, 8 aa, Severe acute respiratory syndrome-related coronavirus
  REGION 1..8: note = Table A: HLA-C*03:03H HLA-A*02:11H HLA-C*03:04H HLA-A*02:05H HLA-C*08:01H HLA-B*38:02M HLA-B*39:01H HLA-B*13:02H
  source 1..8: note = Severe acute respiratory syndrome coronavirus 2
FVIRGDEV

SEQ ID NO: 6288 - protein, 8 aa, Severe acute respiratory syndrome-related coronavirus
  REGION 1..8: note = Table A: HLA-B*58:02H
  source 1..8: note = Severe acute respiratory syndrome coronavirus 2
RGDEVRQI

SEQ ID NO: 6289 - protein, 8 aa, Severe acute respiratory syndrome-related coronavirus
  REGION 1..8: note = Table A: HLA-B*18:01H
  source 1..8: note = Severe acute respiratory syndrome coronavirus 2
DEVRQIAP

SEQ ID NO: 6290 - protein, 8 aa, Severe acute respiratory syndrome-related coronavirus
  REGION 1..8: note = Table A: HLA-C*15:05M
  source 1..8: note = Severe acute respiratory syndrome coronavirus 2
APGQTGKI

SEQ ID NO: 6291 - protein, 8 aa, Severe acute respiratory syndrome-related coronavirus
  REGION 1..8: note = Table A: HLA-B*15:03H
  source 1..8: note = Severe acute respiratory syndrome coronavirus 2
GKIADYNY

SEQ ID NO: 6292 - protein, 8 aa, Severe acute respiratory syndrome-related coronavirus
  REGION 1..8: note = Table A: HLA-C*04:03H HLA-B*35:02H HLA-C*08:01H HLA-C*08:02M HLA-B*35:12H HLA-C*05:01H
  source 1..8: note = Severe acute respiratory syndrome coronavirus 2
IADYNYKL

SEQ ID NO: 6293 - protein, 8 aa, Severe acute respiratory syndrome-related coronavirus
  REGION 1..8: note = Table A: HLA-A*26:01H HLA-B*38:02H HLA-B*15:02H
  source 1..8: note = Severe acute respiratory syndrome coronavirus 2
DSKVGGNY

SEQ ID NO: 6294 - protein, 8 aa, Severe acute respiratory syndrome-related coronavirus
  REGION 1..8: note = Table A: HLA-B*58:01H HLA-A*30:02H
  source 1..8: note = Severe acute respiratory syndrome coronavirus 2
KVGGNYNY

SEQ ID NO: 6295 - protein, 8 aa, Severe acute respiratory syndrome-related coronavirus
  REGION 1..8: note = Table A: HLA-A*33:01M HLA-A*33:03M HLA-A*31:01H
  source 1..8: note = Severe acute respiratory syndrome coronavirus 2
SNLKPFER

SEQ ID NO: 6296 - protein, 8 aa, Severe acute respiratory syndrome-related coronavirus
  REGION 1..8: note = Table A: HLA-B*39:06H HLA-B*54:01H
  source 1..8: note = Severe acute respiratory syndrome coronavirus 2
ISTEIYQA

SEQ ID NO: 6297 - protein, 8 aa, Severe acute respiratory syndrome-related coronavirus
  REGION 1..8: note = Table A: HLA-C*14:03H
  source 1..8: note = Severe acute respiratory syndrome coronavirus 2
CYFPLQSY

SEQ ID NO: 6298 - protein, 8 aa, Severe acute respiratory syndrome-related coronavirus
  REGION 1..8: note = Table A: HLA-B*27:02H HLA-B*53:01M HLA-B*35:01M HLA-B*35:07M HLA-B*38:02H HLA-B*15:02H HLA-B*07:05H
  source 1..8: note = Severe acute respiratory syndrome coronavirus 2
FPLQSYGF

SEQ ID NO: 6299 - protein, 8 aa, Severe acute respiratory syndrome-related coronavirus
  REGION 1..8: note = Table A: HLA-B*35:01H
  source 1..8: note = Severe acute respiratory syndrome coronavirus 2
QPTNGVGY

SEQ ID NO: 6300 - protein, 8 aa, Severe acute respiratory syndrome-related coronavirus
  REGION 1..8: note = Table A: HLA-B*51:01H HLA-B*52:01H
  source 1..8: note = Severe acute respiratory syndrome coronavirus 2
VGYQPYRV

SEQ ID NO: 6301 - protein, 8 aa, Severe acute respiratory syndrome-related coronavirus
  REGION 1..8: note = Table A: HLA-B*52:01H
  source 1..8: note = Severe acute respiratory syndrome coronavirus 2
YQPYRVVV

SEQ ID NO: 6302 - protein, 8 aa, Severe acute respiratory syndrome-related coronavirus
  REGION 1..8: note = Table A: HLA-B*42:01H HLA-B*08:01M HLA-B*35:03H HLA-C*15:05M HLA-B*14:02H HLA-B*55:01H HLA-B*51:01M HLA-B*35:07H HLA-B*52:01H HLA-C*08:01H HLA-B*38:02H HLA-B*07:02H HLA-B*07:04H HLA-B*15:02H HLA-B*07:05H
  source 1..8: note = Severe acute respiratory syndrome coronavirus 2
QPYRVVVL

SEQ ID NO: 6303 - protein, 8 aa, Severe acute respiratory syndrome-related coronavirus
  REGION 1..8: note = Table A: HLA-B*54:01H
  source 1..8: note = Severe acute respiratory syndrome coronavirus 2
LSFELLHA

SEQ ID NO: 6304 - protein, 8 aa, Severe acute respiratory syndrome-related coronavirus
  REGION 1..8: note = Table A: HLA-B*50:01H
  source 1..8: note = Severe acute respiratory syndrome coronavirus 2
FELLHAPA

SEQ ID NO: 6305 - protein, 8 aa, Severe acute respiratory syndrome-related coronavirus
  REGION 1..8: note = Table A: HLA-A*02:11M HLA-B*14:01H HLA-A*02:01H HLA-A*02:02H HLA-A*02:03M HLA-B*38:02H HLA-B*13:02H
  source 1..8: note = Severe acute respiratory syndrome coronavirus 2
LLHAPATV

SEQ ID NO: 6306 - protein, 8 aa, Severe acute respiratory syndrome-related coronavirus
  REGION 1..8: note = Table A: HLA-B*39:06M HLA-B*15:10M
  source 1..8: note = Severe acute respiratory syndrome coronavirus 2
LHAPATVC

SEQ ID NO: 6307 - protein, 8 aa, Severe acute respiratory syndrome-related coronavirus
  REGION 1..8: note = Table A: HLA-C*15:05H HLA-B*07:02H HLA-B*07:04H
  source 1..8: note = Severe acute respiratory syndrome coronavirus 2
GPKKSTNL

SEQ ID NO: 6308 - protein, 8 aa, Severe acute respiratory syndrome-related coronavirus
  REGION 1..8: note = Table A: HLA-B*14:01H
  source 1..8: note = Severe acute respiratory syndrome coronavirus 2
NGLTGTGV

SEQ ID NO: 6309 - protein, 8 aa, Severe acute respiratory syndrome-related coronavirus
  REGION 1..8: note = Table A: HLA-A*24:07H HLA-A*23:01H
  source 1..8: note = Severe acute respiratory syndrome coronavirus 2
KFLPFQQF

SEQ ID NO: 6310 - protein, 8 aa, Severe acute respiratory syndrome-related coronavirus
  REGION 1..8: note = Table A: HLA-A*34:01H
  source 1..8: note = Severe acute respiratory syndrome coronavirus 2
LPFQQFGR

SEQ ID NO: 6311 - protein, 8 aa, Severe acute respiratory syndrome-related coronavirus
  REGION 1..8: note = Table A: HLA-C*08:02H
  source 1..8: note = Severe acute respiratory syndrome coronavirus 2
IADTTDAV

SEQ ID NO: 6312 - protein, 8 aa, Severe acute respiratory syndrome-related coronavirus
  REGION 1..8: note = Table A: HLA-B*35:02H
  source 1..8: note = Severe acute respiratory syndrome coronavirus 2
DAVRDPQT

SEQ ID NO: 6313 - protein, 8 aa, Severe acute respiratory syndrome-related coronavirus
  REGION 1..8: note = Table A: HLA-C*15:05H
  source 1..8: note = Severe acute respiratory syndrome coronavirus 2
AVRDPQTL

SEQ ID NO: 6314 - protein, 8 aa, Severe acute respiratory syndrome-related coronavirus
  REGION 1..8: note = Table A: HLA-B*40:02H
  source 1..8: note = Severe acute respiratory syndrome coronavirus 2
LDITPCSF

SEQ ID NO: 6315 - protein, 8 aa, Severe acute respiratory syndrome-related coronavirus
  REGION 1..8: note = Table A: HLA-C*15:05H
  source 1..8: note = Severe acute respiratory syndrome coronavirus 2
TSNQVAVL

SEQ ID NO: 6316 - protein, 8 aa, Severe acute respiratory syndrome-related coronavirus
  REGION 1..8: note = Table A: HLA-C*04:03H
  source 1..8: note = Severe acute respiratory syndrome coronavirus 2
CTEVPVAI

SEQ ID NO: 6317 - protein, 8 aa, Severe acute respiratory syndrome-related coronavirus
  REGION 1..8: note = Table A: HLA-B*18:01M HLA-B*07:05M HLA-B*41:02H HLA-B*49:01H
  source 1..8: note = Severe acute respiratory syndrome coronavirus 2
TEVPVAIH

SEQ ID NO: 6318 - protein, 8 aa, Severe acute respiratory syndrome-related coronavirus
  REGION 1..8: note = Table A: HLA-C*08:01H HLA-B*35:12H
  source 1..8: note = Severe acute respiratory syndrome coronavirus 2
VAIHADQL

SEQ ID NO: 6319 - protein, 8 aa, Severe acute respiratory syndrome-related coronavirus
  REGION 1..8: note = Table A: HLA-B*44:02H HLA-B*44:05H HLA-B*44:03H HLA-B*37:01H
  source 1..8: note = Severe acute respiratory syndrome coronavirus 2
ADQLTPTW

SEQ ID NO: 6320 - protein, 8 aa, Severe acute respiratory syndrome-related coronavirus
  REGION 1..8: note = Table A: HLA-B*46:01H
  source 1..8: note = Severe acute respiratory syndrome coronavirus 2
LTPTWRVY

SEQ ID NO: 6321 - protein, 8 aa, Severe acute respiratory syndrome-related coronavirus
  REGION 1..8: note = Table A: HLA-C*14:03H
  source 1..8: note = Severe acute respiratory syndrome coronavirus 2
VYSTGSNV

SEQ ID NO: 6322 - protein, 8 aa, Severe acute respiratory syndrome-related coronavirus
  REGION 1..8: note = Table A: HLA-A*74:01H HLA-A*11:01H HLA-A*11:02H HLA-B*57:01H HLA-A*33:01H HLA-A*33:03M HLA-A*68:01H HLA-A*31:01M
  source 1..8: note = Severe acute respiratory syndrome coronavirus 2
GSNVFQTR

SEQ ID NO: 6323 - protein, 8 aa, Severe acute respiratory syndrome-related coronavirus
  REGION 1..8: note = Table A: HLA-B*44:02H HLA-B*44:05H HLA-B*46:01H HLA-B*44:03H HLA-B*18:01H HLA-B*07:05H
  source 1..8: note = Severe acute respiratory syndrome coronavirus 2
AEHVNNSY

SEQ ID NO: 6324 - protein, 8 aa, Severe acute respiratory syndrome-related coronavirus
  REGION 1..8: note = Table A: HLA-B*51:01M
  source 1..8: note = Severe acute respiratory syndrome coronavirus 2
DIPIGAGI

SEQ ID NO: 6325 - protein, 8 aa, Severe acute respiratory syndrome-related coronavirus
  REGION 1..8: note = Table A: HLA-C*15:05H
  source 1..8: note = Severe acute respiratory syndrome coronavirus 2
IPIGAGIC

SEQ ID NO: 6326 - protein, 8 aa, Severe acute respiratory syndrome-related coronavirus
  REGION 1..8: note = Table A: HLA-A*33:03H
  source 1..8: note = Severe acute respiratory syndrome coronavirus 2
QTQTNSPR

SEQ ID NO: 6327 - protein, 8 aa, Severe acute respiratory syndrome-related coronavirus
  REGION 1..8: note = Table A: HLA-B*07:02H HLA-B*07:04H
  source 1..8: note = Severe acute respiratory syndrome coronavirus 2
SPRRARSV

SEQ ID NO: 6328 - protein, 8 aa, Severe acute respiratory syndrome-related coronavirus
  REGION 1..8: note = Table A: HLA-B*58:02H
  source 1..8: note = Severe acute respiratory syndrome coronavirus 2
RSVASQSI

SEQ ID NO: 6329 - protein, 8 aa, Severe acute respiratory syndrome-related coronavirus
  REGION 1..8: note = Table A: HLA-A*30:02H HLA-B*15:01M
  source 1..8: note = Severe acute respiratory syndrome coronavirus 2
ASQSIIAY

SEQ ID NO: 6330 - protein, 8 aa, Severe acute respiratory syndrome-related coronavirus
  REGION 1..8: note = Table A: HLA-B*58:01H HLA-B*58:02M HLA-B*38:02H HLA-B*07:05H
  source 1..8: note = Severe acute respiratory syndrome coronavirus 2
QSIIAYTM

SEQ ID NO: 6331 - protein, 8 aa, Severe acute respiratory syndrome-related coronavirus
  REGION 1..8: note = Table A: HLA-C*15:05H
  source 1..8: note = Severe acute respiratory syndrome coronavirus 2
IIAYTMSL

SEQ ID NO: 6332 - protein, 8 aa, Severe acute respiratory syndrome-related coronavirus
  REGION 1..8: note = Table A: HLA-B*35:01H HLA-B*39:01H
  source 1..8: note = Severe acute respiratory syndrome coronavirus 2
GAENSVAY

SEQ ID NO: 6333 - protein, 8 aa, Severe acute respiratory syndrome-related coronavirus
  REGION 1..8: note = Table A: HLA-C*15:05H HLA-B*51:01M HLA-B*52:01H
  source 1..8: note = Severe acute respiratory syndrome coronavirus 2
VAYSNNSI

SEQ ID NO: 6334 - protein, 8 aa, Severe acute respiratory syndrome-related coronavirus
  REGION 1..8: note = Table A: HLA-C*15:05H
  source 1..8: note = Severe acute respiratory syndrome coronavirus 2
SIAIPTNF

SEQ ID NO: 6335 - protein, 8 aa, Severe acute respiratory syndrome-related coronavirus
  REGION 1..8: note = Table A: HLA-C*15:05H
  source 1..8: note = Severe acute respiratory syndrome coronavirus 2
PTNFTISV

SEQ ID NO: 6336 - protein, 8 aa, Severe acute respiratory syndrome-related coronavirus
  REGION 1..8: note = Table A: HLA-C*15:05H
  source 1..8: note = Severe acute respiratory syndrome coronavirus 2
VTTEILPV

SEQ ID NO: 6337 - protein, 8 aa, Severe acute respiratory syndrome-related coronavirus
  REGION 1..8: note = Table A: HLA-B*44:05H HLA-B*18:01H HLA-B*37:01H HLA-B*40:01M HLA-B*40:02M HLA-B*39:01H HLA-B*07:05H HLA-B*41:02M HLA-B*49:01H
  source 1..8: note = Severe acute respiratory syndrome coronavirus 2
TEILPVSM

SEQ ID NO: 6338 - protein, 8 aa, Severe acute respiratory syndrome-related coronavirus
  REGION 1..8: note = Table A: HLA-A*03:01H
  source 1..8: note = Severe acute respiratory syndrome coronavirus 2
ILPVSMTK

SEQ ID NO: 6339 - protein, 8 aa, Severe acute respiratory syndrome-related coronavirus
  REGION 1..8: note = Table A: HLA-B*51:01H HLA-B*54:01H
  source 1..8: note = Severe acute respiratory syndrome coronavirus 2
LPVSMTKT

SEQ ID NO: 6340 - protein, 8 aa, Severe acute respiratory syndrome-related coronavirus
  REGION 1..8: note = Table A: HLA-B*08:01H
  source 1..8: note = Severe acute respiratory syndrome coronavirus 2
VSMTKTSV

SEQ ID NO: 6341 - protein, 8 aa, Severe acute respiratory syndrome-related coronavirus
  REGION 1..8: note = Table A: HLA-C*15:05H
  source 1..8: note = Severe acute respiratory syndrome coronavirus 2
RALTGIAV

SEQ ID NO: 6342 - protein, 8 aa, Severe acute respiratory syndrome-related coronavirus
  REGION 1..8: note = Table A: HLA-B*52:01H HLA-B*39:06H HLA-B*39:01H
  source 1..8: note = Severe acute respiratory syndrome coronavirus 2
TQEVFAQV

SEQ ID NO: 6343 - protein, 8 aa, Severe acute respiratory syndrome-related coronavirus
  REGION 1..8: note = Table A: HLA-B*52:01H
  source 1..8: note = Severe acute respiratory syndrome coronavirus 2
VFAQVKQI

SEQ ID NO: 6344 - protein, 8 aa, Severe acute respiratory syndrome-related coronavirus
  REGION 1..8: note = Table A: HLA-C*16:01H HLA-B*46:01M HLA-B*08:01H HLA-C*03:02H HLA-C*12:03H HLA-B*35:01H HLA-B*35:07H HLA-B*38:02H HLA-B*15:02H
  source 1..8: note = Severe acute respiratory syndrome coronavirus 2
FAQVKQIY

SEQ ID NO: 6345 - protein, 8 aa, Severe acute respiratory syndrome-related coronavirus
  REGION 1..8: note = Table A: HLA-A*11:01H HLA-A*11:02H
  source 1..8: note = Severe acute respiratory syndrome coronavirus 2
AQVKQIYK

SEQ ID NO: 6346 - protein, 8 aa, Severe acute respiratory syndrome-related coronavirus
  REGION 1..8: note = Table A: HLA-B*52:01H
  source 1..8: note = Severe acute respiratory syndrome coronavirus 2
QIYKTPPI

SEQ ID NO: 6347 - protein, 8 aa, Severe acute respiratory syndrome-related coronavirus
  REGION 1..8: note = Table A: HLA-A*30:01H
  source 1..8: note = Severe acute respiratory syndrome coronavirus 2
IYKTPPIK

SEQ ID NO: 6348 - protein, 8 aa, Severe acute respiratory syndrome-related coronavirus
  REGION 1..8: note = Table A: HLA-B*37:01M
  source 1..8: note = Severe acute respiratory syndrome coronavirus 2
KDFGGFNF

SEQ ID NO: 6349 - protein, 8 aa, Severe acute respiratory syndrome-related coronavirus
  REGION 1..8: note = Table A: HLA-A*11:02H
  source 1..8: note = Severe acute respiratory syndrome coronavirus 2
PDPSKPSK

SEQ ID NO: 6350 - protein, 8 aa, Severe acute respiratory syndrome-related coronavirus
  REGION 1..8: note = Table A: HLA-B*18:01H
  source 1..8: note = Severe acute respiratory syndrome coronavirus 2
EDLLFNKV

SEQ ID NO: 6351 - protein, 8 aa, Severe acute respiratory syndrome-related coronavirus
  REGION 1..8: note = Table A: HLA-B*08:01M HLA-A*02:11M HLA-A*02:04H HLA-A*02:02H
  source 1..8: note = Severe acute respiratory syndrome coronavirus 2
LLFNKVTL

SEQ ID NO: 6352 - protein, 8 aa, Severe acute respiratory syndrome-related coronavirus
  REGION 1..8: note = Table A: HLA-B*18:01H HLA-C*07:01H HLA-C*12:03H HLA-A*34:01H HLA-B*35:01M HLA-B*51:01H HLA-B*35:07H HLA-B*38:02H HLA-B*15:02H HLA-B*07:05H
  source 1..8: note = Severe acute respiratory syndrome coronavirus 2
DAGFIKQY

SEQ ID NO: 6353 - protein, 8 aa, Severe acute respiratory syndrome-related coronavirus
  REGION 1..8: note = Table A: HLA-B*40:02H HLA-B*41:02H
  source 1..8: note = Severe acute respiratory syndrome coronavirus 2
GDIAARDL

SEQ ID NO: 6354 - protein, 8 aa, Severe acute respiratory syndrome-related coronavirus
  REGION 1..8: note = Table A: HLA-C*15:05H HLA-B*35:01H
  source 1..8: note = Severe acute respiratory syndrome coronavirus 2
PPLLTDEM

SEQ ID NO: 6355 - protein, 8 aa, Severe acute respiratory syndrome-related coronavirus
  REGION 1..8: note = Table A: HLA-B*18:01H
  source 1..8: note = Severe acute respiratory syndrome coronavirus 2
TDEMIAQY

SEQ ID NO: 6356 - protein, 8 aa, Severe acute respiratory syndrome-related coronavirus
  REGION 1..8: note = Table A: HLA-B*18:01H HLA-B*07:05H
  source 1..8: note = Severe acute respiratory syndrome coronavirus 2
DEMIAQYT

SEQ ID NO: 6357 - protein, 8 aa, Severe acute respiratory syndrome-related coronavirus
  REGION 1..8: note = Table A: HLA-C*03:03H HLA-C*03:04H HLA-C*15:05H
  source 1..8: note = Severe acute respiratory syndrome coronavirus 2
IAQYTSAL

SEQ ID NO: 6358 - protein, 8 aa, Severe acute respiratory syndrome-related coronavirus
  REGION 1..8: note = Table A: HLA-B*48:01H HLA-B*52:01M HLA-B*38:02H HLA-B*15:01H HLA-B*15:03H HLA-B*13:02H
  source 1..8: note = Severe acute respiratory syndrome coronavirus 2
AQYTSALL

SEQ ID NO: 6359 - protein, 8 aa, Severe acute respiratory syndrome-related coronavirus
  REGION 1..8: note = Table A: HLA-C*15:05H HLA-B*51:01M HLA-B*52:01H
  source 1..8: note = Severe acute respiratory syndrome coronavirus 2
SALLAGTI

SEQ ID NO: 6360 - protein, 8 aa, Severe acute respiratory syndrome-related coronavirus
  REGION 1..8: note = Table A: HLA-B*58:01H
  source 1..8: note = Severe acute respiratory syndrome coronavirus 2
AGTITSGW

SEQ ID NO: 6361 - protein, 8 aa, Severe acute respiratory syndrome-related coronavirus
  REGION 1..8: note = Table A: HLA-B*58:01H
  source 1..8: note = Severe acute respiratory syndrome coronavirus 2
TITSGWTF

SEQ ID NO: 6362 - protein, 8 aa, Severe acute respiratory syndrome-related coronavirus
  REGION 1..8: note = Table A: HLA-C*14:02H HLA-C*14:03H HLA-C*15:05H HLA-C*01:02H HLA-B*39:01H
  source 1..8: note = Severe acute respiratory syndrome coronavirus 2
TFGAGAAL

SEQ ID NO: 6363 - protein, 8 aa, Severe acute respiratory syndrome-related coronavirus
  REGION 1..8: note = Table A: HLA-B*56:01H HLA-B*55:02H HLA-B*55:01H HLA-B*51:01H HLA-B*54:01M
  source 1..8: note = Severe acute respiratory syndrome coronavirus 2
IPFAMQMA

SEQ ID NO: 6364 - protein, 8 aa, Severe acute respiratory syndrome-related coronavirus
  REGION 1..8: note = Table A: HLA-A*33:03H HLA-A*66:01H
  source 1..8: note = Severe acute respiratory syndrome coronavirus 2
FAMQMAYR

SEQ ID NO: 6365 - protein, 8 aa, Severe acute respiratory syndrome-related coronavirus
  REGION 1..8: note = Table A: HLA-B*51:01M HLA-B*52:01H HLA-B*38:02H
  source 1..8: note = Severe acute respiratory syndrome coronavirus 2
MAYRFNGI

SEQ ID NO: 6366 - protein, 8 aa, Severe acute respiratory syndrome-related coronavirus
  REGION 1..8: note = Table A: HLA-C*06:02H HLA-B*14:01H
  source 1..8: note = Severe acute respiratory syndrome coronavirus 2
YRFNGIGV

SEQ ID NO: 6367 - protein, 8 aa, Severe acute respiratory syndrome-related coronavirus
  REGION 1..8: note = Table A: HLA-A*02:11H HLA-B*14:01H HLA-A*02:02H HLA-B*38:02H
  source 1..8: note = Severe acute respiratory syndrome coronavirus 2
VLYENQKL

SEQ ID NO: 6368 - protein, 8 aa, Severe acute respiratory syndrome-related coronavirus
  REGION 1..8: note = Table A: HLA-B*45:01H HLA-B*50:01H
  source 1..8: note = Severe acute respiratory syndrome coronavirus 2
YENQKLIA

SEQ ID NO: 6369 - protein, 8 aa, Severe acute respiratory syndrome-related coronavirus
  REGION 1..8: note = Table A: HLA-B*15:03H
  source 1..8: note = Severe acute respiratory syndrome coronavirus 2
QKLIANQF

SEQ ID NO: 6370 - protein, 8 aa, Severe acute respiratory syndrome-related coronavirus
  REGION 1..8: note = Table A: HLA-B*39:01H
  source 1..8: note = Severe acute respiratory syndrome coronavirus 2
NQFNSAIG

SEQ ID NO: 6371 - protein, 8 aa, Severe acute respiratory syndrome-related coronavirus
  REGION 1..8: note = Table A: HLA-B*08:01H HLA-C*08:03H HLA-B*41:02H
  source 1..8: note = Severe acute respiratory syndrome coronavirus 2
IGKIQDSL

SEQ ID NO: 6372 - protein, 8 aa, Severe acute respiratory syndrome-related coronavirus
  REGION 1..8: note = Table A: HLA-C*15:05H
  source 1..8: note = Severe acute respiratory syndrome coronavirus 2
LSSTASAL

SEQ ID NO: 6373 - protein, 8 aa, Severe acute respiratory syndrome-related coronavirus
  REGION 1..8: note = Table A: HLA-C*15:05M
  source 1..8: note = Severe acute respiratory syndrome coronavirus 2
TASALGKL

SEQ ID NO: 6374 - protein, 8 aa, Severe acute respiratory syndrome-related coronavirus
  REGION 1..8: note = Table A: HLA-A*02:01H HLA-A*02:02H HLA-A*02:03H
  source 1..8: note = Severe acute respiratory syndrome coronavirus 2
ALGKLQDV

SEQ ID NO: 6375 - protein, 8 aa, Severe acute respiratory syndrome-related coronavirus
  REGION 1..8: note = Table A: HLA-B*52:01H HLA-B*13:02H
  source 1..8: note = Severe acute respiratory syndrome coronavirus 2
AQALNTLV

SEQ ID NO: 6376 - protein, 8 aa, Severe acute respiratory syndrome-related coronavirus
  REGION 1..8: note = Table A: HLA-A*11:01H HLA-A*11:02H HLA-A*36:01H HLA-A*34:02H
  source 1..8: note = Severe acute respiratory syndrome coronavirus 2
QALNTLVK

SEQ ID NO: 6377 - protein, 8 aa, Severe acute respiratory syndrome-related coronavirus
  REGION 1..8: note = Table A: HLA-B*46:01H HLA-C*03:03H HLA-C*03:02H HLA-C*03:04M HLA-C*15:05H HLA-B*14:01H HLA-C*07:27H HLA-B*39:01H HLA-B*15:10H
  source 1..8: note = Severe acute respiratory syndrome coronavirus 2
FGAISSVL

SEQ ID NO: 6378 - protein, 8 aa, Severe acute respiratory syndrome-related coronavirus
  REGION 1..8: note = Table A: HLA-A*74:01H HLA-A*11:02H
  source 1..8: note = Severe acute respiratory syndrome coronavirus 2
VLNDILSR

SEQ ID NO: 6379 - protein, 8 aa, Severe acute respiratory syndrome-related coronavirus
  REGION 1..8: note = Table A: HLA-C*04:03H
  source 1..8: note = Severe acute respiratory syndrome coronavirus 2
LNDILSRL

SEQ ID NO: 6380 - protein, 8 aa, Severe acute respiratory syndrome-related coronavirus
  REGION 1..8: note = Table A: HLA-A*02:02H
  source 1..8: note = Severe acute respiratory syndrome coronavirus 2
ILSRLDKV

SEQ ID NO: 6381 - protein, 8 aa, Severe acute respiratory syndrome-related coronavirus
  REGION 1..8: note = Table A: HLA-B*39:06H
  source 1..8: note = Severe acute respiratory syndrome coronavirus 2
SRLDKVEA

SEQ ID NO: 6382 - protein, 8 aa, Severe acute respiratory syndrome-related coronavirus
  REGION 1..8: note = Table A: HLA-B*41:02H
  source 1..8: note = Severe acute respiratory syndrome coronavirus 2
LDKVEAEV

SEQ ID NO: 6383 - protein, 8 aa, Severe acute respiratory syndrome-related coronavirus
  REGION 1..8: note = Table A: HLA-B*44:05H HLA-B*40:01H HLA-B*40:02M HLA-B*41:02M
  source 1..8: note = Severe acute respiratory syndrome coronavirus 2
AEVQIDRL

SEQ ID NO: 6384 - protein, 8 aa, Severe acute respiratory syndrome-related coronavirus
  REGION 1..8: note = Table A: HLA-B*14:02M HLA-B*14:01M
  source 1..8: note = Severe acute respiratory syndrome coronavirus 2
DRLITGRL

SEQ ID NO: 6385 - protein, 8 aa, Severe acute respiratory syndrome-related coronavirus
  REGION 1..8: note = Table A: HLA-C*03:04H HLA-C*15:05M HLA-C*15:02H HLA-B*57:03H
  source 1..8: note = Severe acute respiratory syndrome coronavirus 2
ITGRLQSL

SEQ ID NO: 6386 - protein, 8 aa, Severe acute respiratory syndrome-related coronavirus
  REGION 1..8: note = Table A: HLA-A*30:02H HLA-B*15:01H
  source 1..8: note = Severe acute respiratory syndrome coronavirus 2
RLQSLQTY

SEQ ID NO: 6387 - protein, 8 aa, Severe acute respiratory syndrome-related coronavirus
  REGION 1..8: note = Table A: HLA-C*15:05H HLA-B*52:01H HLA-C*08:03H
  source 1..8: note = Severe acute respiratory syndrome coronavirus 2
QTYVTQQL

SEQ ID NO: 6388 - protein, 8 aa, Severe acute respiratory syndrome-related coronavirus
  REGION 1..8: note = Table A: HLA-C*06:02H HLA-A*24:02H HLA-A*23:01H
  source 1..8: note = Severe acute respiratory syndrome coronavirus 2
TYVTQQLI

SEQ ID NO: 6389 - protein, 8 aa, Severe acute respiratory syndrome-related coronavirus
  REGION 1..8: note = Table A: HLA-B*39:06H
  source 1..8: note = Severe acute respiratory syndrome coronavirus 2
TQQLIRAA

SEQ ID NO: 6390 - protein, 8 aa, Severe acute respiratory syndrome-related coronavirus
  REGION 1..8: note = Table A: HLA-B*52:01H HLA-B*38:02H HLA-B*13:02H
  source 1..8: note = Severe acute respiratory syndrome coronavirus 2
QLIRAAEI

SEQ ID NO: 6391 - protein, 8 aa, Severe acute respiratory syndrome-related coronavirus
  REGION 1..8: note = Table A: HLA-A*03:02H HLA-A*11:01H
  source 1..8: note = Severe acute respiratory syndrome coronavirus 2
SANLAATK

SEQ ID NO: 6392 - protein, 8 aa, Severe acute respiratory syndrome-related coronavirus
  REGION 1..8: note = Table A: HLA-B*07:05H
  source 1..8: note = Severe acute respiratory syndrome coronavirus 2
ANLAATKM

SEQ ID NO: 6393 - protein, 8 aa, Severe acute respiratory syndrome-related coronavirus
  REGION 1..8: note = Table A: HLA-C*15:05H
  source 1..8: note = Severe acute respiratory syndrome coronavirus 2
APHGVVFL

SEQ ID NO: 6394 - protein, 8 aa, Severe acute respiratory syndrome-related coronavirus
  REGION 1..8: note = Table A: HLA-B*51:01H HLA-B*52:01H
  source 1..8: note = Severe acute respiratory syndrome coronavirus 2
HGVVFLHV

SEQ ID NO: 6395 - protein, 8 aa, Severe acute respiratory syndrome-related coronavirus
  REGION 1..8: note = Table A: HLA-B*46:01H HLA-B*38:02H HLA-B*15:01H HLA-B*15:02M
  source 1..8: note = Severe acute respiratory syndrome coronavirus 2
VVFLHVTY

SEQ ID NO: 6396 - protein, 8 aa, Severe acute respiratory syndrome-related coronavirus
  REGION 1..8: note = Table A: HLA-B*52:01H
  source 1..8: note = Severe acute respiratory syndrome coronavirus 2
VFLHVTYV

SEQ ID NO: 6397 - protein, 8 aa, Severe acute respiratory syndrome-related coronavirus
  REGION 1..8: note = Table A: HLA-B*27:02H
  source 1..8: note = Severe acute respiratory syndrome coronavirus 2
TYVPAQEK

SEQ ID NO: 6398 - protein, 8 aa, Severe acute respiratory syndrome-related coronavirus
  REGION 1..8: note = Table A: HLA-B*45:01M HLA-B*50:01M
  source 1..8: note = Severe acute respiratory syndrome coronavirus 2
QEKNFTTA

SEQ ID NO: 6399 - protein, 8 aa, Severe acute respiratory syndrome-related coronavirus
  REGION 1..8: note = Table A: HLA-B*52:01H HLA-B*07:05H
  source 1..8: note = Severe acute respiratory syndrome coronavirus 2
NFTTAPAI

SEQ ID NO: 6400 - protein, 8 aa, Severe acute respiratory syndrome-related coronavirus
  REGION 1..8: note = Table A: HLA-A*33:01H
  source 1..8: note = Severe acute respiratory syndrome coronavirus 2
DGKAHFPR

SEQ ID NO: 6401 - protein, 8 aa, Severe acute respiratory syndrome-related coronavirus
  REGION 1..8: note = Table A: HLA-B*39:06H
  source 1..8: note = Severe acute respiratory syndrome coronavirus 2
AHFPREGV

SEQ ID NO: 6402 - protein, 8 aa, Severe acute respiratory syndrome-related coronavirus
  REGION 1..8: note = Table A: HLA-C*15:05H HLA-B*55:01H HLA-A*34:01H HLA-B*51:01M HLA-B*38:02H HLA-B*54:01H HLA-B*07:02H HLA-B*07:04H
  source 1..8: note = Severe acute respiratory syndrome coronavirus 2
FPREGVFV

SEQ ID NO: 6403 - protein, 8 aa, Severe acute respiratory syndrome-related coronavirus
  REGION 1..8: note = Table A: HLA-B*53:01H HLA-B*15:13H
  source 1..8: note = Severe acute respiratory syndrome coronavirus 2
FVSNGTHW

SEQ ID NO: 6404 - protein, 8 aa, Severe acute respiratory syndrome-related coronavirus
  REGION 1..8: note = Table A: HLA-B*52:01H
  source 1..8: note = Severe acute respiratory syndrome coronavirus 2
NFYEPQII

SEQ ID NO: 6405 - protein, 8 aa, Severe acute respiratory syndrome-related coronavirus
  REGION 1..8: note = Table A: HLA-B*51:01H
  source 1..8: note = Severe acute respiratory syndrome coronavirus 2
IGIVNNTV

SEQ ID NO: 6406 - protein, 8 aa, Severe acute respiratory syndrome-related coronavirus
  REGION 1..8: note = Table A: HLA-B*40:02H HLA-B*41:02H
  source 1..8: note = Severe acute respiratory syndrome coronavirus 2
YDPLQPEL

SEQ ID NO: 6407 - protein, 8 aa, Severe acute respiratory syndrome-related coronavirus
  REGION 1..8: note = Table A: HLA-B*37:01H
  source 1..8: note = Severe acute respiratory syndrome coronavirus 2
LDSFKEEL

SEQ ID NO: 6408 - protein, 8 aa, Severe acute respiratory syndrome-related coronavirus
  REGION 1..8: note = Table A: HLA-B*35:02H HLA-B*35:12H
  source 1..8: note = Severe acute respiratory syndrome coronavirus 2
HTSPDVDL

SEQ ID NO: 6409 - protein, 8 aa, Severe acute respiratory syndrome-related coronavirus
  REGION 1..8: note = Table A: HLA-C*15:05H
  source 1..8: note = Severe acute respiratory syndrome coronavirus 2
ISGINASV

SEQ ID NO: 6410 - protein, 8 aa, Severe acute respiratory syndrome-related coronavirus
  REGION 1..8: note = Table A: HLA-A*11:01H HLA-A*11:02H
  source 1..8: note = Severe acute respiratory syndrome coronavirus 2
ASVVNIQK

SEQ ID NO: 6411 - protein, 8 aa, Severe acute respiratory syndrome-related coronavirus
  REGION 1..8: note = Table A: HLA-B*58:02H HLA-B*52:01H
  source 1..8: note = Severe acute respiratory syndrome coronavirus 2
VVNIQKEI

SEQ ID NO: 6412 - protein, 8 aa, Severe acute respiratory syndrome-related coronavirus
  REGION 1..8: note = Table A: HLA-A*02:05H HLA-B*52:01H HLA-B*15:01H
  source 1..8: note = Severe acute respiratory syndrome coronavirus 2
IQKEIDRL

SEQ ID NO: 6413 - protein, 8 aa, Severe acute respiratory syndrome-related coronavirus
  REGION 1..8: note = Table A: HLA-A*11:303H HLA-B*46:01H HLA-C*03:02H HLA-A*02:04M HLA-A*02:05H HLA-A*02:01H HLA-A*02:02H HLA-A*02:03H HLA-B*38:02H
  source 1..8: note = Severe acute respiratory syndrome coronavirus 2
SLIDLQEL

SEQ ID NO: 6414 - protein, 8 aa, Severe acute respiratory syndrome-related coronavirus
  REGION 1..8: note = Table A: HLA-A*02:04H
  source 1..8: note = Severe acute respiratory syndrome coronavirus 2
WLGFIAGL

SEQ ID NO: 6415 - protein, 8 aa, Severe acute respiratory syndrome-related coronavirus
  REGION 1..8: note = Table A: HLA-C*15:05H
  source 1..8: note = Severe acute respiratory syndrome coronavirus 2
IAGLIAIV

SEQ ID NO: 6416 - protein, 8 aa, Severe acute respiratory syndrome-related coronavirus
  REGION 1..8: note = Table A: HLA-B*13:02H
  source 1..8: note = Severe acute respiratory syndrome coronavirus 2
GLIAIVMV

SEQ ID NO: 6417 - protein, 8 aa, Severe acute respiratory syndrome-related coronavirus
  REGION 1..8: note = Table A: HLA-B*58:02H HLA-C*15:05H HLA-B*51:01H HLA-B*52:01M HLA-C*08:01H HLA-B*38:02H HLA-B*57:03H
  source 1..8: note = Severe acute respiratory syndrome coronavirus 2
IAIVMVTI

SEQ ID NO: 6418 - protein, 8 aa, Severe acute respiratory syndrome-related coronavirus
  REGION 1..8: note = Table A: HLA-C*15:05H
  source 1..8: note = Severe acute respiratory syndrome coronavirus 2
IVMVTIML

SEQ ID NO: 6419 - protein, 8 aa, Severe acute respiratory syndrome-related coronavirus
  REGION 1..8: note = Table A: HLA-B*35:02H HLA-B*35:12H
  source 1..8: note = Severe acute respiratory syndrome coronavirus 2
EDDSEPVL

SEQ ID NO: 6420 - protein, 8 aa, Severe acute respiratory syndrome-related coronavirus
  REGION 1..8: note = Table A: HLA-B*49:01H
  source 1..8: note = Severe acute respiratory syndrome coronavirus 2
SEPVLKGV

SEQ ID NO: 6421 - protein, 8 aa, Severe acute respiratory syndrome-related coronavirus
  REGION 1..8: note = Table A: HLA-C*15:05H
  source 1..8: note = Severe acute respiratory syndrome coronavirus 2
PVLKGVKL

SEQ ID NO: 6422 - protein, 9 aa, Severe acute respiratory syndrome-related coronavirus
  REGION 1..9: note = Table A: HLA-B*38:02H
  source 1..9: note = Severe acute respiratory syndrome coronavirus 2
VLLPLVSSQ

SEQ ID NO: 6423 - protein, 9 aa, Severe acute respiratory syndrome-related coronavirus
  REGION 1..9: note = Table A: HLA-B*56:01H HLA-B*55:02H HLA-C*15:05M HLA-B*51:01H HLA-B*54:01M HLA-B*07:05H
  source 1..9: note = Severe acute respiratory syndrome coronavirus 2
LPLVSSQCV

SEQ ID NO: 6424 - protein, 9 aa, Severe acute respiratory syndrome-related coronavirus
  REGION 1..9: note = Table A: HLA-A*74:01H HLA-A*31:01H
  source 1..9: note = Severe acute respiratory syndrome coronavirus 2
SQCVNLTTR

SEQ ID NO: 6425 - protein, 9 aa, Severe acute respiratory syndrome-related coronavirus
  REGION 1..9: note = Table A: HLA-B*55:01H
  source 1..9: note = Severe acute respiratory syndrome coronavirus 2
TTRTQLPPA

SEQ ID NO: 6426 - protein, 9 aa, Severe acute respiratory syndrome-related coronavirus
  REGION 1..9: note = Table A: HLA-B*27:05M HLA-C*07:02H HLA-B*27:02M HLA-B*38:02H HLA-B*39:06H HLA-B*39:01M
  source 1..9: note = Severe acute respiratory syndrome coronavirus 2
TRTQLPPAY

SEQ ID NO: 6427 - protein, 9 aa, Severe acute respiratory syndrome-related coronavirus
  REGION 1..9: note = Table A: HLA-B*38:02H HLA-B*39:01H
  source 1..9: note = Severe acute respiratory syndrome coronavirus 2
TQLPPAYTN

SEQ ID NO: 6428 - protein, 9 aa, Severe acute respiratory syndrome-related coronavirus
  REGION 1..9: note = Table A: HLA-C*14:03H HLA-B*53:01M HLA-B*35:03H HLA-C*15:05M HLA-B*35:01M HLA-B*35:02H HLA-B*35:08H HLA-B*51:01H HLA-B*35:07M HLA-B*35:12H HLA-B*38:02H HLA-B*15:02H HLA-B*07:05M HLA-B*15:11H
  source 1..9: note = Severe acute respiratory syndrome coronavirus 2
LPPAYTNSF

SEQ ID NO: 6429 - protein, 9 aa, Severe acute respiratory syndrome-related coronavirus
  REGION 1..9: note = Table A: HLA-A*68:01H HLA-A*34:01H HLA-A*66:01H
  source 1..9: note = Severe acute respiratory syndrome coronavirus 2
PAYTNSFTR

SEQ ID NO: 6430 - protein, 9 aa, Severe acute respiratory syndrome-related coronavirus
  REGION 1..9: note = Table A: HLA-A*02:11H HLA-A*68:02H HLA-C*15:02H HLA-A*02:02H HLA-A*02:03H
  source 1..9: note = Severe acute respiratory syndrome coronavirus 2
YTNSFTRGV

SEQ ID NO: 6431 - protein, 9 aa, Severe acute respiratory syndrome-related coronavirus
  REGION 1..9: note = Table A: HLA-A*30:02H
  source 1..9: note = Severe acute respiratory syndrome coronavirus 2
TNSFTRGVY

SEQ ID NO: 6432 - protein, 9 aa, Severe acute respiratory syndrome-related coronavirus
  REGION 1..9: note = Table A: HLA-C*16:01M HLA-C*12:02H HLA-C*12:03H
  source 1..9: note = Severe acute respiratory syndrome coronavirus 2
NSFTRGVYY

SEQ ID NO: 6433 - protein, 9 aa, Severe acute respiratory syndrome-related coronavirus
  REGION 1..9: note = Table A: HLA-B*38:02H HLA-B*07:04H HLA-B*15:01H HLA-B*15:02M HLA-B*15:03H
  source 1..9: note = Severe acute respiratory syndrome coronavirus 2
GVYYPDKVF

SEQ ID NO: 6434 - protein, 9 aa, Severe acute respiratory syndrome-related coronavirus
  REGION 1..9: note = Table A: HLA-C*14:03H HLA-A*74:01H HLA-A*11:01H HLA-A*11:02H HLA-A*33:01H HLA-A*33:03H HLA-A*29:02H HLA-A*30:02H HLA-A*34:01H HLA-A*34:02H HLA-A*24:07H HLA-A*31:01H HLA-A*66:01H
  source 1..9: note = Severe acute respiratory syndrome coronavirus 2
VYYPDKVFR

SEQ ID NO: 6435 - protein, 9 aa, Severe acute respiratory syndrome-related coronavirus
  REGION 1..9: note = Table A: HLA-B*54:01H
  source 1..9: note = Severe acute respiratory syndrome coronavirus 2
YPDKVFRSS

SEQ ID NO: 6436 - protein, 9 aa, Severe acute respiratory syndrome-related coronavirus
  REGION 1..9: note = Table A: HLA-B*14:02H
  source 1..9: note = Severe acute respiratory syndrome coronavirus 2
DKVFRSSVL

SEQ ID NO: 6437 - protein, 9 aa, Severe acute respiratory syndrome-related coronavirus
  REGION 1..9: note = Table A: HLA-B*39:06H
  source 1..9: note = Severe acute respiratory syndrome coronavirus 2
FRSSVLHST

SEQ ID NO: 6438 - protein, 9 aa, Severe acute respiratory syndrome-related coronavirus
  REGION 1..9: note = Table A: HLA-C*15:05H
  source 1..9: note = Severe acute respiratory syndrome coronavirus 2
SVLHSTQDL

SEQ ID NO: 6439 - protein, 9 aa, Severe acute respiratory syndrome-related coronavirus
  REGION 1..9: note = Table A: HLA-A*24:07H HLA-B*38:02H HLA-B*13:01H
  source 1..9: note = Severe acute respiratory syndrome coronavirus 2
VLHSTQDLF

SEQ ID NO: 6440 - protein, 9 aa, Severe acute respiratory syndrome-related coronavirus
  REGION 1..9: note = Table A: HLA-B*38:01M HLA-B*38:02H HLA-B*15:10H
  source 1..9: note = Severe acute respiratory syndrome coronavirus 2
LHSTQDLFL

SEQ ID NO: 6441 - protein, 9 aa, Severe acute respiratory syndrome-related coronavirus
  REGION 1..9: note = Table A: HLA-C*04:03H HLA-B*38:01H HLA-B*38:02H HLA-B*13:01H
  source 1..9: note = Severe acute respiratory syndrome coronavirus 2
TQDLFLPFF

SEQ ID NO: 6442 - protein, 9 aa, Severe acute respiratory syndrome-related coronavirus
  REGION 1..9: note = Table A: HLA-B*58:01H HLA-B*53:01H HLA-B*35:01H HLA-B*51:01H HLA-B*35:07M HLA-B*38:02H HLA-B*54:01H HLA-B*07:05H
  source 1..9: note = Severe acute respiratory syndrome coronavirus 2
LPFFSNVTW

SEQ ID NO: 6443 - protein, 9 aa, Severe acute respiratory syndrome-related coronavirus
  REGION 1..9: note = Table A: HLA-A*24:07H
  source 1..9: note = Severe acute respiratory syndrome coronavirus 2
PFFSNVTWF

SEQ ID NO: 6444 - protein, 9 aa, Severe acute respiratory syndrome-related coronavirus
  REGION 1..9: note = Table A: HLA-A*29:02H
  source 1..9: note = Severe acute respiratory syndrome coronavirus 2
FFSNVTWFH

SEQ ID NO: 6445 - protein, 9 aa, Severe acute respiratory syndrome-related coronavirus
  REGION 1..9: note = Table A: HLA-C*15:02H HLA-A*02:04H
  source 1..9: note = Severe acute respiratory syndrome coronavirus 2
SNVTWFHAI

SEQ ID NO: 6446 - protein, 9 aa, Severe acute respiratory syndrome-related coronavirus
  REGION 1..9: note = Table A: HLA-B*58:02H HLA-C*04:03H HLA-C*07:01H HLA-A*02:11H HLA-A*68:02M HLA-C*15:02M HLA-A*02:04H HLA-A*02:06H HLA-A*02:07H HLA-A*34:02H HLA-C*08:01H HLA-B*40:06H HLA-B*57:03M HLA-B*13:02H HLA-C*07:04H
  source 1..9: note = Severe acute respiratory syndrome coronavirus 2
VTWFHAIHV

SEQ ID NO: 6447 - protein, 9 aa, Severe acute respiratory syndrome-related coronavirus
  REGION 1..9: note = Table A: HLA-B*38:02M HLA-B*39:06H HLA-B*39:01H HLA-B*15:10H
  source 1..9: note = Severe acute respiratory syndrome coronavirus 2
FHAIHVSGT

SEQ ID NO: 6448 - protein, 9 aa, Severe acute respiratory syndrome-related coronavirus
  REGION 1..9: note = Table A: HLA-B*38:01H HLA-B*38:02H HLA-B*39:06H HLA-B*39:01H
  source 1..9: note = Severe acute respiratory syndrome coronavirus 2
IHVSGTNGT

SEQ ID NO: 6449 - protein, 9 aa, Severe acute respiratory syndrome-related coronavirus
  REGION 1..9: note = Table A: HLA-A*03:02H HLA-A*68:01H HLA-A*34:01H HLA-A*34:02M HLA-A*66:01H
  source 1..9: note = Severe acute respiratory syndrome coronavirus 2
HVSGTNGTK

SEQ ID NO: 6450 - protein, 9 aa, Severe acute respiratory syndrome-related coronavirus
  REGION 1..9: note = Table A: HLA-B*15:03M
  source 1..9: note = Severe acute respiratory syndrome coronavirus 2
TKRFDNPVL

SEQ ID NO: 6451 - protein, 9 aa, Severe acute respiratory syndrome-related coronavirus
  REGION 1..9: note = Table A: HLA-C*06:02H HLA-B*27:05H
  source 1..9: note = Severe acute respiratory syndrome coronavirus 2
KRFDNPVLP

SEQ ID NO: 6452 - protein, 9 aa, Severe acute respiratory syndrome-related coronavirus
  REGION 1..9: note = Table A: HLA-C*04:01H HLA-C*04:03M HLA-A*24:07H
  source 1..9: note = Severe acute respiratory syndrome coronavirus 2
RFDNPVLPF

SEQ ID NO: 6453 - protein, 9 aa, Severe acute respiratory syndrome-related coronavirus
  REGION 1..9: note = Table A: HLA-B*53:01H HLA-B*35:03H HLA-C*15:05H HLA-A*34:01H HLA-B*35:01M HLA-B*35:02H HLA-B*35:08H HLA-B*35:07H HLA-B*35:12H HLA-B*38:02H HLA-B*54:01H HLA-B*15:02H HLA-B*07:05H HLA-B*15:11H
  source 1..9: note = Severe acute respiratory syndrome coronavirus 2
LPFNDGVYF

SEQ ID NO: 6454 - protein, 9 aa, Severe acute respiratory syndrome-related coronavirus
  REGION 1..9: note = Table A: HLA-A*11:303M HLA-A*03:01H HLA-A*03:02H HLA-A*11:01H HLA-A*11:02H HLA-A*36:01H HLA-B*27:02H HLA-A*30:02H HLA-A*68:01H HLA-A*34:01H HLA-A*34:02H HLA-C*07:27M HLA-A*66:01H
  source 1..9: note = Severe acute respiratory syndrome coronavirus 2
GVYFASTEK

SEQ ID NO: 6455 - protein, 9 aa, Severe acute respiratory syndrome-related coronavirus
  REGION 1..9: note = Table A: HLA-A*68:01M HLA-A*34:02H HLA-A*66:01H
  source 1..9: note = Severe acute respiratory syndrome coronavirus 2
STEKSNIIR

SEQ ID NO: 6456 - protein, 9 aa, Severe acute respiratory syndrome-related coronavirus
  REGION 1..9: note = Table A: HLA-B*58:02H
  source 1..9: note = Severe acute respiratory syndrome coronavirus 2
KSNIIRGWI

SEQ ID NO: 6457 - protein, 9 aa, Severe acute respiratory syndrome-related coronavirus
  REGION 1..9: note = Table A: HLA-C*16:01H
  source 1..9: note = Severe acute respiratory syndrome coronavirus 2
SNIIRGWIF

SEQ ID NO: 6458 - protein, 9 aa, Severe acute respiratory syndrome-related coronavirus
  REGION 1..9: note = Table A: HLA-B*48:01H HLA-B*15:03H HLA-B*57:03H
  source 1..9: note = Severe acute respiratory syndrome coronavirus 2
RGWIFGTTL

SEQ ID NO: 6459 - protein, 9 aa, Severe acute respiratory syndrome-related coronavirus
  REGION 1..9: note = Table A: HLA-A*36:01H
  source 1..9: note = Severe acute respiratory syndrome coronavirus 2
IFGTTLDSK

SEQ ID NO: 6460 - protein, 9 aa, Severe acute respiratory syndrome-related coronavirus
  REGION 1..9: note = Table A: HLA-A*11:303M HLA-B*08:01H HLA-A*02:11M HLA-C*15:05H HLA-C*01:02H HLA-A*02:05H HLA-A*02:07H HLA-B*14:01M HLA-A*02:01M HLA-A*02:02H HLA-A*02:03H HLA-C*08:01H HLA-C*08:02M HLA-B*38:01H HLA-B*38:02H
  REGION 1..9: note = CONT. FROM ABOVE: HLA-B*07:02H HLA-B*15:02H HLA-B*39:01H HLA- B*07:05H HLA-C*05:01H HLA-B*13:01M
  source 1..9: note = Severe acute respiratory syndrome coronavirus 2
TLDSKTQSL

SEQ ID NO: 6461 - protein, 9 aa, Severe acute respiratory syndrome-related coronavirus
  REGION 1..9: note = Table A: HLA-C*15:05H HLA-B*51:01M
  source 1..9: note = Severe acute respiratory syndrome coronavirus 2
DSKTQSLLI

SEQ ID NO: 6462 - protein, 9 aa, Severe acute respiratory syndrome-related coronavirus
  REGION 1..9: note = Table A: HLA-C*15:05H HLA-A*02:03H HLA-B*38:02H
  source 1..9: note = Severe acute respiratory syndrome coronavirus 2
IVNNATNVV

SEQ ID NO: 6463 - protein, 9 aa, Severe acute respiratory syndrome-related coronavirus
  REGION 1..9: note = Table A: HLA-C*15:05H
  source 1..9: note = Severe acute respiratory syndrome coronavirus 2
VNNATNVVI

SEQ ID NO: 6464 - protein, 9 aa, Severe acute respiratory syndrome-related coronavirus
  REGION 1..9: note = Table A: HLA-A*68:01H HLA-A*34:02H
  source 1..9: note = Severe acute respiratory syndrome coronavirus 2
NNATNVVIK

SEQ ID NO: 6465 - protein, 9 aa, Severe acute respiratory syndrome-related coronavirus
  REGION 1..9: note = Table A: HLA-B*58:01H HLA-A*11:303H HLA-C*16:01M HLA-C*16:04H HLA-C*06:02M HLA-A*29:01H HLA-C*04:03H HLA-C*12:05H HLA-A*02:11M HLA-B*53:01M HLA-C*03:04H HLA-A*68:01M HLA-A*68:02H HLA-B*35:03H HLA-C*15:05M
  REGION 1..9: note = CONT. FROM ABOVE: HLA-C*12:02H HLA-C*12:03H HLA-C*15:02H HLA- A*02:04M HLA-A*02:05H HLA-A*02:06H HLA-A*02:07M HLA-A*02:08H HLA-A*02:01M HLA-A*02:02M HLA-A*02:03H HLA-A*34:02H HLA-B*35 :01M HLA-B*35:02H HLA-B*51:01M HLA-C*17:01M HLA-B*35:07H
  REGION 1..9: note = CONT. FROM ABOVE: HLA-C*08:01M HLA-B*38:02M HLA-B*54:01H HLA- B*07:05H HLA-B*57:03H HLA-C*02:02M HLA-B*13:02H HLA-C*07:04M
  source 1..9: note = Severe acute respiratory syndrome coronavirus 2
NATNVVIKV

SEQ ID NO: 6466 - protein, 9 aa, Severe acute respiratory syndrome-related coronavirus
  REGION 1..9: note = Table A: HLA-A*25:01M HLA-A*26:01H HLA-A*26:02M HLA-B*38:02H HLA-B*15:02H
  source 1..9: note = Severe acute respiratory syndrome coronavirus 2
NVVIKVCEF

SEQ ID NO: 6467 - protein, 9 aa, Severe acute respiratory syndrome-related coronavirus
  REGION 1..9: note = Table A: HLA-B*50:01H
  source 1..9: note = Severe acute respiratory syndrome coronavirus 2
CEFQFCNDP

SEQ ID NO: 6468 - protein, 9 aa, Severe acute respiratory syndrome-related coronavirus
  REGION 1..9: note = Table A: HLA-A*02:05H HLA-B*38:02H
  source 1..9: note = Severe acute respiratory syndrome coronavirus 2
FQFCNDPFL

SEQ ID NO: 6469 - protein, 9 aa, Severe acute respiratory syndrome-related coronavirus
  REGION 1..9: note = Table A: HLA-A*36:01H
  source 1..9: note = Severe acute respiratory syndrome coronavirus 2
CNDPFLGVY

SEQ ID NO: 6470 - protein, 9 aa, Severe acute respiratory syndrome-related coronavirus
  REGION 1..9: note = Table A: HLA-A*33:01H HLA-A*34:01H HLA-A*34:02H HLA-B*35:01H HLA-B*35:07H
  source 1..9: note = Severe acute respiratory syndrome coronavirus 2
DPFLGVYYH

SEQ ID NO: 6471 - protein, 9 aa, Severe acute respiratory syndrome-related coronavirus
  REGION 1..9: note = Table A: HLA-A*03:01M HLA-A*03:02H HLA-A*11:01M HLA-A*11:02M HLA-A*34:02M HLA-C*07:27H
  source 1..9: note = Severe acute respiratory syndrome coronavirus 2
GVYYHKNNK

SEQ ID NO: 6472 - protein, 9 aa, Severe acute respiratory syndrome-related coronavirus
  REGION 1..9: note = Table A: HLA-A*24:07M
  source 1..9: note = Severe acute respiratory syndrome coronavirus 2
YYHKNNKSW

SEQ ID NO: 6473 - protein, 9 aa, Severe acute respiratory syndrome-related coronavirus
  REGION 1..9: note = Table A: HLA-B*15:03H
  source 1..9: note = Severe acute respiratory syndrome coronavirus 2
NKSWMESEF

SEQ ID NO: 6474 - protein, 9 aa, Severe acute respiratory syndrome-related coronavirus
  REGION 1..9: note = Table A: HLA-A*74:01H HLA-A*36:01H
  source 1..9: note = Severe acute respiratory syndrome coronavirus 2
KSWMESEFR

SEQ ID NO: 6475 - protein, 9 aa, Severe acute respiratory syndrome-related coronavirus
  REGION 1..9: note = Table A: HLA-A*02:01H
  source 1..9: note = Severe acute respiratory syndrome coronavirus 2
SWMESEFRV

SEQ ID NO: 6476 - protein, 9 aa, Severe acute respiratory syndrome-related coronavirus
  REGION 1..9: note = Table A: HLA-A*36:01H HLA-B*38:02H HLA-B*15:02M
  source 1..9: note = Severe acute respiratory syndrome coronavirus 2
WMESEFRVY

SEQ ID NO: 6477 - protein, 9 aa, Severe acute respiratory syndrome-related coronavirus
  REGION 1..9: note = Table A: HLA-B*45:01M HLA-B*44:03H HLA-B*18:01H HLA-A*68:02H HLA-B*40:06H HLA-B*49:01H HLA-B*50:01M
  source 1..9: note = Severe acute respiratory syndrome coronavirus 2
MESEFRVYS

SEQ ID NO: 6478 - protein, 9 aa, Severe acute respiratory syndrome-related coronavirus
  REGION 1..9: note = Table A: HLA-B*56:01H HLA-B*45:01H HLA-B*18:01H HLA-B*55:02H HLA-B*39:06H HLA-B*40:02M HLA-B*40:06H HLA-B*54:01H HLA-B*07:05H HLA-B*41:02H HLA-B*49:01H HLA-B*50:01H
  source 1..9: note = Severe acute respiratory syndrome coronavirus 2
SEFRVYSSA

SEQ ID NO: 6479 - protein, 9 aa, Severe acute respiratory syndrome-related coronavirus
  REGION 1..9: note = Table A: HLA-A*02:08H
  source 1..9: note = Severe acute respiratory syndrome coronavirus 2
RVYSSANNC

SEQ ID NO: 6480 - protein, 9 aa, Severe acute respiratory syndrome-related coronavirus
  REGION 1..9: note = Table A: HLA-C*15:05H
  source 1..9: note = Severe acute respiratory syndrome coronavirus 2
YSSANNCTF

SEQ ID NO: 6481 - protein, 9 aa, Severe acute respiratory syndrome-related coronavirus
  REGION 1..9: note = Table A: HLA-B*58:01H HLA-A*11:303H HLA-C*16:01H HLA-C*16:04M HLA-A*11:01H HLA-B*46:01M HLA-A*29:01M HLA-A*29:02H HLA-C*03:02H HLA-A*30:02H HLA-C*15:05H HLA-C*12:02H HLA-C*12:03H HLA-C*07:27H HLA-B*35:01H
  REGION 1..9: note = CONT. FROM ABOVE: HLA-B*35:08H HLA-B*35:07H HLA-B*38:02M HLA- B*15:01H HLA-B*15:02H HLA-B*07:05H HLA-C*02:02H
  source 1..9: note = Severe acute respiratory syndrome coronavirus 2
SANNCTFEY

SEQ ID NO: 6482 - protein, 9 aa, Severe acute respiratory syndrome-related coronavirus
  REGION 1..9: note = Table A: HLA-C*14:03H HLA-A*29:02H HLA-C*04:01H HLA-C*04:03H
  source 1..9: note = Severe acute respiratory syndrome coronavirus 2
TFEYVSQPF

SEQ ID NO: 6483 - protein, 9 aa, Severe acute respiratory syndrome-related coronavirus
  REGION 1..9: note = Table A: HLA-B*40:01M HLA-B*40:02M HLA-B*40:06H HLA-B*41:02H HLA-B*49:01M HLA-B*50:01H
  source 1..9: note = Severe acute respiratory syndrome coronavirus 2
FEYVSQPFL

SEQ ID NO: 6484 - protein, 9 aa, Severe acute respiratory syndrome-related coronavirus
  REGION 1..9: note = Table A: HLA-A*24:02H HLA-A*24:07M HLA-A*23:01H
  source 1..9: note = Severe acute respiratory syndrome coronavirus 2
EYVSQPFLM

SEQ ID NO: 6485 - protein, 9 aa, Severe acute respiratory syndrome-related coronavirus
  REGION 1..9: note = Table A: HLA-C*03:03H HLA-C*03:02H HLA-C*03:04H HLA-C*15:05H HLA-C*15:02M HLA-C*08:01H
  source 1..9: note = Severe acute respiratory syndrome coronavirus 2
VSQPFLMDL

SEQ ID NO: 6486 - protein, 9 aa, Severe acute respiratory syndrome-related coronavirus
  REGION 1..9: note = Table A: HLA-B*54:01H
  source 1..9: note = Severe acute respiratory syndrome coronavirus 2
QPFLMDLEG

SEQ ID NO: 6487 - protein, 9 aa, Severe acute respiratory syndrome-related coronavirus
  REGION 1..9: note = Table A: HLA-A*74:01M HLA-A*31:01H
  source 1..9: note = Severe acute respiratory syndrome coronavirus 2
KQGNFKNLR

SEQ ID NO: 6488 - protein, 9 aa, Severe acute respiratory syndrome-related coronavirus
  REGION 1..9: note = Table A: HLA-B*15:03H
  source 1..9: note = Severe acute respiratory syndrome coronavirus 2
FKNLREFVF

SEQ ID NO: 6489 - protein, 9 aa, Severe acute respiratory syndrome-related coronavirus
  REGION 1..9: note = Table A: HLA-A*36:01H HLA-A*26:01M HLA-A*26:02H HLA-A*29:01H HLA-A*29:02H HLA-A*30:02H HLA-A*34:02H HLA-B*35:01M HLA-B*35:07M HLA-B*38:02M HLA-B*15:01H HLA-B*15:02M
  source 1..9: note = Severe acute respiratory syndrome coronavirus 2
FVFKNIDGY

SEQ ID NO: 6490 - protein, 9 aa, Severe acute respiratory syndrome-related coronavirus
  REGION 1..9: note = Table A: HLA-C*14:02H HLA-C*14:03H HLA-A*29:02H HLA-A*30:02H HLA-A*24:02H HLA-A*24:07M HLA-A*23:01H
  source 1..9: note = Severe acute respiratory syndrome coronavirus 2
VFKNIDGYF

SEQ ID NO: 6491 - protein, 9 aa, Severe acute respiratory syndrome-related coronavirus
  REGION 1..9: note = Table A: HLA-C*15:02H HLA-B*57:03H
  source 1..9: note = Severe acute respiratory syndrome coronavirus 2
KNIDGYFKI

SEQ ID NO: 6492 - protein, 9 aa, Severe acute respiratory syndrome-related coronavirus
  REGION 1..9: note = Table A: HLA-A*36:01H HLA-A*02:07H
  source 1..9: note = Severe acute respiratory syndrome coronavirus 2
NIDGYFKIY

SEQ ID NO: 6493 - protein, 9 aa, Severe acute respiratory syndrome-related coronavirus
  REGION 1..9: note = Table A: HLA-A*33:01H HLA-A*33:03H HLA-A*34:02M
  source 1..9: note = Severe acute respiratory syndrome coronavirus 2
DGYFKIYSK

SEQ ID NO: 6494 - protein, 9 aa, Severe acute respiratory syndrome-related coronavirus
  REGION 1..9: note = Table A: HLA-B*58:02M HLA-C*16:01H HLA-B*08:01H HLA-C*03:04H HLA-A*68:02H HLA-C*12:02H HLA-C*12:03H HLA-C*15:02H HLA-C*17:01M HLA-B*07:04H HLA-B*57:03M HLA-C*02:02H HLA-C*07:04H
  source 1..9: note = Severe acute respiratory syndrome coronavirus 2
YSKHTPINL

SEQ ID NO: 6495 - protein, 9 aa, Severe acute respiratory syndrome-related coronavirus
  REGION 1..9: note = Table A: HLA-B*42:01H HLA-B*53:01H HLA-B*35:03M HLA-C*15:05M HLA-B*35:01H HLA-B*35:07H HLA-B*07:02H HLA-B*07:04M HLA-B*07:05H
  source 1..9: note = Severe acute respiratory syndrome coronavirus 2
TPINLVRDL

SEQ ID NO: 6496 - protein, 9 aa, Severe acute respiratory syndrome-related coronavirus
  REGION 1..9: note = Table A: HLA-B*38:02H HLA-B*15:01H HLA-B*57:03H
  source 1..9: note = Severe acute respiratory syndrome coronavirus 2
LVRDLPQGF

SEQ ID NO: 6497 - protein, 9 aa, Severe acute respiratory syndrome-related coronavirus
  REGION 1..9: note = Table A: HLA-B*40:06H HLA-B*50:01H
  source 1..9: note = Severe acute respiratory syndrome coronavirus 2
RDLPQGFSA

SEQ ID NO: 6498 - protein, 9 aa, Severe acute respiratory syndrome-related coronavirus
  REGION 1..9: note = Table A: HLA-A*25:01M HLA-A*26:01H HLA-A*26:02M HLA-A*26:03H HLA-B*08:01H HLA-A*68:02H HLA-C*01:02M HLA-B*14:01H HLA-A*34:01M HLA-A*34:02H HLA-B*38:02H HLA-B*15:02H HLA-B*07:05H HLA-A*66:01H
  source 1..9: note = Severe acute respiratory syndrome coronavirus 2
DLPQGFSAL

SEQ ID NO: 6499 - protein, 9 aa, Severe acute respiratory syndrome-related coronavirus
  REGION 1..9: note = Table A: HLA-A*11:303H HLA-C*03:03H HLA-C*03:04H HLA-C*17:01H HLA-C*08:01H
  source 1..9: note = Severe acute respiratory syndrome coronavirus 2
SALEPLVDL

SEQ ID NO: 6500 - protein, 9 aa, Severe acute respiratory syndrome-related coronavirus
  REGION 1..9: note = Table A: HLA-A*02:01H HLA-B*13:02H
  source 1..9: note = Severe acute respiratory syndrome coronavirus 2
PLVDLPIGI

SEQ ID NO: 6501 - protein, 9 aa, Severe acute respiratory syndrome-related coronavirus
  REGION 1..9: note = Table A: HLA-A*33:01H HLA-A*33:03H HLA-A*26:03H HLA-A*68:01M HLA-A*34:01H HLA-A*34:02H HLA-A*66:01M
  source 1..9: note = Severe acute respiratory syndrome coronavirus 2
LPIGINITR

SEQ ID NO: 6502 - protein, 9 aa, Severe acute respiratory syndrome-related coronavirus
  REGION 1..9: note = Table A: HLA-C*15:02H
  source 1..9: note = Severe acute respiratory syndrome coronavirus 2
INITRFQTL

SEQ ID NO: 6503 - protein, 9 aa, Severe acute respiratory syndrome-related coronavirus
  REGION 1..9: note = Table A: HLA-C*17:01H
  source 1..9: note = Severe acute respiratory syndrome coronavirus 2
NITRFQTLL

SEQ ID NO: 6504 - protein, 9 aa, Severe acute respiratory syndrome-related coronavirus
  REGION 1..9: note = Table A: HLA-C*06:02H HLA-B*27:05M HLA-C*07:01H HLA-B*27:02H HLA-B*14:02M HLA-B*14:01M HLA-B*38:02M HLA-B*39:01H HLA-B*15:10H
  source 1..9: note = Severe acute respiratory syndrome coronavirus 2
TRFQTLLAL

SEQ ID NO: 6505 - protein, 9 aa, Severe acute respiratory syndrome-related coronavirus
  REGION 1..9: note = Table A: HLA-A*30:02H
  source 1..9: note = Severe acute respiratory syndrome coronavirus 2
RFQTLLALH

SEQ ID NO: 6506 - protein, 9 aa, Severe acute respiratory syndrome-related coronavirus
  REGION 1..9: note = Table A: HLA-A*29:02H HLA-A*30:02H HLA-B*38:02H HLA-B*15:02M
  source 1..9: note = Severe acute respiratory syndrome coronavirus 2
TLLALHRSY

SEQ ID NO: 6507 - protein, 9 aa, Severe acute respiratory syndrome-related coronavirus
  REGION 1..9: note = Table A: HLA-A*02:11H HLA-A*02:02M
  source 1..9: note = Severe acute respiratory syndrome coronavirus 2
LLALHRSYL

SEQ ID NO: 6508 - protein, 9 aa, Severe acute respiratory syndrome-related coronavirus
  REGION 1..9: note = Table A: HLA-B*53:01H HLA-B*15:13H
  source 1..9: note = Severe acute respiratory syndrome coronavirus 2
TPGDSSSGW

SEQ ID NO: 6509 - protein, 9 aa, Severe acute respiratory syndrome-related coronavirus
  REGION 1..9: note = Table A: HLA-B*39:06H
  source 1..9: note = Severe acute respiratory syndrome coronavirus 2
SGWTAGAAA

SEQ ID NO: 6510 - protein, 9 aa, Severe acute respiratory syndrome-related coronavirus
  REGION 1..9: note = Table A: HLA-A*26:01M HLA-A*26:03H HLA-A*29:02M HLA-A*34:02H HLA-B*38:02H HLA-A*66:01H
  source 1..9: note = Severe acute respiratory syndrome coronavirus 2
WTAGAAAYY

SEQ ID NO: 6511 - protein, 9 aa, Severe acute respiratory syndrome-related coronavirus
  REGION 1..9: note = Table A: HLA-B*35:01M HLA-B*35:07H HLA-B*38:02H HLA-B*15:01H
  source 1..9: note = Severe acute respiratory syndrome coronavirus 2
GAAAYYVGY

SEQ ID NO: 6512 - protein, 9 aa, Severe acute respiratory syndrome-related coronavirus
  REGION 1..9: note = Table A: HLA-C*03:04H HLA-C*12:03H HLA-C*17:01M
  source 1..9: note = Severe acute respiratory syndrome coronavirus 2
AAAYYVGYL

SEQ ID NO: 6513 - protein, 9 aa, Severe acute respiratory syndrome-related coronavirus
  REGION 1..9: note = Table A: HLA-A*33:01M HLA-A*33:03H HLA-A*34:01H HLA-A*31:01H HLA-A*66:01H
  source 1..9: note = Severe acute respiratory syndrome coronavirus 2
YYVGYLQPR

SEQ ID NO: 6514 - protein, 9 aa, Severe acute respiratory syndrome-related coronavirus
  REGION 1..9: note = Table A: HLA-B*58:02M HLA-C*16:01H HLA-B*46:01H HLA-C*03:02H HLA-C*15:05H HLA-C*12:02H HLA-C*12:03H HLA-B*51:01H HLA-B*52:01H HLA-B*15:03H
  source 1..9: note = Severe acute respiratory syndrome coronavirus 2
VGYLQPRTF

SEQ ID NO: 6515 - protein, 9 aa, Severe acute respiratory syndrome-related coronavirus
  REGION 1..9: note = Table A: HLA-A*24:07H HLA-A*23:01H
  source 1..9: note = Severe acute respiratory syndrome coronavirus 2
GYLQPRTFL

SEQ ID NO: 6516 - protein, 9 aa, Severe acute respiratory syndrome-related coronavirus
  REGION 1..9: note = Table A: HLA-A*74:01H HLA-B*08:01H HLA-A*02:11M HLA-C*03:02H HLA-C*03:04H HLA-C*15:02H HLA-A*02:04H HLA-A*02:05H HLA-A*02:07H HLA-A*02:01H HLA-A*02:02H HLA-A*02:03H HLA-C*17:01H HLA-A*24:07H HLA-C*08:01H HLA-B*38:02H
  REGION 1..9: note = CONT. FROM ABOVE: HLA-B*40:06H HLA-C*07:04H
  source 1..9: note = Severe acute respiratory syndrome coronavirus 2
YLQPRTFLL

SEQ ID NO: 6517 - protein, 9 aa, Severe acute respiratory syndrome-related coronavirus
  REGION 1..9: note = Table A: HLA-B*35:07H HLA-B*38:02H HLA-B*07:04H
  source 1..9: note = Severe acute respiratory syndrome coronavirus 2
QPRTFLLKY

SEQ ID NO: 6518 - protein, 9 aa, Severe acute respiratory syndrome-related coronavirus
  REGION 1..9: note = Table A: HLA-B*45:01M HLA-B*50:01H
  source 1..9: note = Severe acute respiratory syndrome coronavirus 2
NENGTITDA

SEQ ID NO: 6519 - protein, 9 aa, Severe acute respiratory syndrome-related coronavirus
  REGION 1..9: note = Table A: HLA-A*02:05H HLA-A*02:08H HLA-B*39:01H
  source 1..9: note = Severe acute respiratory syndrome coronavirus 2
TITDAVDCA

SEQ ID NO: 6520 - protein, 9 aa, Severe acute respiratory syndrome-related coronavirus
  REGION 1..9: note = Table A: HLA-C*04:03M HLA-A*02:07H HLA-B*35:02M HLA-C*08:01H HLA-C*08:02M HLA-B*35:12H HLA-B*38:02H HLA-C*05:01H
  source 1..9: note = Severe acute respiratory syndrome coronavirus 2
ITDAVDCAL

SEQ ID NO: 6521 - protein, 9 aa, Severe acute respiratory syndrome-related coronavirus
  REGION 1..9: note = Table A: HLA-A*11:303H HLA-A*03:01H HLA-A*03:02M HLA-A*11:01H HLA-A*11:02H HLA-A*36:01M HLA-B*27:02H HLA-A*02:07H HLA-B*38:02H
  source 1..9: note = Severe acute respiratory syndrome coronavirus 2
ALDPLSETK

SEQ ID NO: 6522 - protein, 9 aa, Severe acute respiratory syndrome-related coronavirus
  REGION 1..9: note = Table A: HLA-A*02:02M
  source 1..9: note = Severe acute respiratory syndrome coronavirus 2
PLSETKCTL

SEQ ID NO: 6523 - protein, 9 aa, Severe acute respiratory syndrome-related coronavirus
  REGION 1..9: note = Table A: HLA-A*25:01H
  source 1..9: note = Severe acute respiratory syndrome coronavirus 2
ETKCTLKSF

SEQ ID NO: 6524 - protein, 9 aa, Severe acute respiratory syndrome-related coronavirus
  REGION 1..9: note = Table A: HLA-A*74:01M HLA-A*03:01M HLA-A*03:02M HLA-A*11:01H HLA-A*11:02H HLA-A*33:01H HLA-A*33:03H HLA-B*46:01H HLA-A*30:01M HLA-A*30:02H HLA-A*68:01H HLA-A*34:01H HLA-A*34:02M HLA-B*38:02H HLA-B*15:02H HLA-A*31:01H
  REGION 1..9: note = CONT. FROM ABOVE: HLA-A*66:01H
  source 1..9: note = Severe acute respiratory syndrome coronavirus 2
TLKSFTVEK

SEQ ID NO: 6525 - protein, 9 aa, Severe acute respiratory syndrome-related coronavirus
  REGION 1..9: note = Table A: HLA-B*58:01H HLA-B*58:02H HLA-A*02:11H HLA-B*57:03M HLA-B*13:02H
  source 1..9: note = Severe acute respiratory syndrome coronavirus 2
KSFTVEKGI

SEQ ID NO: 6526 - protein, 9 aa, Severe acute respiratory syndrome-related coronavirus
  REGION 1..9: note = Table A: HLA-A*34:01H HLA-A*66:01M
  source 1..9: note = Severe acute respiratory syndrome coronavirus 2
FTVEKGIYQ

SEQ ID NO: 6527 - protein, 9 aa, Severe acute respiratory syndrome-related coronavirus
  REGION 1..9: note = Table A: HLA-A*02:05H HLA-A*02:08H HLA-B*39:01H
  source 1..9: note = Severe acute respiratory syndrome coronavirus 2
TVEKGIYQT

SEQ ID NO: 6528 - protein, 9 aa, Severe acute respiratory syndrome-related coronavirus
  REGION 1..9: note = Table A: HLA-B*58:01H HLA-B*58:02H HLA-B*46:01H HLA-A*30:02H HLA-C*15:05H HLA-C*12:02H HLA-A*24:02H HLA-A*23:01H HLA-B*15:01M HLA-B*15:03H HLA-B*57:03M
  source 1..9: note = Severe acute respiratory syndrome coronavirus 2
KGIYQTSNF

SEQ ID NO: 6529 - protein, 9 aa, Severe acute respiratory syndrome-related coronavirus
  REGION 1..9: note = Table A: HLA-A*74:01H HLA-A*03:01H HLA-A*34:01H HLA-A*66:01H
  source 1..9: note = Severe acute respiratory syndrome coronavirus 2
GIYQTSNFR

SEQ ID NO: 6530 - protein, 9 aa, Severe acute respiratory syndrome-related coronavirus
  REGION 1..9: note = Table A: HLA-C*14:03H HLA-A*24:07H
  source 1..9: note = Severe acute respiratory syndrome coronavirus 2
IYQTSNFRV

SEQ ID NO: 6531 - protein, 9 aa, Severe acute respiratory syndrome-related coronavirus
  REGION 1..9: note = Table A: HLA-C*08:03H
  source 1..9: note = Severe acute respiratory syndrome coronavirus 2
TSNFRVQPT

SEQ ID NO: 6532 - protein, 9 aa, Severe acute respiratory syndrome-related coronavirus
  REGION 1..9: note = Table A: HLA-C*06:02H HLA-B*27:05H HLA-C*07:02H HLA-B*27:02M HLA-B*14:02M HLA-B*14:01M HLA-B*38:01M HLA-B*38:02H HLA-B*39:01M HLA-B*15:10H
  source 1..9: note = Severe acute respiratory syndrome coronavirus 2
FRVQPTESI

SEQ ID NO: 6533 - protein, 9 aa, Severe acute respiratory syndrome-related coronavirus
  REGION 1..9: note = Table A: HLA-C*15:05H HLA-B*38:02H HLA-B*13:02H
  source 1..9: note = Severe acute respiratory syndrome coronavirus 2
RVQPTESIV

SEQ ID NO: 6534 - protein, 9 aa, Severe acute respiratory syndrome-related coronavirus
  REGION 1..9: note = Table A: HLA-B*42:01H HLA-B*56:01H HLA-B*27:02H HLA-B*53:01H HLA-B*55:02H HLA-B*35:03M HLA-C*15:05M HLA-B*55:01H HLA-A*34:01H HLA-B*35:01H HLA-B*35:02M HLA-B*35:08M HLA-B*35:07H HLA-B*35:12M HLA-B*38:02H HLA-B*54:01H
  REGION 1..9: note = CONT. FROM ABOVE: HLA-B*07:02H HLA-B*07:04H HLA-B*07:05M HLA- B*57:03H
  source 1..9: note = Severe acute respiratory syndrome coronavirus 2
QPTESIVRF

SEQ ID NO: 6535 - protein, 9 aa, Severe acute respiratory syndrome-related coronavirus
  REGION 1..9: note = Table A: HLA-A*68:02H
  source 1..9: note = Severe acute respiratory syndrome coronavirus 2
ESIVRFPNI

SEQ ID NO: 6536 - protein, 9 aa, Severe acute respiratory syndrome-related coronavirus
  REGION 1..9: note = Table A: HLA-C*06:02H HLA-B*27:05H HLA-C*07:01M HLA-C*07:02M HLA-B*27:02H HLA-B*14:02H HLA-A*02:04H HLA-B*14:01M HLA-C*17:01H HLA-A*23:01H HLA-B*38:02M HLA-B*39:01M HLA-B*15:10H HLA-C*07:04M
  source 1..9: note = Severe acute respiratory syndrome coronavirus 2
VRFPNITNL

SEQ ID NO: 6537 - protein, 9 aa, Severe acute respiratory syndrome-related coronavirus
  REGION 1..9: note = Table A: HLA-B*38:02H HLA-B*15:02M
  source 1..9: note = Severe acute respiratory syndrome coronavirus 2
NLCPFGEVF

SEQ ID NO: 6538 - protein, 9 aa, Severe acute respiratory syndrome-related coronavirus
  REGION 1..9: note = Table A: HLA-B*56:01M HLA-B*55:02M HLA-B*54:01M
  source 1..9: note = Severe acute respiratory syndrome coronavirus 2
CPFGEVFNA

SEQ ID NO: 6539 - protein, 9 aa, Severe acute respiratory syndrome-related coronavirus
  REGION 1..9: note = Table A: HLA-B*44:02H HLA-B*44:05H HLA-B*44:03M HLA-B*40:01H HLA-B*40:02M HLA-B*07:05H HLA-B*41:02H HLA-B*49:01H
  source 1..9: note = Severe acute respiratory syndrome coronavirus 2
GEVFNATRF

SEQ ID NO: 6540 - protein, 9 aa, Severe acute respiratory syndrome-related coronavirus
  REGION 1..9: note = Table A: HLA-A*26:03H HLA-A*68:02H HLA-A*34:01M HLA-A*66:01H
  source 1..9: note = Severe acute respiratory syndrome coronavirus 2
EVFNATRFA

SEQ ID NO: 6541 - protein, 9 aa, Severe acute respiratory syndrome-related coronavirus
  REGION 1..9: note = Table A: HLA-C*16:01H HLA-B*08:01H HLA-C*15:02H HLA-A*02:03H
  source 1..9: note = Severe acute respiratory syndrome coronavirus 2
FNATRFASV

SEQ ID NO: 6542 - protein, 9 aa, Severe acute respiratory syndrome-related coronavirus
  REGION 1..9: note = Table A: HLA-C*16:01H HLA-C*16:04H HLA-B*53:01H HLA-C*03:02H HLA-C*12:02H HLA-C*12:03H HLA-B*35:01H HLA-B*35:07H HLA-B*38:02H HLA-B*15:02M HLA-B*07:05H HLA-C*02:02H
  source 1..9: note = Severe acute respiratory syndrome coronavirus 2
NATRFASVY

SEQ ID NO: 6543 - protein, 9 aa, Severe acute respiratory syndrome-related coronavirus
  REGION 1..9: note = Table A: HLA-B*27:05M HLA-C*07:01H HLA-B*27:02M HLA-B*14:02H HLA-B*38:01H HLA-B*38:02M
  source 1..9: note = Severe acute respiratory syndrome coronavirus 2
TRFASVYAW

SEQ ID NO: 6544 - protein, 9 aa, Severe acute respiratory syndrome-related coronavirus
  REGION 1..9: note = Table A: HLA-A*33:03H HLA-A*68:01H HLA-A*66:01H
  source 1..9: note = Severe acute respiratory syndrome coronavirus 2
FASVYAWNR

SEQ ID NO: 6545 - protein, 9 aa, Severe acute respiratory syndrome-related coronavirus
  REGION 1..9: note = Table A: HLA-A*74:01H HLA-A*11:02H HLA-A*33:01H HLA-A*33:03H HLA-A*34:01M HLA-A*34:02M HLA-A*31:01H HLA-A*66:01M
  source 1..9: note = Severe acute respiratory syndrome coronavirus 2
SVYAWNRKR

SEQ ID NO: 6546 - protein, 9 aa, Severe acute respiratory syndrome-related coronavirus
  REGION 1..9: note = Table A: HLA-A*24:07H
  source 1..9: note = Severe acute respiratory syndrome coronavirus 2
VYAWNRKRI

SEQ ID NO: 6547 - protein, 9 aa, Severe acute respiratory syndrome-related coronavirus
  REGION 1..9: note = Table A: HLA-A*30:02M HLA-B*15:01H
  source 1..9: note = Severe acute respiratory syndrome coronavirus 2
RISNCVADY

SEQ ID NO: 6548 - protein, 9 aa, Severe acute respiratory syndrome-related coronavirus
  REGION 1..9: note = Table A: HLA-A*26:01H HLA-A*29:01M HLA-A*29:02M HLA-A*30:02H HLA-B*35:01H HLA-B*35:07H HLA-B*38:02M HLA-B*15:01H HLA-B*15:02H HLA-B*07:05H
  source 1..9: note = Severe acute respiratory syndrome coronavirus 2
CVADYSVLY

SEQ ID NO: 6549 - protein, 9 aa, Severe acute respiratory syndrome-related coronavirus
  REGION 1..9: note = Table A: HLA-A*11:303H HLA-A*25:01H HLA-B*46:01H HLA-A*26:03H HLA-C*15:05H HLA-A*34:01H HLA-A*34:02H HLA-B*35:01H HLA-B*38:02H HLA-B*15:01M HLA-B*15:02M HLA-B*07:05M HLA-A*66:01H
  source 1..9: note = Severe acute respiratory syndrome coronavirus 2
SVLYNSASF

SEQ ID NO: 6550 - protein, 9 aa, Severe acute respiratory syndrome-related coronavirus
  REGION 1..9: note = Table A: HLA-C*15:05H HLA-B*38:02H HLA-B*07:05H
  source 1..9: note = Severe acute respiratory syndrome coronavirus 2
YNSASFSTF

SEQ ID NO: 6551 - protein, 9 aa, Severe acute respiratory syndrome-related coronavirus
  REGION 1..9: note = Table A: HLA-A*11:01M HLA-A*11:02H HLA-A*33:03H HLA-A*68:01H HLA-A*34:01H HLA-A*34:02H HLA-C*07:27H HLA-A*66:01M
  source 1..9: note = Severe acute respiratory syndrome coronavirus 2
NSASFSTFK

SEQ ID NO: 6552 - protein, 9 aa, Severe acute respiratory syndrome-related coronavirus
  REGION 1..9: note = Table A: HLA-A*30:02M HLA-B*15:01H
  source 1..9: note = Severe acute respiratory syndrome coronavirus 2
ASFSTFKCY

SEQ ID NO: 6553 - protein, 9 aa, Severe acute respiratory syndrome-related coronavirus
  REGION 1..9: note = Table A: HLA-A*31:01H
  source 1..9: note = Severe acute respiratory syndrome coronavirus 2
SFSTFKCYG

SEQ ID NO: 6554 - protein, 9 aa, Severe acute respiratory syndrome-related coronavirus
  REGION 1..9: note = Table A: HLA-A*03:01H
  source 1..9: note = Severe acute respiratory syndrome coronavirus 2
KCYGVSPTK

SEQ ID NO: 6555 - protein, 9 aa, Severe acute respiratory syndrome-related coronavirus
  REGION 1..9: note = Table A: HLA-A*24:02H HLA-A*23:01H
  source 1..9: note = Severe acute respiratory syndrome coronavirus 2
CYGVSPTKL

SEQ ID NO: 6556 - protein, 9 aa, Severe acute respiratory syndrome-related coronavirus
  REGION 1..9: note = Table A: HLA-C*01:02M
  source 1..9: note = Severe acute respiratory syndrome coronavirus 2
VSPTKLNDL

SEQ ID NO: 6557 - protein, 9 aa, Severe acute respiratory syndrome-related coronavirus
  REGION 1..9: note = Table A: HLA-B*18:01M HLA-B*07:05H
  source 1..9: note = Severe acute respiratory syndrome coronavirus 2
NDLCFTNVY

SEQ ID NO: 6558 - protein, 9 aa, Severe acute respiratory syndrome-related coronavirus
  REGION 1..9: note = Table A: HLA-B*58:01H HLA-C*14:03H HLA-C*16:01H HLA-B*46:01H HLA-B*35:01H HLA-B*38:02H
  source 1..9: note = Severe acute respiratory syndrome coronavirus 2
FTNVYADSF

SEQ ID NO: 6559 - protein, 9 aa, Severe acute respiratory syndrome-related coronavirus
  REGION 1..9: note = Table A: HLA-A*68:02H HLA-C*08:01H HLA-B*38:02H
  source 1..9: note = Severe acute respiratory syndrome coronavirus 2
NVYADSFVI

SEQ ID NO: 6560 - protein, 9 aa, Severe acute respiratory syndrome-related coronavirus
  REGION 1..9: note = Table A: HLA-A*74:01H HLA-A*11:01H HLA-A*11:02H HLA-A*33:01M HLA-A*33:03H HLA-A*30:02H HLA-A*68:01H HLA-A*34:01H HLA-A*34:02H HLA-A*23:01H HLA-A*31:01M HLA-A*66:01H
  source 1..9: note = Severe acute respiratory syndrome coronavirus 2
VYADSFVIR

SEQ ID NO: 6561 - protein, 9 aa, Severe acute respiratory syndrome-related coronavirus
  REGION 1..9: note = Table A: HLA-C*04:03M
  source 1..9: note = Severe acute respiratory syndrome coronavirus 2
YADSFVIRG

SEQ ID NO: 6562 - protein, 9 aa, Severe acute respiratory syndrome-related coronavirus
  REGION 1..9: note = Table A: HLA-C*14:02H HLA-C*14:03H HLA-B*38:02H
  source 1..9: note = Severe acute respiratory syndrome coronavirus 2
SFVIRGDEV

SEQ ID NO: 6563 - protein, 9 aa, Severe acute respiratory syndrome-related coronavirus
  REGION 1..9: note = Table A: HLA-A*26:03H HLA-A*68:01H HLA-A*34:01M HLA-A*66:01M
  source 1..9: note = Severe acute respiratory syndrome coronavirus 2
FVIRGDEVR

SEQ ID NO: 6564 - protein, 9 aa, Severe acute respiratory syndrome-related coronavirus
  REGION 1..9: note = Table A: HLA-C*06:02M HLA-B*38:02H
  source 1..9: note = Severe acute respiratory syndrome coronavirus 2
IRGDEVRQI

SEQ ID NO: 6565 - protein, 9 aa, Severe acute respiratory syndrome-related coronavirus
  REGION 1..9: note = Table A: HLA-B*45:01H
  source 1..9: note = Severe acute respiratory syndrome coronavirus 2
GDEVRQIAP

SEQ ID NO: 6566 - protein, 9 aa, Severe acute respiratory syndrome-related coronavirus
  REGION 1..9: note = Table A: HLA-B*15:01H HLA-B*15:03H HLA-B*13:02H
  source 1..9: note = Severe acute respiratory syndrome coronavirus 2
RQIAPGQTG

SEQ ID NO: 6567 - protein, 9 aa, Severe acute respiratory syndrome-related coronavirus
  REGION 1..9: note = Table A: HLA-A*03:01H HLA-A*03:02H HLA-A*34:02H
  source 1..9: note = Severe acute respiratory syndrome coronavirus 2
QIAPGQTGK

SEQ ID NO: 6568 - protein, 9 aa, Severe acute respiratory syndrome-related coronavirus
  REGION 1..9: note = Table A: HLA-C*15:05H HLA-B*51:01H
  source 1..9: note = Severe acute respiratory syndrome coronavirus 2
IAPGQTGKI

SEQ ID NO: 6569 - protein, 9 aa, Severe acute respiratory syndrome-related coronavirus
  REGION 1..9: note = Table A: HLA-B*56:01H HLA-B*55:02H HLA-B*55:01H HLA-B*07:04M
  source 1..9: note = Severe acute respiratory syndrome coronavirus 2
APGQTGKIA

SEQ ID NO: 6570 - protein, 9 aa, Severe acute respiratory syndrome-related coronavirus
  REGION 1..9: note = Table A: HLA-B*27:02H HLA-A*30:02M HLA-B*15:01H HLA-B*15:03M
  source 1..9: note = Severe acute respiratory syndrome coronavirus 2
GQTGKIADY

SEQ ID NO: 6571 - protein, 9 aa, Severe acute respiratory syndrome-related coronavirus
  REGION 1..9: note = Table A: HLA-A*30:02H
  source 1..9: note = Severe acute respiratory syndrome coronavirus 2
TGKIADYNY

SEQ ID NO: 6572 - protein, 9 aa, Severe acute respiratory syndrome-related coronavirus
  REGION 1..9: note = Table A: HLA-B*58:01H HLA-A*74:01H HLA-A*02:11M HLA-A*02:04M HLA-A*02:05H HLA-A*02:06M HLA-A*02:08H HLA-A*02:01M HLA-A*02:02H HLA-A*32:01H HLA-B*57:03M HLA-B*13:01H HLA-B*13:02H
  source 1..9: note = Severe acute respiratory syndrome coronavirus 2
KIADYNYKL

SEQ ID NO: 6573 - protein, 9 aa, Severe acute respiratory syndrome-related coronavirus
  REGION 1..9: note = Table A: HLA-A*02:11H HLA-A*02:05H HLA-A*02:06M HLA-A*02:07M HLA-A*02:08H HLA-A*02:01M HLA-A*02:02H HLA-A*02:03H
  source 1..9: note = Severe acute respiratory syndrome coronavirus 2
KLPDDFTGC

SEQ ID NO: 6574 - protein, 9 aa, Severe acute respiratory syndrome-related coronavirus
  REGION 1..9: note = Table A: HLA-C*15:05M
  source 1..9: note = Severe acute respiratory syndrome coronavirus 2
LPDDFTGCV

SEQ ID NO: 6575 - protein, 9 aa, Severe acute respiratory syndrome-related coronavirus
  REGION 1..9: note = Table A: HLA-A*02:05H HLA-A*02:02M
  source 1..9: note = Severe acute respiratory syndrome coronavirus 2
VIAWNSNNL

SEQ ID NO: 6576 - protein, 9 aa, Severe acute respiratory syndrome-related coronavirus
  REGION 1..9: note = Table A: HLA-A*36:01M HLA-A*30:02H
  source 1..9: note = Severe acute respiratory syndrome coronavirus 2
LDSKVGGNY

SEQ ID NO: 6577 - protein, 9 aa, Severe acute respiratory syndrome-related coronavirus
  REGION 1..9: note = Table A: HLA-B*38:02H HLA-B*15:03H
  source 1..9: note = Severe acute respiratory syndrome coronavirus 2
SKVGGNYNY

SEQ ID NO: 6578 - protein, 9 aa, Severe acute respiratory syndrome-related coronavirus
  REGION 1..9: note = Table A: HLA-A*02:05H HLA-A*02:08H HLA-A*02:02H
  source 1..9: note = Severe acute respiratory syndrome coronavirus 2
KVGGNYNYL

SEQ ID NO: 6579 - protein, 9 aa, Severe acute respiratory syndrome-related coronavirus
  REGION 1..9: note = Table A: HLA-A*29:02H HLA-A*30:02H
  source 1..9: note = Severe acute respiratory syndrome coronavirus 2
VGGNYNYLY

SEQ ID NO: 6580 - protein, 9 aa, Severe acute respiratory syndrome-related coronavirus
  REGION 1..9: note = Table A: HLA-A*31:01H
  source 1..9: note = Severe acute respiratory syndrome coronavirus 2
GGNYNYLYR

SEQ ID NO: 6581 - protein, 9 aa, Severe acute respiratory syndrome-related coronavirus
  REGION 1..9: note = Table A: HLA-A*02:04H
  source 1..9: note = Severe acute respiratory syndrome coronavirus 2
GNYNYLYRL

SEQ ID NO: 6582 - protein, 9 aa, Severe acute respiratory syndrome-related coronavirus
  REGION 1..9: note = Table A: HLA-A*24:02H HLA-A*24:07M HLA-A*23:01H
  source 1..9: note = Severe acute respiratory syndrome coronavirus 2
NYNYLYRLF

SEQ ID NO: 6583 - protein, 9 aa, Severe acute respiratory syndrome-related coronavirus
  REGION 1..9: note = Table A: HLA-A*66:01H
  source 1..9: note = Severe acute respiratory syndrome coronavirus 2
YNYLYRLFR

SEQ ID NO: 6584 - protein, 9 aa, Severe acute respiratory syndrome-related coronavirus
  REGION 1..9: note = Table A: HLA-B*14:02M
  source 1..9: note = Severe acute respiratory syndrome coronavirus 2
YRLFRKSNL

SEQ ID NO: 6585 - protein, 9 aa, Severe acute respiratory syndrome-related coronavirus
  REGION 1..9: note = Table A: HLA-A*74:01H
  source 1..9: note = Severe acute respiratory syndrome coronavirus 2
RLFRKSNLK

SEQ ID NO: 6586 - protein, 9 aa, Severe acute respiratory syndrome-related coronavirus
  REGION 1..9: note = Table A: HLA-A*74:01H HLA-A*36:01H HLA-A*33:03H HLA-A*31:01M
  source 1..9: note = Severe acute respiratory syndrome coronavirus 2
KSNLKPFER

SEQ ID NO: 6587 - protein, 9 aa, Severe acute respiratory syndrome-related coronavirus
  REGION 1..9: note = Table A: HLA-A*02:02H HLA-B*38:02H
  source 1..9: note = Severe acute respiratory syndrome coronavirus 2
NLKPFERDI

SEQ ID NO: 6588 - protein, 9 aa, Severe acute respiratory syndrome-related coronavirus
  REGION 1..9: note = Table A: HLA-B*42:01H HLA-B*56:01M HLA-B*55:02M HLA-C*15:05H HLA-B*14:02H HLA-B*55:01H HLA-B*39:06H HLA-B*54:01H HLA-B*07:02H HLA-B*07:04M
  source 1..9: note = Severe acute respiratory syndrome coronavirus 2
KPFERDIST

SEQ ID NO: 6589 - protein, 9 aa, Severe acute respiratory syndrome-related coronavirus
  REGION 1..9: note = Table A: HLA-B*38:02H HLA-B*40:02H HLA-B*41:02M HLA-B*49:01H HLA-B*50:01H
  source 1..9: note = Severe acute respiratory syndrome coronavirus 2
FERDISTEI

SEQ ID NO: 6590 - protein, 9 aa, Severe acute respiratory syndrome-related coronavirus
  REGION 1..9: note = Table A: HLA-B*39:01H
  source 1..9: note = Severe acute respiratory syndrome coronavirus 2
ERDISTEIY

SEQ ID NO: 6591 - protein, 9 aa, Severe acute respiratory syndrome-related coronavirus
  REGION 1..9: note = Table A: HLA-A*68:02M
  source 1..9: note = Severe acute respiratory syndrome coronavirus 2
DISTEIYQA

SEQ ID NO: 6592 - protein, 9 aa, Severe acute respiratory syndrome-related coronavirus
  REGION 1..9: note = Table A: HLA-C*14:03H
  source 1..9: note = Severe acute respiratory syndrome coronavirus 2
IYQAGSTPC

SEQ ID NO: 6593 - protein, 9 aa, Severe acute respiratory syndrome-related coronavirus
  REGION 1..9: note = Table A: HLA-B*53:01H HLA-B*35:01H
  source 1..9: note = Severe acute respiratory syndrome coronavirus 2
TPCNGVEGF

SEQ ID NO: 6594 - protein, 9 aa, Severe acute respiratory syndrome-related coronavirus
  REGION 1..9: note = Table A: HLA-B*35:01H
  source 1..9: note = Severe acute respiratory syndrome coronavirus 2
NGVEGFNCY

SEQ ID NO: 6595 - protein, 9 aa, Severe acute respiratory syndrome-related coronavirus
  REGION 1..9: note = Table A: HLA-B*46:01H HLA-B*38:02H HLA-B*15:02M
  source 1..9: note = Severe acute respiratory syndrome coronavirus 2
NCYFPLQSY

SEQ ID NO: 6596 - protein, 9 aa, Severe acute respiratory syndrome-related coronavirus
  REGION 1..9: note = Table A: HLA-C*14:02M HLA-C*14:03M HLA-A*29:02H HLA-C*04:03H HLA-A*24:02H HLA-A*24:07H HLA-A*23:01H
  source 1..9: note = Severe acute respiratory syndrome coronavirus 2
YFPLQSYGF

SEQ ID NO: 6597 - protein, 9 aa, Severe acute respiratory syndrome-related coronavirus
  REGION 1..9: note = Table A: HLA-A*02:11H HLA-A*68:02H HLA-A*02:05H HLA-B*14:01H HLA-A*02:03H HLA-B*51:01H HLA-B*52:01H HLA-B*38:02H HLA-B*54:01H HLA-B*13:02H HLA-B*49:01H
  source 1..9: note = Severe acute respiratory syndrome coronavirus 2
YGFQPTNGV

SEQ ID NO: 6598 - protein, 9 aa, Severe acute respiratory syndrome-related coronavirus
  REGION 1..9: note = Table A: HLA-C*14:03H HLA-B*46:01H HLA-A*29:01H HLA-A*30:02H HLA-B*38:02M HLA-B*15:01H HLA-B*15:02M HLA-B*15:03M HLA-B*39:01H
  source 1..9: note = Severe acute respiratory syndrome coronavirus 2
FQPTNGVGY

SEQ ID NO: 6599 - protein, 9 aa, Severe acute respiratory syndrome-related coronavirus
  REGION 1..9: note = Table A: HLA-A*02:11H
  source 1..9: note = Severe acute respiratory syndrome coronavirus 2
GVGYQPYRV

SEQ ID NO: 6600 - protein, 9 aa, Severe acute respiratory syndrome-related coronavirus
  REGION 1..9: note = Table A: HLA-B*51:01H HLA-B*52:01H
  source 1..9: note = Severe acute respiratory syndrome coronavirus 2
VGYQPYRVV

SEQ ID NO: 6601 - protein, 9 aa, Severe acute respiratory syndrome-related coronavirus
  REGION 1..9: note = Table A: HLA-C*14:03H
  source 1..9: note = Severe acute respiratory syndrome coronavirus 2
GYQPYRVVV

SEQ ID NO: 6602 - protein, 9 aa, Severe acute respiratory syndrome-related coronavirus
  REGION 1..9: note = Table A: HLA-C*14:02H HLA-C*14:03H HLA-C*06:02H HLA-B*08:01H HLA-B*14:02H HLA-C*12:03H HLA-C*17:01H HLA-B*38:02H HLA-C*07:04H
  source 1..9: note = Severe acute respiratory syndrome coronavirus 2
YQPYRVVVL

SEQ ID NO: 6603 - protein, 9 aa, Severe acute respiratory syndrome-related coronavirus
  REGION 1..9: note = Table A: HLA-A*24:07M
  source 1..9: note = Severe acute respiratory syndrome coronavirus 2
PYRVVVLSF

SEQ ID NO: 6604 - protein, 9 aa, Severe acute respiratory syndrome-related coronavirus
  REGION 1..9: note = Table A: HLA-A*02:06H HLA-B*40:06H HLA-B*57:03M
  source 1..9: note = Severe acute respiratory syndrome coronavirus 2
RVVVLSFEL

SEQ ID NO: 6605 - protein, 9 aa, Severe acute respiratory syndrome-related coronavirus
  REGION 1..9: note = Table A: HLA-A*02:06H HLA-C*08:01H
  source 1..9: note = Severe acute respiratory syndrome coronavirus 2
VVVLSFELL

SEQ ID NO: 6606 - protein, 9 aa, Severe acute respiratory syndrome-related coronavirus
  REGION 1..9: note = Table A: HLA-A*11:02H HLA-A*34:02H
  source 1..9: note = Severe acute respiratory syndrome coronavirus 2
VVLSFELLH

SEQ ID NO: 6607 - protein, 9 aa, Severe acute respiratory syndrome-related coronavirus
  REGION 1..9: note = Table A: HLA-A*02:02H HLA-A*02:03H
  source 1..9: note = Severe acute respiratory syndrome coronavirus 2
VLSFELLHA

SEQ ID NO: 6608 - protein, 9 aa, Severe acute respiratory syndrome-related coronavirus
  REGION 1..9: note = Table A: HLA-B*45:01H HLA-B*40:02H HLA-B*40:06M HLA-B*41:02H HLA-B*49:01H HLA-B*50:01M
  source 1..9: note = Severe acute respiratory syndrome coronavirus 2
FELLHAPAT

SEQ ID NO: 6609 - protein, 9 aa, Severe acute respiratory syndrome-related coronavirus
  REGION 1..9: note = Table A: HLA-A*26:03H HLA-A*02:11H HLA-A*68:02M HLA-A*02:04H HLA-B*14:01H HLA-A*02:01H HLA-A*02:03M HLA-B*38:02M HLA-B*39:01H HLA-B*13:02H
  source 1..9: note = Severe acute respiratory syndrome coronavirus 2
ELLHAPATV

SEQ ID NO: 6610 - protein, 9 aa, Severe acute respiratory syndrome-related coronavirus
  REGION 1..9: note = Table A: HLA-B*38:02H
  source 1..9: note = Severe acute respiratory syndrome coronavirus 2
LLHAPATVC

SEQ ID NO: 6611 - protein, 9 aa, Severe acute respiratory syndrome-related coronavirus
  REGION 1..9: note = Table A: HLA-B*38:02H HLA-B*39:06H HLA-B*39:01H HLA-B*15:10M
  source 1..9: note = Severe acute respiratory syndrome coronavirus 2
LHAPATVCG

SEQ ID NO: 6612 - protein, 9 aa, Severe acute respiratory syndrome-related coronavirus
  REGION 1..9: note = Table A: HLA-A*34:02H
  source 1..9: note = Severe acute respiratory syndrome coronavirus 2
APATVCGPK

SEQ ID NO: 6613 - protein, 9 aa, Severe acute respiratory syndrome-related coronavirus
  REGION 1..9: note = Table A: HLA-C*15:05H HLA-B*55:01H HLA-B*07:02H HLA-B*07:04M
  source 1..9: note = Severe acute respiratory syndrome coronavirus 2
GPKKSTNLV

SEQ ID NO: 6614 - protein, 9 aa, Severe acute respiratory syndrome-related coronavirus
  REGION 1..9: note = Table A: HLA-A*11:01H HLA-A*30:01H
  source 1..9: note = Severe acute respiratory syndrome coronavirus 2
KSTNLVKNK

SEQ ID NO: 6615 - protein, 9 aa, Severe acute respiratory syndrome-related coronavirus
  REGION 1..9: note = Table A: HLA-C*15:05H
  source 1..9: note = Severe acute respiratory syndrome coronavirus 2
CVNFNFNGL

SEQ ID NO: 6616 - protein, 9 aa, Severe acute respiratory syndrome-related coronavirus
  REGION 1..9: note = Table A: HLA-B*39:01H
  source 1..9: note = Severe acute respiratory syndrome coronavirus 2
NGLTGTGVL

SEQ ID NO: 6617 - protein, 9 aa, Severe acute respiratory syndrome-related coronavirus
  REGION 1..9: note = Table A: HLA-B*45:01M HLA-B*50:01H
  source 1..9: note = Severe acute respiratory syndrome coronavirus 2
TESNKKFLP

SEQ ID NO: 6618 - protein, 9 aa, Severe acute respiratory syndrome-related coronavirus
  REGION 1..9: note = Table A: HLA-A*25:01H HLA-A*34:02H HLA-A*66:01H
  source 1..9: note = Severe acute respiratory syndrome coronavirus 2
ESNKKFLPF

SEQ ID NO: 6619 - protein, 9 aa, Severe acute respiratory syndrome-related coronavirus
  REGION 1..9: note = Table A: HLA-B*15:03H
  source 1..9: note = Severe acute respiratory syndrome coronavirus 2
KKFLPFQQF

SEQ ID NO: 6620 - protein, 9 aa, Severe acute respiratory syndrome-related coronavirus
  REGION 1..9: note = Table A: HLA-B*50:01H
  source 1..9: note = Severe acute respiratory syndrome coronavirus 2
RDIADTTDA

SEQ ID NO: 6621 - protein, 9 aa, Severe acute respiratory syndrome-related coronavirus
  REGION 1..9: note = Table A: HLA-A*26:03H HLA-A*68:02M HLA-A*02:05H HLA-B*14:01H HLA-B*35:02H HLA-B*38:02H HLA-B*39:01M
  source 1..9: note = Severe acute respiratory syndrome coronavirus 2
DIADTTDAV

SEQ ID NO: 6622 - protein, 9 aa, Severe acute respiratory syndrome-related coronavirus
  REGION 1..9: note = Table A: HLA-B*53:01H HLA-A*68:02H HLA-B*35:03M HLA-C*15:05H HLA-A*34:01H HLA-B*35:01H HLA-B*35:02H HLA-B*51:01M HLA-C*08:01H HLA-B*35:12H HLA-B*38:02H HLA-B*39:01H
  source 1..9: note = Severe acute respiratory syndrome coronavirus 2
DAVRDPQTL

SEQ ID NO: 6623 - protein, 9 aa, Severe acute respiratory syndrome-related coronavirus
  REGION 1..9: note = Table A: HLA-C*06:02H HLA-C*07:02H HLA-C*15:05H HLA-C*15:02H HLA-B*14:01H HLA-C*08:01H HLA-B*38:01M HLA-B*38:02H HLA-B*39:01M HLA-B*13:02H
  source 1..9: note = Severe acute respiratory syndrome coronavirus 2
VRDPQTLEI

SEQ ID NO: 6624 - protein, 9 aa, Severe acute respiratory syndrome-related coronavirus
  REGION 1..9: note = Table A: HLA-B*13:02H
  source 1..9: note = Severe acute respiratory syndrome coronavirus 2
PQTLEILDI

SEQ ID NO: 6625 - protein, 9 aa, Severe acute respiratory syndrome-related coronavirus
  REGION 1..9: note = Table A: HLA-B*50:01H
  source 1..9: note = Severe acute respiratory syndrome coronavirus 2
LEILDITPC

SEQ ID NO: 6626 - protein, 9 aa, Severe acute respiratory syndrome-related coronavirus
  REGION 1..9: note = Table A: HLA-C*04:01H HLA-C*04:03M HLA-A*02:07M HLA-C*08:02H HLA-B*38:02M HLA-B*07:05H HLA-C*05:01H HLA-B*13:01H
  source 1..9: note = Severe acute respiratory syndrome coronavirus 2
ILDITPCSF

SEQ ID NO: 6627 - protein, 9 aa, Severe acute respiratory syndrome-related coronavirus
  REGION 1..9: note = Table A: HLA-B*13:02H
  source 1..9: note = Severe acute respiratory syndrome coronavirus 2
GVSVITPGT

SEQ ID NO: 6628 - protein, 9 aa, Severe acute respiratory syndrome-related coronavirus
  REGION 1..9: note = Table A: HLA-A*11:303H HLA-C*15:05H HLA-A*34:01H
  source 1..9: note = Severe acute respiratory syndrome coronavirus 2
SVITPGTNT

SEQ ID NO: 6629 - protein, 9 aa, Severe acute respiratory syndrome-related coronavirus
  REGION 1..9: note = Table A: HLA-A*68:02M HLA-B*35:03H HLA-C*15:05H
  source 1..9: note = Severe acute respiratory syndrome coronavirus 2
NTSNQVAVL

SEQ ID NO: 6630 - protein, 9 aa, Severe acute respiratory syndrome-related coronavirus
  REGION 1..9: note = Table A: HLA-B*58:01H HLA-A*11:01H HLA-A*36:01H HLA-B*57:01H HLA-A*29:01H HLA-A*29:02H HLA-A*30:02M HLA-C*15:05H HLA-B*35:01M HLA-B*35:07H HLA-B*38:02H HLA-B*15:01H HLA-B*07:05M HLA-B*57:03H
  source 1..9: note = Severe acute respiratory syndrome coronavirus 2
TSNQVAVLY

SEQ ID NO: 6631 - protein, 9 aa, Severe acute respiratory syndrome-related coronavirus
  REGION 1..9: note = Table A: HLA-A*68:02M HLA-A*02:05H HLA-B*38:02H HLA-B*13:02H
  source 1..9: note = Severe acute respiratory syndrome coronavirus 2
QVAVLYQDV

SEQ ID NO: 6632 - protein, 9 aa, Severe acute respiratory syndrome-related coronavirus
  REGION 1..9: note = Table A: HLA-B*14:01H HLA-A*02:03H HLA-B*38:02H
  source 1..9: note = Severe acute respiratory syndrome coronavirus 2
VLYQDVNCT

SEQ ID NO: 6633 - protein, 9 aa, Severe acute respiratory syndrome-related coronavirus
  REGION 1..9: note = Table A: HLA-A*02:06H HLA-A*02:07H HLA-A*02:01H HLA-C*08:02H HLA-B*38:02H HLA-B*39:01H HLA-C*05:01H HLA-B*13:02H
  source 1..9: note = Severe acute respiratory syndrome coronavirus 2
YQDVNCTEV

SEQ ID NO: 6634 - protein, 9 aa, Severe acute respiratory syndrome-related coronavirus
  REGION 1..9: note = Table A: HLA-A*68:02H
  source 1..9: note = Severe acute respiratory syndrome coronavirus 2
DVNCTEVPV

SEQ ID NO: 6635 - protein, 9 aa, Severe acute respiratory syndrome-related coronavirus
  REGION 1..9: note = Table A: HLA-B*35:03H HLA-C*08:01H HLA-B*38:02H
  source 1..9: note = Severe acute respiratory syndrome coronavirus 2
NCTEVPVAI

SEQ ID NO: 6636 - protein, 9 aa, Severe acute respiratory syndrome-related coronavirus
  REGION 1..9: note = Table A: HLA-B*44:05H HLA-B*45:01H HLA-B*39:06H HLA-B*40:02M HLA-B*40:06H HLA-B*07:05H HLA-B*41:02H HLA-B*49:01H HLA-B*50:01H
  source 1..9: note = Severe acute respiratory syndrome coronavirus 2
TEVPVAIHA

SEQ ID NO: 6637 - protein, 9 aa, Severe acute respiratory syndrome-related coronavirus
  REGION 1..9: note = Table A: HLA-A*02:05H HLA-A*02:08H
  source 1..9: note = Severe acute respiratory syndrome coronavirus 2
PVAIHADQL

SEQ ID NO: 6638 - protein, 9 aa, Severe acute respiratory syndrome-related coronavirus
  REGION 1..9: note = Table A: HLA-B*58:01H HLA-B*57:01H HLA-C*04:03H HLA-B*53:01H HLA-B*35:03H HLA-B*35:01H HLA-B*35:02M HLA-B*35:08M HLA-B*35:07M HLA-C*08:02H HLA-B*35:12H HLA-B*38:01H HLA-B*38:02M HLA-B*57:03H HLA-B*13:01H
  source 1..9: note = Severe acute respiratory syndrome coronavirus 2
HADQLTPTW

SEQ ID NO: 6639 - protein, 9 aa, Severe acute respiratory syndrome-related coronavirus
  REGION 1..9: note = Table A: HLA-A*68:02H HLA-B*38:02H HLA-B*13:02H
  source 1..9: note = Severe acute respiratory syndrome coronavirus 2
DQLTPTWRV

SEQ ID NO: 6640 - protein, 9 aa, Severe acute respiratory syndrome-related coronavirus
  REGION 1..9: note = Table A: HLA-C*16:01H HLA-B*46:01H HLA-A*30:02H HLA-B*38:02H HLA-B*15:02H
  source 1..9: note = Severe acute respiratory syndrome coronavirus 2
QLTPTWRVY

SEQ ID NO: 6641 - protein, 9 aa, Severe acute respiratory syndrome-related coronavirus
  REGION 1..9: note = Table A: HLA-B*42:01H HLA-B*56:01M HLA-B*08:01H HLA-B*55:02M HLA-B*55:01H HLA-B*54:01H HLA-B*07:02H HLA-B*07:04H
  source 1..9: note = Severe acute respiratory syndrome coronavirus 2
TPTWRVYST

SEQ ID NO: 6642 - protein, 9 aa, Severe acute respiratory syndrome-related coronavirus
  REGION 1..9: note = Table A: HLA-A*02:11H HLA-A*02:08H HLA-B*13:02H
  source 1..9: note = Severe acute respiratory syndrome coronavirus 2
RVYSTGSNV

SEQ ID NO: 6643 - protein, 9 aa, Severe acute respiratory syndrome-related coronavirus
  REGION 1..9: note = Table A: HLA-C*14:02H HLA-C*14:03H HLA-C*07:02H HLA-A*24:02H HLA-A*24:07H HLA-A*23:01M
  source 1..9: note = Severe acute respiratory syndrome coronavirus 2
VYSTGSNVF

SEQ ID NO: 6644 - protein, 9 aa, Severe acute respiratory syndrome-related coronavirus
  REGION 1..9: note = Table A: HLA-A*74:01M HLA-C*16:04H HLA-A*03:02H HLA-A*11:01H HLA-A*11:02H HLA-A*36:01H HLA-B*57:01H HLA-A*33:01M HLA-A*33:03H HLA-C*06:02H HLA-A*26:03H HLA-C*03:03H HLA-B*27:02H HLA-A*30:02H HLA-A*68:01H HLA-A*68:02M
  REGION 1..9: note = CONT. FROM ABOVE: HLA-A*34:01H HLA-A*34:02M HLA-B*35:01H HLA- B*38:02H HLA-A*31:01H HLA-B*13:02H HLA-B*49:01H HLA-A*66:01M
  source 1..9: note = Severe acute respiratory syndrome coronavirus 2
TGSNVFQTR

SEQ ID NO: 6645 - protein, 9 aa, Severe acute respiratory syndrome-related coronavirus
  REGION 1..9: note = Table A: HLA-C*14:02M HLA-C*14:03M
  source 1..9: note = Severe acute respiratory syndrome coronavirus 2
VFQTRAGCL

SEQ ID NO: 6646 - protein, 9 aa, Severe acute respiratory syndrome-related coronavirus
  REGION 1..9: note = Table A: HLA-B*38:02H HLA-B*13:01H HLA-B*13:02M
  source 1..9: note = Severe acute respiratory syndrome coronavirus 2
FQTRAGCLI

SEQ ID NO: 6647 - protein, 9 aa, Severe acute respiratory syndrome-related coronavirus
  REGION 1..9: note = Table A: HLA-B*39:06H
  source 1..9: note = Severe acute respiratory syndrome coronavirus 2
TRAGCLIGA

SEQ ID NO: 6648 - protein, 9 aa, Severe acute respiratory syndrome-related coronavirus
  REGION 1..9: note = Table A: HLA-B*58:01H HLA-A*36:01H HLA-A*01:01H HLA-B*35:01H
  source 1..9: note = Severe acute respiratory syndrome coronavirus 2
GAEHVNNSY

SEQ ID NO: 6649 - protein, 9 aa, Severe acute respiratory syndrome-related coronavirus
  REGION 1..9: note = Table A: HLA-B*38:02M HLA-B*39:06M HLA-B*39:01M HLA-B*15:10H
  source 1..9: note = Severe acute respiratory syndrome coronavirus 2
EHVNNSYEC

SEQ ID NO: 6650 - protein, 9 aa, Severe acute respiratory syndrome-related coronavirus
  REGION 1..9: note = Table A: HLA-B*45:01M HLA-B*39:06M HLA-B*40:06M HLA-B*54:01H HLA-B*50:01M
  source 1..9: note = Severe acute respiratory syndrome coronavirus 2
YECDIPIGA

SEQ ID NO: 6651 - protein, 9 aa, Severe acute respiratory syndrome-related coronavirus
  REGION 1..9: note = Table A: HLA-B*44:05H
  source 1..9: note = Severe acute respiratory syndrome coronavirus 2
CDIPIGAGI

SEQ ID NO: 6652 - protein, 9 aa, Severe acute respiratory syndrome-related coronavirus
  REGION 1..9: note = Table A: HLA-B*56:01H HLA-B*55:02H HLA-C*15:05M HLA-B*55:01M HLA-B*54:01H HLA-B*07:05H
  source 1..9: note = Severe acute respiratory syndrome coronavirus 2
IPIGAGICA

SEQ ID NO: 6653 - protein, 9 aa, Severe acute respiratory syndrome-related coronavirus
  REGION 1..9: note = Table A: HLA-B*46:01H HLA-A*29:02H HLA-A*30:02M HLA-B*35:01H HLA-B*15:01M HLA-B*15:02H HLA-B*07:05H
  source 1..9: note = Severe acute respiratory syndrome coronavirus 2
IGAGICASY

SEQ ID NO: 6654 - protein, 9 aa, Severe acute respiratory syndrome-related coronavirus
  REGION 1..9: note = Table A: HLA-C*14:02H HLA-C*14:03H
  source 1..9: note = Severe acute respiratory syndrome coronavirus 2
SYQTQTNSP

SEQ ID NO: 6655 - protein, 9 aa, Severe acute respiratory syndrome-related coronavirus
  REGION 1..9: note = Table A: HLA-A*74:01M HLA-A*11:01H HLA-A*33:03H HLA-A*26:03M HLA-B*27:02H HLA-A*68:01M HLA-A*34:01H HLA-A*34:02H HLA-A*31:01H HLA-A*66:01M
  source 1..9: note = Severe acute respiratory syndrome coronavirus 2
YQTQTNSPR

SEQ ID NO: 6656 - protein, 9 aa, Severe acute respiratory syndrome-related coronavirus
  REGION 1..9: note = Table A: HLA-A*74:01H HLA-A*11:01H HLA-A*33:03H HLA-A*30:02H HLA-A*68:01H HLA-A*34:02H HLA-C*07:27H HLA-A*66:01H
  source 1..9: note = Severe acute respiratory syndrome coronavirus 2
QTQTNSPRR

SEQ ID NO: 6657 - protein, 9 aa, Severe acute respiratory syndrome-related coronavirus
  REGION 1..9: note = Table A: HLA-A*74:01H HLA-A*33:03H HLA-A*66:01H
  source 1..9: note = Severe acute respiratory syndrome coronavirus 2
QTNSPRRAR

SEQ ID NO: 6658 - protein, 9 aa, Severe acute respiratory syndrome-related coronavirus
  REGION 1..9: note = Table A: HLA-B*55:01H HLA-B*07:02H HLA-B*07:04H
  source 1..9: note = Severe acute respiratory syndrome coronavirus 2
SPRRARSVA

SEQ ID NO: 6659 - protein, 9 aa, Severe acute respiratory syndrome-related coronavirus
  REGION 1..9: note = Table A: HLA-B*38:02H
  source 1..9: note = Severe acute respiratory syndrome coronavirus 2
ARSVASQSI

SEQ ID NO: 6660 - protein, 9 aa, Severe acute respiratory syndrome-related coronavirus
  REGION 1..9: note = Table A: HLA-B*58:01H HLA-B*58:02H HLA-B*57:03H
  source 1..9: note = Severe acute respiratory syndrome coronavirus 2
RSVASQSII

SEQ ID NO: 6661 - protein, 9 aa, Severe acute respiratory syndrome-related coronavirus
  REGION 1..9: note = Table A: HLA-B*58:01H HLA-A*11:303M HLA-C*16:01H HLA-C*16:04H HLA-A*11:01H HLA-A*11:02H HLA-A*36:01H HLA-B*46:01M HLA-A*29:01H HLA-A*29:02H HLA-C*12:05H HLA-B*53:01H HLA-C*03:02M HLA-A*30:02M HLA-C*15:05H
  REGION 1..9: note = CONT. FROM ABOVE: HLA-C*12:02M HLA-C*12:03M HLA-A*34:02H HLA- C*07:27M HLA-B*35:01H HLA-B*35:08M HLA-B*35:07H HLA-B*38:02M HLA-B*15:01H HLA-B*15:02M HLA-B*15:03H HLA-B*39:01H HLA-B*07 :05M HLA-C*02:02M HLA-B*15:11M HLA-C*07:04H
  source 1..9: note = Severe acute respiratory syndrome coronavirus 2
VASQSIIAY

SEQ ID NO: 6662 - protein, 9 aa, Severe acute respiratory syndrome-related coronavirus
  REGION 1..9: note = Table A: HLA-B*48:01H HLA-B*44:05H HLA-C*16:04M HLA-A*30:02H HLA-A*68:02H HLA-A*02:04H HLA-A*02:05M HLA-A*02:06H HLA-A*02:08H HLA-A*02:02M HLA-B*35:01H HLA-B*38:01H HLA-B*38:02M HLA-B*15:01M HLA-B*15:02H HLA-B*39:01H
  REGION 1..9: note = CONT. FROM ABOVE: HLA-B*07:05H HLA-B*13:01M HLA-B*13:02M HLA- C*07:04H
  source 1..9: note = Severe acute respiratory syndrome coronavirus 2
SQSIIAYTM

SEQ ID NO: 6663 - protein, 9 aa, Severe acute respiratory syndrome-related coronavirus
  REGION 1..9: note = Table A: HLA-C*14:03H HLA-A*11:303M HLA-A*11:02H HLA-A*25:01H HLA-B*46:01M HLA-C*03:03M HLA-A*02:11H HLA-C*03:02H HLA-C*03:04M HLA-A*68:02H HLA-B*35:03H HLA-C*15:05M HLA-C*01:02M HLA-C*15:02H HLA-A*02:04M
  REGION 1..9: note = CONT. FROM ABOVE: HLA-A*02:05M HLA-A*02:06H HLA-A*02:07H HLA- A*02:08H HLA-A*02:01H HLA-A*02:02H HLA-A*02:03M HLA-C*07:27H HLA-C*17:01H HLA-C*08:01M HLA-B*38:02H HLA-B*40:06H HLA-B*07 :02H HLA-B*15:01H HLA-B*07:05H HLA-C*07:04H
  source 1..9: note = Severe acute respiratory syndrome coronavirus 2
SIIAYTMSL

SEQ ID NO: 6664 - protein, 9 aa, Severe acute respiratory syndrome-related coronavirus
  REGION 1..9: note = Table A: HLA-B*54:01H
  source 1..9: note = Severe acute respiratory syndrome coronavirus 2
IAYTMSLGA

SEQ ID NO: 6665 - protein, 9 aa, Severe acute respiratory syndrome-related coronavirus
  REGION 1..9: note = Table A: HLA-B*38:02H
  source 1..9: note = Severe acute respiratory syndrome coronavirus 2
MSLGAENSV

SEQ ID NO: 6666 - protein, 9 aa, Severe acute respiratory syndrome-related coronavirus
  REGION 1..9: note = Table A: HLA-A*11:303M HLA-C*16:04H HLA-B*46:01M HLA-B*18:01H HLA-C*03:02H HLA-A*30:02H HLA-C*07:27H HLA-B*35:01H HLA-B*35:08M HLA-B*35:07M HLA-B*38:02M HLA-B*15:01M HLA-B*15:02M HLA-B*15:03M HLA-B*39:01M
  REGION 1..9: note = CONT. FROM ABOVE: HLA-B*07:05H HLA-B*15:11M
  source 1..9: note = Severe acute respiratory syndrome coronavirus 2
LGAENSVAY

SEQ ID NO: 6667 - protein, 9 aa, Severe acute respiratory syndrome-related coronavirus
  REGION 1..9: note = Table A: HLA-C*15:05H HLA-A*02:05H HLA-A*02:08M HLA-A*02:03H HLA-B*38:02M HLA-B*13:02H
  source 1..9: note = Severe acute respiratory syndrome coronavirus 2
SVAYSNNSI

SEQ ID NO: 6668 - protein, 9 aa, Severe acute respiratory syndrome-related coronavirus
  REGION 1..9: note = Table A: HLA-B*58:01M HLA-C*16:04H HLA-B*57:01H HLA-B*46:01H HLA-A*26:01H HLA-A*68:02H HLA-C*15:05M HLA-C*12:02M HLA-C*12:03H HLA-A*24:02H HLA-B*35:01H HLA-C*17:01H HLA-A*23:01H HLA-B*38:02H HLA-B*07:05M HLA-B*57:03M
  REGION 1..9: note = CONT. FROM ABOVE: HLA-C*02:02H
  source 1..9: note = Severe acute respiratory syndrome coronavirus 2
NSIAIPTNF

SEQ ID NO: 6669 - protein, 9 aa, Severe acute respiratory syndrome-related coronavirus
  REGION 1..9: note = Table A: HLA-B*58:01H HLA-B*58:02H HLA-A*11:303H HLA-B*57:01M HLA-C*03:03H HLA-C*12:05H HLA-A*02:11H HLA-B*53:01M HLA-C*03:02H HLA-C*03:04H HLA-A*68:02H HLA-B*35:03H HLA-C*15:05M HLA-C*12:03H HLA-C*15:02H
  REGION 1..9: note = CONT. FROM ABOVE: HLA-A*02:05H HLA-A*02:06H HLA-A*02:02H HLA- B*51:01M HLA-C*08:01M HLA-B*38:02M HLA-B*57:03H HLA-B*13:02H
  source 1..9: note = Severe acute respiratory syndrome coronavirus 2
IAIPTNFTI

SEQ ID NO: 6670 - protein, 9 aa, Severe acute respiratory syndrome-related coronavirus
  REGION 1..9: note = Table A: HLA-B*42:01H HLA-B*56:01H HLA-B*55:02H HLA-A*68:02H HLA-B*35:03H HLA-C*15:05H HLA-B*55:01H HLA-B*35:01H HLA-B*51:01M HLA-B*39:06H HLA-B*54:01H HLA-B*07:02H HLA-B*07:04H HLA-B*07:05M
  source 1..9: note = Severe acute respiratory syndrome coronavirus 2
IPTNFTISV

SEQ ID NO: 6671 - protein, 9 aa, Severe acute respiratory syndrome-related coronavirus
  REGION 1..9: note = Table A: HLA-A*11:303H HLA-C*16:04H HLA-A*25:01H HLA-B*46:01H HLA-C*03:03M HLA-A*02:11H HLA-C*03:02H HLA-C*03:04M HLA-A*68:02H HLA-B*35:03H HLA-C*15:05H HLA-C*12:03H HLA-C*15:02H HLA-A*02:05M HLA-A*02:06H
  REGION 1..9: note = CONT. FROM ABOVE: HLA-A*02:08H HLA-A*02:01H HLA-A*02:02H HLA- A*02:03H HLA-C*17:01H HLA-C*08:01H HLA-B*38:02M HLA-B*57:03H HLA-B*13:02H HLA-A*66:01H
  source 1..9: note = Severe acute respiratory syndrome coronavirus 2
FTISVTTEI

SEQ ID NO: 6672 - protein, 9 aa, Severe acute respiratory syndrome-related coronavirus
  REGION 1..9: note = Table A: HLA-B*35:03H
  source 1..9: note = Severe acute respiratory syndrome coronavirus 2
TISVTTEIL

SEQ ID NO: 6673 - protein, 9 aa, Severe acute respiratory syndrome-related coronavirus
  REGION 1..9: note = Table A: HLA-A*68:02H HLA-A*02:06H HLA-B*38:02H HLA-B*13:02H
  source 1..9: note = Severe acute respiratory syndrome coronavirus 2
SVTTEILPV

SEQ ID NO: 6674 - protein, 9 aa, Severe acute respiratory syndrome-related coronavirus
  REGION 1..9: note = Table A: HLA-C*04:01H HLA-C*04:03M HLA-B*18:01H HLA-B*35:03H HLA-C*15:05H HLA-B*35:01H HLA-B*35:02M HLA-B*35:08H HLA-B*35:12M HLA-B*39:01M HLA-B*07:05H
  source 1..9: note = Severe acute respiratory syndrome coronavirus 2
TTEILPVSM

SEQ ID NO: 6675 - protein, 9 aa, Severe acute respiratory syndrome-related coronavirus
  REGION 1..9: note = Table A: HLA-B*45:01H HLA-B*40:02H HLA-B*40:06H HLA-B*41:02H HLA-B*49:01M HLA-B*50:01H
  source 1..9: note = Severe acute respiratory syndrome coronavirus 2
TEILPVSMT

SEQ ID NO: 6676 - protein, 9 aa, Severe acute respiratory syndrome-related coronavirus
  REGION 1..9: note = Table A: HLA-A*03:01H HLA-A*03:02H HLA-A*11:01H HLA-A*11:02H HLA-A*36:01H HLA-A*33:03H HLA-A*26:03H HLA-A*68:01H HLA-A*34:01H HLA-A*34:02H HLA-A*66:01M
  source 1..9: note = Severe acute respiratory syndrome coronavirus 2
EILPVSMTK

SEQ ID NO: 6677 - protein, 9 aa, Severe acute respiratory syndrome-related coronavirus
  REGION 1..9: note = Table A: HLA-B*38:02H HLA-B*15:03H
  source 1..9: note = Severe acute respiratory syndrome coronavirus 2
TKTSVDCTM

SEQ ID NO: 6678 - protein, 9 aa, Severe acute respiratory syndrome-related coronavirus
  REGION 1..9: note = Table A: HLA-B*58:01H HLA-A*36:01M HLA-A*01:01H HLA-A*30:02H
  source 1..9: note = Severe acute respiratory syndrome coronavirus 2
KTSVDCTMY

SEQ ID NO: 6679 - protein, 9 aa, Severe acute respiratory syndrome-related coronavirus
  REGION 1..9: note = Table A: HLA-A*68:02H HLA-C*15:05H HLA-C*15:02H
  source 1..9: note = Severe acute respiratory syndrome coronavirus 2
TSVDCTMYI

SEQ ID NO: 6680 - protein, 9 aa, Severe acute respiratory syndrome-related coronavirus
  REGION 1..9: note = Table A: HLA-A*26:01H HLA-A*34:02M HLA-B*35:01H HLA-B*38:02H
  source 1..9: note = Severe acute respiratory syndrome coronavirus 2
ECSNLLLQY

SEQ ID NO: 6681 - protein, 9 aa, Severe acute respiratory syndrome-related coronavirus
  REGION 1..9: note = Table A: HLA-A*24:02H
  source 1..9: note = Severe acute respiratory syndrome coronavirus 2
QYGSFCTQL

SEQ ID NO: 6682 - protein, 9 aa, Severe acute respiratory syndrome-related coronavirus
  REGION 1..9: note = Table A: HLA-A*03:01H HLA-A*11:01H HLA-A*11:02H
  source 1..9: note = Severe acute respiratory syndrome coronavirus 2
GSFCTQLNR

SEQ ID NO: 6683 - protein, 9 aa, Severe acute respiratory syndrome-related coronavirus
  REGION 1..9: note = Table A: HLA-A*11:303H HLA-C*16:01M HLA-C*03:03H HLA-C*03:02H HLA-C*03:04M
  source 1..9: note = Severe acute respiratory syndrome coronavirus 2
FCTQLNRAL

SEQ ID NO: 6684 - protein, 9 aa, Severe acute respiratory syndrome-related coronavirus
  REGION 1..9: note = Table A: HLA-A*02:11H HLA-A*02:04H HLA-A*02:02M HLA-A*02:03M HLA-B*38:02M HLA-B*13:02H
  source 1..9: note = Severe acute respiratory syndrome coronavirus 2
QLNRALTGI

SEQ ID NO: 6685 - protein, 9 aa, Severe acute respiratory syndrome-related coronavirus
  REGION 1..9: note = Table A: HLA-B*14:02M HLA-B*14:01H HLA-B*38:02H HLA-B*39:06H HLA-B*39:01M HLA-B*15:10H
  source 1..9: note = Severe acute respiratory syndrome coronavirus 2
NRALTGIAV

SEQ ID NO: 6686 - protein, 9 aa, Severe acute respiratory syndrome-related coronavirus
  REGION 1..9: note = Table A: HLA-B*38:02H HLA-B*39:01H HLA-B*13:02H
  source 1..9: note = Severe acute respiratory syndrome coronavirus 2
EQDKNTQEV

SEQ ID NO: 6687 - protein, 9 aa, Severe acute respiratory syndrome-related coronavirus
  REGION 1..9: note = Table A: HLA-B*44:05H HLA-B*37:01H HLA-B*38:02H HLA-B*41:02H
  source 1..9: note = Severe acute respiratory syndrome coronavirus 2
QDKNTQEVF

SEQ ID NO: 6688 - protein, 9 aa, Severe acute respiratory syndrome-related coronavirus
  REGION 1..9: note = Table A: HLA-B*39:06H
  source 1..9: note = Severe acute respiratory syndrome coronavirus 2
DKNTQEVFA

SEQ ID NO: 6689 - protein, 9 aa, Severe acute respiratory syndrome-related coronavirus
  REGION 1..9: note = Table A: HLA-A*11:303H HLA-A*33:03H HLA-A*26:03H HLA-A*02:11M HLA-A*68:01H HLA-A*68:02H HLA-C*15:05H HLA-C*15:02H HLA-A*02:04M HLA-A*02:05M HLA-A*02:06H HLA-A*02:07M HLA-A*02:08H HLA-B*14:01H HLA-A*02:01M
  REGION 1..9: note = CONT. FROM ABOVE: HLA-A*02:03H HLA-C*08:01H HLA-B*38:02H HLA- B*39:01H HLA-B*13:02H
  source 1..9: note = Severe acute respiratory syndrome coronavirus 2
NTQEVFAQV

SEQ ID NO: 6690 - protein, 9 aa, Severe acute respiratory syndrome-related coronavirus
  REGION 1..9: note = Table A: HLA-B*27:02H
  source 1..9: note = Severe acute respiratory syndrome coronavirus 2
TQEVFAQVK

SEQ ID NO: 6691 - protein, 9 aa, Severe acute respiratory syndrome-related coronavirus
  REGION 1..9: note = Table A: HLA-A*25:01M HLA-A*26:01H HLA-A*26:02M HLA-A*26:03M HLA-A*68:01H HLA-A*68:02H HLA-A*02:08H HLA-A*34:01M HLA-A*34:02H HLA-B*51:01H HLA-B*38:02H
  source 1..9: note = Severe acute respiratory syndrome coronavirus 2
EVFAQVKQI

SEQ ID NO: 6692 - protein, 9 aa, Severe acute respiratory syndrome-related coronavirus
  REGION 1..9: note = Table A: HLA-C*14:02H HLA-C*14:03M HLA-C*16:01H HLA-A*29:01M HLA-A*29:02M HLA-A*30:02M HLA-A*24:02H HLA-A*24:07H HLA-A*23:01H HLA-B*15:01H HLA-B*15:02H HLA-B*07:05H
  source 1..9: note = Severe acute respiratory syndrome coronavirus 2
VFAQVKQIY

SEQ ID NO: 6693 - protein, 9 aa, Severe acute respiratory syndrome-related coronavirus
  REGION 1..9: note = Table A: HLA-A*11:02H HLA-A*33:03H HLA-A*34:02M
  source 1..9: note = Severe acute respiratory syndrome coronavirus 2
FAQVKQIYK

SEQ ID NO: 6694 - protein, 9 aa, Severe acute respiratory syndrome-related coronavirus
  REGION 1..9: note = Table A: HLA-A*02:05H HLA-A*02:08H HLA-B*13:02M
  source 1..9: note = Severe acute respiratory syndrome coronavirus 2
AQVKQIYKT

SEQ ID NO: 6695 - protein, 9 aa, Severe acute respiratory syndrome-related coronavirus
  REGION 1..9: note = Table A: HLA-A*74:01H HLA-B*52:01H HLA-B*38:02H HLA-B*15:01H HLA-B*15:03H HLA-B*13:01H HLA-B*13:02H
  source 1..9: note = Severe acute respiratory syndrome coronavirus 2
KQIYKTPPI

SEQ ID NO: 6696 - protein, 9 aa, Severe acute respiratory syndrome-related coronavirus
  REGION 1..9: note = Table A: HLA-A*11:303H HLA-A*74:01H HLA-A*03:01M HLA-A*03:02M HLA-A*11:01M HLA-A*11:02M HLA-A*30:01H HLA-A*34:02M HLA-C*07:27H
  source 1..9: note = Severe acute respiratory syndrome coronavirus 2
QIYKTPPIK

SEQ ID NO: 6697 - protein, 9 aa, Severe acute respiratory syndrome-related coronavirus
  REGION 1..9: note = Table A: HLA-B*15:03M
  source 1..9: note = Severe acute respiratory syndrome coronavirus 2
YKTPPIKDF

SEQ ID NO: 6698 - protein, 9 aa, Severe acute respiratory syndrome-related coronavirus
  REGION 1..9: note = Table A: HLA-A*11:01H HLA-A*11:02H HLA-B*13:02H
  source 1..9: note = Severe acute respiratory syndrome coronavirus 2
SQILPDPSK

SEQ ID NO: 6699 - protein, 9 aa, Severe acute respiratory syndrome-related coronavirus
  REGION 1..9: note = Table A: HLA-B*56:01H HLA-B*53:01H HLA-B*55:01H HLA-A*34:02H HLA-B*54:01H
  source 1..9: note = Severe acute respiratory syndrome coronavirus 2
LPDPSKPSK

SEQ ID NO: 6700 - protein, 9 aa, Severe acute respiratory syndrome-related coronavirus
  REGION 1..9: note = Table A: HLA-B*07:04H
  source 1..9: note = Severe acute respiratory syndrome coronavirus 2
PSKPSKRSF

SEQ ID NO: 6701 - protein, 9 aa, Severe acute respiratory syndrome-related coronavirus
  REGION 1..9: note = Table A: HLA-B*58:01H HLA-B*58:02H HLA-B*57:01H HLA-C*15:02H HLA-B*57:03H HLA-B*13:01H
  source 1..9: note = Severe acute respiratory syndrome coronavirus 2
RSFIEDLLF

SEQ ID NO: 6702 - protein, 9 aa, Severe acute respiratory syndrome-related coronavirus
  REGION 1..9: note = Table A: HLA-B*45:01H HLA-B*18:01H HLA-A*02:07H HLA-B*40:02H HLA-B*07:05H HLA-B*49:01H HLA-B*50:01H
  source 1..9: note = Severe acute respiratory syndrome coronavirus 2
IEDLLFNKV

SEQ ID NO: 6703 - protein, 9 aa, Severe acute respiratory syndrome-related coronavirus
  REGION 1..9: note = Table A: HLA-B*08:01H HLA-B*14:01H HLA-B*38:02H HLA-B*15:02H
  source 1..9: note = Severe acute respiratory syndrome coronavirus 2
DLLFNKVTL

SEQ ID NO: 6704 - protein, 9 aa, Severe acute respiratory syndrome-related coronavirus
  REGION 1..9: note = Table A: HLA-A*02:11M HLA-A*02:04H HLA-A*02:05H HLA-A*02:01H HLA-A*02:02H HLA-A*02:03M HLA-B*38:02H
  source 1..9: note = Severe acute respiratory syndrome coronavirus 2
LLFNKVTLA

SEQ ID NO: 6705 - protein, 9 aa, Severe acute respiratory syndrome-related coronavirus
  REGION 1..9: note = Table A: HLA-B*15:01H HLA-B*57:03H HLA-B*13:01H
  source 1..9: note = Severe acute respiratory syndrome coronavirus 2
KVTLADAGF

SEQ ID NO: 6706 - protein, 9 aa, Severe acute respiratory syndrome-related coronavirus
  REGION 1..9: note = Table A: HLA-A*03:01H HLA-A*03:02H HLA-A*11:01H HLA-A*11:02H HLA-A*36:01H HLA-A*34:01H HLA-A*34:02M
  source 1..9: note = Severe acute respiratory syndrome coronavirus 2
TLADAGFIK

SEQ ID NO: 6707 - protein, 9 aa, Severe acute respiratory syndrome-related coronavirus
  REGION 1..9: note = Table A: HLA-B*44:02M HLA-C*16:04H HLA-C*06:02H HLA-B*44:03M HLA-C*07:01H HLA-A*30:02H HLA-B*07:05H HLA-B*41:02H
  source 1..9: note = Severe acute respiratory syndrome coronavirus 2
ADAGFIKQY

SEQ ID NO: 6708 - protein, 9 aa, Severe acute respiratory syndrome-related coronavirus
  REGION 1..9: note = Table A: HLA-A*33:01H HLA-A*33:03H HLA-A*34:01H
  source 1..9: note = Severe acute respiratory syndrome coronavirus 2
DAGFIKQYG

SEQ ID NO: 6709 - protein, 9 aa, Severe acute respiratory syndrome-related coronavirus
  REGION 1..9: note = Table A: HLA-B*08:01H HLA-A*02:05H HLA-B*38:02H
  source 1..9: note = Severe acute respiratory syndrome coronavirus 2
FIKQYGDCL

SEQ ID NO: 6710 - protein, 9 aa, Severe acute respiratory syndrome-related coronavirus
  REGION 1..9: note = Table A: HLA-A*33:01H HLA-A*33:03M HLA-A*26:03H HLA-A*34:01M HLA-A*34:02H HLA-A*66:01H
  source 1..9: note = Severe acute respiratory syndrome coronavirus 2
DCLGDIAAR

SEQ ID NO: 6711 - protein, 9 aa, Severe acute respiratory syndrome-related coronavirus
  REGION 1..9: note = Table A: HLA-B*41:02H HLA-B*49:01H
  source 1..9: note = Severe acute respiratory syndrome coronavirus 2
GDIAARDLI

SEQ ID NO: 6712 - protein, 9 aa, Severe acute respiratory syndrome-related coronavirus
  REGION 1..9: note = Table A: HLA-A*02:05H HLA-B*54:01H
  source 1..9: note = Severe acute respiratory syndrome coronavirus 2
IAARDLICA

SEQ ID NO: 6713 - protein, 9 aa, Severe acute respiratory syndrome-related coronavirus
  REGION 1..9: note = Table A: HLA-B*37:01H
  source 1..9: note = Severe acute respiratory syndrome coronavirus 2
RDLICAQKF

SEQ ID NO: 6714 - protein, 9 aa, Severe acute respiratory syndrome-related coronavirus
  REGION 1..9: note = Table A: HLA-A*02:03H HLA-B*52:01M HLA-B*38:02H HLA-B*15:01H HLA-B*13:02M
  source 1..9: note = Severe acute respiratory syndrome coronavirus 2
AQKFNGLTV

SEQ ID NO: 6715 - protein, 9 aa, Severe acute respiratory syndrome-related coronavirus
  REGION 1..9: note = Table A: HLA-B*48:01H HLA-B*15:03H
  source 1..9: note = Severe acute respiratory syndrome coronavirus 2
QKFNGLTVL

SEQ ID NO: 6716 - protein, 9 aa, Severe acute respiratory syndrome-related coronavirus
  REGION 1..9: note = Table A: HLA-A*02:04M HLA-A*02:01H HLA-A*02:02H HLA-B*40:06H HLA-B*13:02H
  source 1..9: note = Severe acute respiratory syndrome coronavirus 2
GLTVLPPLL

SEQ ID NO: 6717 - protein, 9 aa, Severe acute respiratory syndrome-related coronavirus
  REGION 1..9: note = Table A: HLA-B*35:03H HLA-C*15:05H HLA-B*35:01H HLA-B*35:02H HLA-B*35:08H HLA-B*35:07H HLA-B*35:12M HLA-B*07:05M
  source 1..9: note = Severe acute respiratory syndrome coronavirus 2
LPPLLTDEM

SEQ ID NO: 6718 - protein, 9 aa, Severe acute respiratory syndrome-related coronavirus
  REGION 1..9: note = Table A: HLA-B*58:01H HLA-A*36:01H HLA-A*29:01H HLA-A*29:02H HLA-A*01:01H HLA-C*04:03H HLA-A*30:02H HLA-B*35:01H HLA-B*35:08H HLA-B*38:02H HLA-B*39:01H HLA-B*07:05H
  source 1..9: note = Severe acute respiratory syndrome coronavirus 2
LTDEMIAQY

SEQ ID NO: 6719 - protein, 9 aa, Severe acute respiratory syndrome-related coronavirus
  REGION 1..9: note = Table A: HLA-A*26:03M HLA-A*68:02H HLA-B*38:02H HLA-B*39:06M HLA-B*54:01M HLA-B*39:01H HLA-B*50:01H
  source 1..9: note = Severe acute respiratory syndrome coronavirus 2
EMIAQYTSA

SEQ ID NO: 6720 - protein, 9 aa, Severe acute respiratory syndrome-related coronavirus
  REGION 1..9: note = Table A: HLA-A*11:303H HLA-B*46:01H HLA-A*26:03H HLA-B*08:01M HLA-A*68:02H HLA-B*35:03M HLA-C*15:05H HLA-C*01:02H HLA-A*02:05H HLA-A*02:08H HLA-B*14:01H HLA-A*02:02H HLA-A*02:03H HLA-A*34:01H HLA-C*07:27H
  REGION 1..9: note = CONT. FROM ABOVE: HLA-B*35:01H HLA-B*35:02H HLA-B*38:02M HLA- B*07:02H HLA-B*15:01H HLA-B*15:02M HLA-B*39:01H HLA-B*07:05H
  source 1..9: note = Severe acute respiratory syndrome coronavirus 2
MIAQYTSAL

SEQ ID NO: 6721 - protein, 9 aa, Severe acute respiratory syndrome-related coronavirus
  REGION 1..9: note = Table A: HLA-A*11:303H HLA-C*03:03H HLA-C*03:04H HLA-C*15:05H HLA-C*17:01H HLA-C*08:01H HLA-B*38:02H
  source 1..9: note = Severe acute respiratory syndrome coronavirus 2
IAQYTSALL

SEQ ID NO: 6722 - protein, 9 aa, Severe acute respiratory syndrome-related coronavirus
  REGION 1..9: note = Table A: HLA-B*38:02H HLA-B*13:02H
  source 1..9: note = Severe acute respiratory syndrome coronavirus 2
AQYTSALLA

SEQ ID NO: 6723 - protein, 9 aa, Severe acute respiratory syndrome-related coronavirus
  REGION 1..9: note = Table A: HLA-A*68:02H
  source 1..9: note = Severe acute respiratory syndrome coronavirus 2
YTSALLAGT

SEQ ID NO: 6724 - protein, 9 aa, Severe acute respiratory syndrome-related coronavirus
  REGION 1..9: note = Table A: HLA-C*15:05H
  source 1..9: note = Severe acute respiratory syndrome coronavirus 2
TSALLAGTI

SEQ ID NO: 6725 - protein, 9 aa, Severe acute respiratory syndrome-related coronavirus
  REGION 1..9: note = Table A: HLA-B*58:01M HLA-B*57:01M HLA-A*25:01H HLA-B*53:01M HLA-B*57:03M
  source 1..9: note = Severe acute respiratory syndrome coronavirus 2
LAGTITSGW

SEQ ID NO: 6726 - protein, 9 aa, Severe acute respiratory syndrome-related coronavirus
  REGION 1..9: note = Table A: HLA-B*58:01H HLA-B*58:02H HLA-A*11:303H HLA-B*57:01M HLA-A*25:01H HLA-B*46:01M HLA-A*26:01H HLA-A*29:02H HLA-C*07:01H HLA-C*03:02H HLA-C*03:04H HLA-A*30:02H HLA-C*15:05H HLA-C*12:02H HLA-A*24:07H
  REGION 1..9: note = CONT. FROM ABOVE: HLA-A*23:01H HLA-B*38:02H HLA-A*32:01H HLA- B*15:01M HLA-B*15:03H HLA-B*39:01H HLA-B*07:05H HLA-B*57:03H HLA-C*02:02H
  source 1..9: note = Severe acute respiratory syndrome coronavirus 2
GTITSGWTF

SEQ ID NO: 6727 - protein, 9 aa, Severe acute respiratory syndrome-related coronavirus
  REGION 1..9: note = Table A: HLA-B*39:06H
  source 1..9: note = Severe acute respiratory syndrome coronavirus 2
SGWTFGAGA

SEQ ID NO: 6728 - protein, 9 aa, Severe acute respiratory syndrome-related coronavirus
  REGION 1..9: note = Table A: HLA-A*26:03H HLA-C*03:03H HLA-C*03:04H HLA-A*68:02H HLA-C*15:05H HLA-B*38:02H HLA-A*66:01H
  source 1..9: note = Severe acute respiratory syndrome coronavirus 2
WTFGAGAAL

SEQ ID NO: 6729 - protein, 9 aa, Severe acute respiratory syndrome-related coronavirus
  REGION 1..9: note = Table A: HLA-C*16:04H HLA-C*12:05H HLA-B*35:03H HLA-C*15:05H HLA-B*35:01H HLA-B*38:02H HLA-B*07:05H
  source 1..9: note = Severe acute respiratory syndrome coronavirus 2
AALQIPFAM

SEQ ID NO: 6730 - protein, 9 aa, Severe acute respiratory syndrome-related coronavirus
  REGION 1..9: note = Table A: HLA-A*11:303H HLA-B*46:01H HLA-C*03:02H HLA-C*15:05H HLA-C*12:03H HLA-A*02:04H HLA-A*02:05H HLA-C*08:01H HLA-B*38:02H HLA-B*15:01M HLA-B*15:02H HLA-B*15:03H HLA-B*13:02H
  source 1..9: note = Severe acute respiratory syndrome coronavirus 2
LQIPFAMQM

SEQ ID NO: 6731 - protein, 9 aa, Severe acute respiratory syndrome-related coronavirus
  REGION 1..9: note = Table A: HLA-A*29:02H HLA-B*18:01H HLA-B*53:01H HLA-C*15:05H HLA-B*35:01H HLA-B*35:08H HLA-B*35:07H HLA-B*38:02M HLA-B*54:01H HLA-B*15:02M HLA-B*15:03H HLA-B*07:05M HLA-B*15:11H
  source 1..9: note = Severe acute respiratory syndrome coronavirus 2
IPFAMQMAY

SEQ ID NO: 6732 - protein, 9 aa, Severe acute respiratory syndrome-related coronavirus
  REGION 1..9: note = Table A: HLA-B*53:01H HLA-B*35:07H HLA-B*57:03H
  source 1..9: note = Severe acute respiratory syndrome coronavirus 2
FAMQMAYRF

SEQ ID NO: 6733 - protein, 9 aa, Severe acute respiratory syndrome-related coronavirus
  REGION 1..9: note = Table A: HLA-A*30:01H
  source 1..9: note = Severe acute respiratory syndrome coronavirus 2
AYRFNGIGV

SEQ ID NO: 6734 - protein, 9 aa, Severe acute respiratory syndrome-related coronavirus
  REGION 1..9: note = Table A: HLA-C*06:02H HLA-B*39:01H
  source 1..9: note = Severe acute respiratory syndrome coronavirus 2
YRFNGIGVT

SEQ ID NO: 6735 - protein, 9 aa, Severe acute respiratory syndrome-related coronavirus
  REGION 1..9: note = Table A: HLA-C*12:05H HLA-A*02:11H HLA-A*68:02M HLA-C*15:05H HLA-A*02:05M HLA-A*02:06H HLA-A*02:03H HLA-B*51:01H HLA-C*08:01H HLA-B*38:02H HLA-B*13:02M
  source 1..9: note = Severe acute respiratory syndrome coronavirus 2
NGIGVTQNV

SEQ ID NO: 6736 - protein, 9 aa, Severe acute respiratory syndrome-related coronavirus
  REGION 1..9: note = Table A: HLA-A*02:11M HLA-A*02:04H HLA-A*02:01H HLA-A*02:02M HLA-A*02:03M HLA-B*51:01H HLA-B*52:01M HLA-B*38:02M HLA-B*13:02H
  source 1..9: note = Severe acute respiratory syndrome coronavirus 2
VLYENQKLI

SEQ ID NO: 6737 - protein, 9 aa, Severe acute respiratory syndrome-related coronavirus
  REGION 1..9: note = Table A: HLA-B*50:01H
  source 1..9: note = Severe acute respiratory syndrome coronavirus 2
YENQKLIAN

SEQ ID NO: 6738 - protein, 9 aa, Severe acute respiratory syndrome-related coronavirus
  REGION 1..9: note = Table A: HLA-B*46:01H HLA-B*08:01H HLA-B*18:01H HLA-C*12:02H HLA-A*24:02H HLA-B*38:02M HLA-B*15:01H HLA-B*15:02H HLA-B*15:03M HLA-B*07:05H HLA-C*02:02H
  source 1..9: note = Severe acute respiratory syndrome coronavirus 2
NQKLIANQF

SEQ ID NO: 6739 - protein, 9 aa, Severe acute respiratory syndrome-related coronavirus
  REGION 1..9: note = Table A: HLA-B*54:01H
  source 1..9: note = Severe acute respiratory syndrome coronavirus 2
LIANQFNSA

SEQ ID NO: 6740 - protein, 9 aa, Severe acute respiratory syndrome-related coronavirus
  REGION 1..9: note = Table A: HLA-C*15:05M HLA-B*51:01M HLA-B*38:02H
  source 1..9: note = Severe acute respiratory syndrome coronavirus 2
IANQFNSAI

SEQ ID NO: 6741 - protein, 9 aa, Severe acute respiratory syndrome-related coronavirus
  REGION 1..9: note = Table A: HLA-A*11:01H HLA-A*11:02H HLA-A*34:02H
  source 1..9: note = Severe acute respiratory syndrome coronavirus 2
NQFNSAIGK

SEQ ID NO: 6742 - protein, 9 aa, Severe acute respiratory syndrome-related coronavirus
  REGION 1..9: note = Table A: HLA-B*48:01H HLA-C*15:05H HLA-A*02:05H HLA-A*02:08H HLA-A*02:02H HLA-B*13:01H
  source 1..9: note = Severe acute respiratory syndrome coronavirus 2
AIGKIQDSL

SEQ ID NO: 6743 - protein, 9 aa, Severe acute respiratory syndrome-related coronavirus
  REGION 1..9: note = Table A: HLA-A*11:303H HLA-C*15:05H HLA-C*01:02H HLA-A*02:04H HLA-A*02:05H HLA-B*14:01H HLA-A*02:01H HLA-A*02:02H HLA-A*02:03M HLA-B*38:02M HLA-B*15:01H HLA-B*15:02H HLA-B*39:01H HLA-B*07:05H
  source 1..9: note = Severe acute respiratory syndrome coronavirus 2
SLSSTASAL

SEQ ID NO: 6744 - protein, 9 aa, Severe acute respiratory syndrome-related coronavirus
  REGION 1..9: note = Table A: HLA-A*11:01H HLA-A*11:02H HLA-A*34:02M HLA-C*07:27H
  source 1..9: note = Severe acute respiratory syndrome coronavirus 2
SSTASALGK

SEQ ID NO: 6745 - protein, 9 aa, Severe acute respiratory syndrome-related coronavirus
  REGION 1..9: note = Table A: HLA-A*11:01H HLA-A*25:01H HLA-A*26:01H HLA-A*26:02M HLA-A*26:03H HLA-A*68:01H HLA-A*68:02H HLA-C*15:05H HLA-A*02:05H HLA-A*02:08H HLA-A*34:01H HLA-A*34:02M HLA-A*66:01H
  source 1..9: note = Severe acute respiratory syndrome coronavirus 2
STASALGKL

SEQ ID NO: 6746 - protein, 9 aa, Severe acute respiratory syndrome-related coronavirus
  REGION 1..9: note = Table A: HLA-A*02:11H HLA-A*02:06H HLA-B*38:02H
  source 1..9: note = Severe acute respiratory syndrome coronavirus 2
SALGKLQDV

SEQ ID NO: 6747 - protein, 9 aa, Severe acute respiratory syndrome-related coronavirus
  REGION 1..9: note = Table A: HLA-A*02:11H HLA-A*02:02M HLA-B*13:02H
  source 1..9: note = Severe acute respiratory syndrome coronavirus 2
ALGKLQDVV

SEQ ID NO: 6748 - protein, 9 aa, Severe acute respiratory syndrome-related coronavirus
  REGION 1..9: note = Table A: HLA-A*02:11H HLA-A*02:01H HLA-A*02:02H
  source 1..9: note = Severe acute respiratory syndrome coronavirus 2
KLQDVVNQN

SEQ ID NO: 6749 - protein, 9 aa, Severe acute respiratory syndrome-related coronavirus
  REGION 1..9: note = Table A: HLA-A*02:11H HLA-A*02:05H HLA-A*02:06H HLA-A*02:07H HLA-A*02:01H HLA-C*08:02H HLA-B*38:02H
  source 1..9: note = Severe acute respiratory syndrome coronavirus 2
LQDVVNQNA

SEQ ID NO: 6750 - protein, 9 aa, Severe acute respiratory syndrome-related coronavirus
  REGION 1..9: note = Table A: HLA-A*26:03H
  source 1..9: note = Severe acute respiratory syndrome coronavirus 2
DVVNQNAQA

SEQ ID NO: 6751 - protein, 9 aa, Severe acute respiratory syndrome-related coronavirus
  REGION 1..9: note = Table A: HLA-A*11:303M HLA-C*16:04H HLA-A*03:02H HLA-B*46:01H HLA-A*26:03H HLA-B*08:01H HLA-C*03:04H HLA-B*35:03H HLA-C*15:05M HLA-C*01:02M HLA-A*02:05M HLA-A*02:08M HLA-B*14:01H HLA-A*02:02H HLA-C*07:27H
  REGION 1..9: note = CONT. FROM ABOVE: HLA-C*08:01H HLA-B*38:02M HLA-B*07:02H HLA- B*15:01M HLA-B*15:02H HLA-B*39:01H HLA-B*07:05M HLA-C*07:04H
  source 1..9: note = Severe acute respiratory syndrome coronavirus 2
VVNQNAQAL

SEQ ID NO: 6752 - protein, 9 aa, Severe acute respiratory syndrome-related coronavirus
  REGION 1..9: note = Table A: HLA-C*15:05H
  source 1..9: note = Severe acute respiratory syndrome coronavirus 2
QNAQALNTL

SEQ ID NO: 6753 - protein, 9 aa, Severe acute respiratory syndrome-related coronavirus
  REGION 1..9: note = Table A: HLA-C*15:05H HLA-B*51:01H
  source 1..9: note = Severe acute respiratory syndrome coronavirus 2
NAQALNTLV

SEQ ID NO: 6754 - protein, 9 aa, Severe acute respiratory syndrome-related coronavirus
  REGION 1..9: note = Table A: HLA-A*03:01H HLA-A*03:02H HLA-A*11:01M HLA-A*11:02M HLA-A*36:01H HLA-C*07:27H HLA-B*13:02H
  source 1..9: note = Severe acute respiratory syndrome coronavirus 2
AQALNTLVK

SEQ ID NO: 6755 - protein, 9 aa, Severe acute respiratory syndrome-related coronavirus
  REGION 1..9: note = Table A: HLA-A*11:303H HLA-B*44:02H HLA-B*44:05H HLA-A*03:01H HLA-C*06:02H HLA-B*08:01H HLA-B*44:03H HLA-C*07:01H HLA-A*02:11H HLA-C*15:05H HLA-C*15:02H HLA-A*02:04H HLA-A*02:05H HLA-A*02:07H HLA-A*02:08M
  REGION 1..9: note = CONT. FROM ABOVE: HLA-B*14:01M HLA-A*02:01M HLA-A*02:02H HLA- A*02:03H HLA-B*38:02M HLA-A*32:01H HLA-B*07:04M HLA-B*15:01H HLA-B*07:05H HLA-B*41:02H HLA-B*13:02H HLA-C*07:04H
  source 1..9: note = Severe acute respiratory syndrome coronavirus 2
ALNTLVKQL

SEQ ID NO: 6756 - protein, 9 aa, Severe acute respiratory syndrome-related coronavirus
  REGION 1..9: note = Table A: HLA-B*38:02H HLA-B*15:01H HLA-B*15:02H HLA-B*57:03H
  source 1..9: note = Severe acute respiratory syndrome coronavirus 2
LVKQLSSNF

SEQ ID NO: 6757 - protein, 9 aa, Severe acute respiratory syndrome-related coronavirus
  REGION 1..9: note = Table A: HLA-B*38:02H
  source 1..9: note = Severe acute respiratory syndrome coronavirus 2
QLSSNFGAI

SEQ ID NO: 6758 - protein, 9 aa, Severe acute respiratory syndrome-related coronavirus
  REGION 1..9: note = Table A: HLA-A*68:02M HLA-C*15:05H HLA-A*02:05H HLA-B*14:01H HLA-A*02:03H HLA-B*38:02H HLA-B*39:06H HLA-B*07:05H
  source 1..9: note = Severe acute respiratory syndrome coronavirus 2
SNFGAISSV

SEQ ID NO: 6759 - protein, 9 aa, Severe acute respiratory syndrome-related coronavirus
  REGION 1..9: note = Table A: HLA-C*14:02H HLA-C*14:03M HLA-B*07:05H
  source 1..9: note = Severe acute respiratory syndrome coronavirus 2
NFGAISSVL

SEQ ID NO: 6760 - protein, 9 aa, Severe acute respiratory syndrome-related coronavirus
  REGION 1..9: note = Table A: HLA-C*08:01H HLA-B*57:03H
  source 1..9: note = Severe acute respiratory syndrome coronavirus 2
ISSVLNDIL

SEQ ID NO: 6761 - protein, 9 aa, Severe acute respiratory syndrome-related coronavirus
  REGION 1..9: note = Table A: HLA-A*11:303M HLA-A*74:01M HLA-A*03:01H HLA-A*03:02H HLA-A*11:01H HLA-A*11:02H HLA-A*33:01H HLA-A*33:03M HLA-A*26:03M HLA-A*30:02H HLA-A*68:01M HLA-A*34:01M HLA-A*34:02M HLA-C*07:27M HLA-A*31:01M
  REGION 1..9: note = CONT. FROM ABOVE: HLA-A*66:01H
  source 1..9: note = Severe acute respiratory syndrome coronavirus 2
SVLNDILSR

SEQ ID NO: 6762 - protein, 9 aa, Severe acute respiratory syndrome-related coronavirus
  REGION 1..9: note = Table A: HLA-A*11:303H HLA-A*74:01M HLA-A*03:01H HLA-B*46:01H HLA-C*04:03H HLA-A*02:11H HLA-A*30:02H HLA-A*68:02H HLA-C*15:05H HLA-C*01:02H HLA-C*15:02H HLA-A*02:04H HLA-A*02:05M HLA-A*02:06H HLA-A*02:07H
  REGION 1..9: note = CONT. FROM ABOVE: HLA-B*14:01H HLA-A*02:01M HLA-A*02:02H HLA- A*02:03H HLA-C*08:01H HLA-B*38:02M HLA-B*15:01H HLA-B*13:02H
  source 1..9: note = Severe acute respiratory syndrome coronavirus 2
VLNDILSRL

SEQ ID NO: 6763 - protein, 9 aa, Severe acute respiratory syndrome-related coronavirus
  REGION 1..9: note = Table A: HLA-A*02:11M HLA-A*02:07M HLA-A*02:01M HLA-A*02:02M HLA-B*38:02H HLA-B*13:01M HLA-B*13:02H
  source 1..9: note = Severe acute respiratory syndrome coronavirus 2
RLDKVEAEV

SEQ ID NO: 6764 - protein, 9 aa, Severe acute respiratory syndrome-related coronavirus
  REGION 1..9: note = Table A: HLA-B*38:02H
  source 1..9: note = Severe acute respiratory syndrome coronavirus 2
DKVEAEVQI

SEQ ID NO: 6765 - protein, 9 aa, Severe acute respiratory syndrome-related coronavirus
  REGION 1..9: note = Table A: HLA-B*27:02H HLA-A*68:01H
  source 1..9: note = Severe acute respiratory syndrome coronavirus 2
VEAEVQIDR

SEQ ID NO: 6766 - protein, 9 aa, Severe acute respiratory syndrome-related coronavirus
  REGION 1..9: note = Table A: HLA-B*35:02H HLA-B*35:12H HLA-B*39:01H
  source 1..9: note = Severe acute respiratory syndrome coronavirus 2
EAEVQIDRL

SEQ ID NO: 6767 - protein, 9 aa, Severe acute respiratory syndrome-related coronavirus
  REGION 1..9: note = Table A: HLA-B*44:02H HLA-B*44:05M HLA-B*44:03M HLA-B*40:02H HLA-B*41:02H HLA-B*49:01M
  source 1..9: note = Severe acute respiratory syndrome coronavirus 2
AEVQIDRLI

SEQ ID NO: 6768 - protein, 9 aa, Severe acute respiratory syndrome-related coronavirus
  REGION 1..9: note = Table A: HLA-A*02:05H
  source 1..9: note = Severe acute respiratory syndrome coronavirus 2
VQIDRLITG

SEQ ID NO: 6769 - protein, 9 aa, Severe acute respiratory syndrome-related coronavirus
  REGION 1..9: note = Table A: HLA-A*74:01H HLA-A*33:01H HLA-A*33:03H HLA-A*68:01H HLA-A*34:01H
  source 1..9: note = Severe acute respiratory syndrome coronavirus 2
QIDRLITGR

SEQ ID NO: 6770 - protein, 9 aa, Severe acute respiratory syndrome-related coronavirus
  REGION 1..9: note = Table A: HLA-B*08:01M HLA-C*03:03H HLA-C*03:02H HLA-C*03:04H HLA-B*14:02H HLA-A*02:04H HLA-A*02:02H HLA-B*07:04H
  source 1..9: note = Severe acute respiratory syndrome coronavirus 2
LITGRLQSL

SEQ ID NO: 6771 - protein, 9 aa, Severe acute respiratory syndrome-related coronavirus
  REGION 1..9: note = Table A: HLA-C*16:04H HLA-B*27:05H HLA-B*27:02H HLA-B*38:02H HLA-B*39:01H
  source 1..9: note = Severe acute respiratory syndrome coronavirus 2
GRLQSLQTY

SEQ ID NO: 6772 - protein, 9 aa, Severe acute respiratory syndrome-related coronavirus
  REGION 1..9: note = Table A: HLA-A*02:11H HLA-A*02:04M HLA-A*02:07H HLA-A*02:01M HLA-A*02:02M HLA-A*02:03H HLA-B*38:02H HLA-B*13:02M
  source 1..9: note = Severe acute respiratory syndrome coronavirus 2
RLQSLQTYV

SEQ ID NO: 6773 - protein, 9 aa, Severe acute respiratory syndrome-related coronavirus
  REGION 1..9: note = Table A: HLA-B*48:01M HLA-A*02:11H HLA-A*68:02H HLA-A*02:04H HLA-A*02:05H HLA-A*02:06M HLA-A*02:08M HLA-A*02:02M HLA-C*08:01H HLA-B*38:02M HLA-B*15:01H HLA-B*39:01H HLA-B*13:01H HLA-B*13:02H
  source 1..9: note = Severe acute respiratory syndrome coronavirus 2
LQTYVTQQL

SEQ ID NO: 6774 - protein, 9 aa, Severe acute respiratory syndrome-related coronavirus
  REGION 1..9: note = Table A: HLA-B*58:01H HLA-B*58:02H HLA-B*57:01H HLA-A*68:02H HLA-C*15:05H HLA-C*15:02H HLA-B*38:02H HLA-B*57:03M HLA-B*13:02H
  source 1..9: note = Severe acute respiratory syndrome coronavirus 2
QTYVTQQLI

SEQ ID NO: 6775 - protein, 9 aa, Severe acute respiratory syndrome-related coronavirus
  REGION 1..9: note = Table A: HLA-A*33:03H
  source 1..9: note = Severe acute respiratory syndrome coronavirus 2
TYVTQQLIR

SEQ ID NO: 6776 - protein, 9 aa, Severe acute respiratory syndrome-related coronavirus
  REGION 1..9: note = Table A: HLA-B*56:01H HLA-A*02:11H HLA-B*55:02H HLA-A*68:02H HLA-A*02:05M HLA-A*02:06M HLA-A*02:08H HLA-A*02:02H HLA-A*02:03H HLA-B*38:02H HLA-B*40:06H HLA-B*54:01M
  source 1..9: note = Severe acute respiratory syndrome coronavirus 2
YVTQQLIRA

SEQ ID NO: 6777 - protein, 9 aa, Severe acute respiratory syndrome-related coronavirus
  REGION 1..9: note = Table A: HLA-B*08:01H HLA-B*14:02M HLA-A*02:06H HLA-B*14:01H HLA-B*52:01M HLA-B*38:02H HLA-B*13:01H HLA-B*13:02M
  source 1..9: note = Severe acute respiratory syndrome coronavirus 2
QQLIRAAEI

SEQ ID NO: 6778 - protein, 9 aa, Severe acute respiratory syndrome-related coronavirus
  REGION 1..9: note = Table A: HLA-A*34:01H
  source 1..9: note = Severe acute respiratory syndrome coronavirus 2
QLIRAAEIR

SEQ ID NO: 6779 - protein, 9 aa, Severe acute respiratory syndrome-related coronavirus
  REGION 1..9: note = Table A: HLA-B*56:01M HLA-A*02:11M HLA-B*55:02M HLA-C*15:05H HLA-B*55:01M HLA-A*02:05H HLA-A*02:08H HLA-A*02:02H HLA-B*38:02H HLA-B*39:06H HLA-B*54:01M HLA-B*07:02H HLA-B*07:04H HLA-B*07:05H HLA-B*50:01H
  source 1..9: note = Severe acute respiratory syndrome coronavirus 2
RAAEIRASA

SEQ ID NO: 6780 - protein, 9 aa, Severe acute respiratory syndrome-related coronavirus
  REGION 1..9: note = Table A: HLA-B*44:02M HLA-B*44:05H HLA-C*16:04H HLA-B*45:01M HLA-B*44:03H HLA-B*37:01H HLA-B*38:02H HLA-B*40:01H HLA-B*40:02H HLA-B*41:02H HLA-B*49:01H HLA-B*50:01H
  source 1..9: note = Severe acute respiratory syndrome coronavirus 2
AEIRASANL

SEQ ID NO: 6781 - protein, 9 aa, Severe acute respiratory syndrome-related coronavirus
  REGION 1..9: note = Table A: HLA-B*14:01H HLA-B*39:06H
  source 1..9: note = Severe acute respiratory syndrome coronavirus 2
IRASANLAA

SEQ ID NO: 6782 - protein, 9 aa, Severe acute respiratory syndrome-related coronavirus
  REGION 1..9: note = Table A: HLA-A*11:303H HLA-A*03:01H HLA-A*03:02M HLA-A*11:01H HLA-A*11:02M HLA-A*30:02H HLA-A*68:01H HLA-A*34:02M HLA-C*07:27M
  source 1..9: note = Severe acute respiratory syndrome coronavirus 2
ASANLAATK

SEQ ID NO: 6783 - protein, 9 aa, Severe acute respiratory syndrome-related coronavirus
  REGION 1..9: note = Table A: HLA-A*11:303M HLA-B*44:05H HLA-C*16:01H HLA-B*46:01H HLA-B*53:01H HLA-C*03:04H HLA-B*35:03M HLA-C*15:05H HLA-C*12:02H HLA-C*12:03H HLA-A*34:01H HLA-C*07:27H HLA-B*35:01M HLA-B*35:02H HLA-B*35:08H
  REGION 1..9: note = CONT. FROM ABOVE: HLA-B*51:01H HLA-B*35:07H HLA-B*35:12H HLA- B*38:02H HLA-B*07:02H HLA-B*15:01H HLA-B*15:02M HLA-B*07:05M HLA-C*02:02H HLA-C*07:04M
  source 1..9: note = Severe acute respiratory syndrome coronavirus 2
SANLAATKM

SEQ ID NO: 6784 - protein, 9 aa, Severe acute respiratory syndrome-related coronavirus
  REGION 1..9: note = Table A: HLA-A*34:01M HLA-A*66:01H
  source 1..9: note = Severe acute respiratory syndrome coronavirus 2
ECVLGQSKR

SEQ ID NO: 6785 - protein, 9 aa, Severe acute respiratory syndrome-related coronavirus
  REGION 1..9: note = Table A: HLA-A*36:01M
  source 1..9: note = Severe acute respiratory syndrome coronavirus 2
RVDFCGKGY

SEQ ID NO: 6786 - protein, 9 aa, Severe acute respiratory syndrome-related coronavirus
  REGION 1..9: note = Table A: HLA-B*15:03M
  source 1..9: note = Severe acute respiratory syndrome coronavirus 2
GKGYHLMSF

SEQ ID NO: 6787 - protein, 9 aa, Severe acute respiratory syndrome-related coronavirus
  REGION 1..9: note = Table A: HLA-B*56:01H HLA-A*02:11M HLA-B*55:02M HLA-B*55:01H HLA-B*14:01H HLA-A*02:01H HLA-A*02:02H HLA-A*02:03M HLA-B*38:02M HLA-B*39:06M HLA-B*54:01M HLA-B*13:02H HLA-B*50:01H
  source 1..9: note = Severe acute respiratory syndrome coronavirus 2
HLMSFPQSA

SEQ ID NO: 6788 - protein, 9 aa, Severe acute respiratory syndrome-related coronavirus
  REGION 1..9: note = Table A: HLA-B*46:01H HLA-C*03:02H HLA-C*12:02H HLA-A*34:01H HLA-A*34:02M HLA-C*08:03H HLA-A*66:01H
  source 1..9: note = Severe acute respiratory syndrome coronavirus 2
MSFPQSAPH

SEQ ID NO: 6789 - protein, 9 aa, Severe acute respiratory syndrome-related coronavirus
  REGION 1..9: note = Table A: HLA-B*56:01M HLA-A*02:11H HLA-B*55:02M HLA-C*15:05H HLA-B*55:01H HLA-A*02:03H HLA-B*51:01H HLA-B*54:01M HLA-B*07:04H
  source 1..9: note = Severe acute respiratory syndrome coronavirus 2
FPQSAPHGV

SEQ ID NO: 6790 - protein, 9 aa, Severe acute respiratory syndrome-related coronavirus
  REGION 1..9: note = Table A: HLA-B*58:01M HLA-B*58:02H HLA-B*57:01H HLA-B*46:01H HLA-C*15:05H HLA-C*12:02H HLA-C*12:03H HLA-B*35:01H HLA-B*38:02H HLA-B*15:01M HLA-B*15:02M HLA-B*15:03H HLA-B*07:05H HLA-B*57:03H HLA-C*07:04H
  source 1..9: note = Severe acute respiratory syndrome coronavirus 2
QSAPHGVVF

SEQ ID NO: 6791 - protein, 9 aa, Severe acute respiratory syndrome-related coronavirus
  REGION 1..9: note = Table A: HLA-C*14:03H HLA-C*04:03H HLA-A*02:11H HLA-B*53:01H HLA-A*68:02H HLA-C*01:02M HLA-C*12:02H HLA-A*02:05H HLA-C*17:01M HLA-C*08:01H HLA-C*07:04M
  source 1..9: note = Severe acute respiratory syndrome coronavirus 2
SAPHGVVFL

SEQ ID NO: 6792 - protein, 9 aa, Severe acute respiratory syndrome-related coronavirus
  REGION 1..9: note = Table A: HLA-B*38:02H
  source 1..9: note = Severe acute respiratory syndrome coronavirus 2
PHGVVFLHV

SEQ ID NO: 6793 - protein, 9 aa, Severe acute respiratory syndrome-related coronavirus
  REGION 1..9: note = Table A: HLA-A*29:01H HLA-A*29:02H HLA-A*30:02H HLA-B*35:01H HLA-B*35:07H HLA-B*38:02H HLA-B*15:01H HLA-B*15:02H HLA-B*15:03H HLA-B*07:05H
  source 1..9: note = Severe acute respiratory syndrome coronavirus 2
GVVFLHVTY

SEQ ID NO: 6794 - protein, 9 aa, Severe acute respiratory syndrome-related coronavirus
  REGION 1..9: note = Table A: HLA-A*02:11M HLA-A*68:02H HLA-C*15:02H HLA-A*02:04H HLA-A*02:05H HLA-A*02:06H HLA-A*02:07H HLA-A*02:02H HLA-A*02:03M HLA-B*38:02H
  source 1..9: note = Severe acute respiratory syndrome coronavirus 2
VVFLHVTYV

SEQ ID NO: 6795 - protein, 9 aa, Severe acute respiratory syndrome-related coronavirus
  REGION 1..9: note = Table A: HLA-A*68:02H
  source 1..9: note = Severe acute respiratory syndrome coronavirus 2
HVTYVPAQE

SEQ ID NO: 6796 - protein, 9 aa, Severe acute respiratory syndrome-related coronavirus
  REGION 1..9: note = Table A: HLA-A*11:303M HLA-A*74:01H HLA-A*03:01H HLA-A*03:02H HLA-A*11:01H HLA-A*11:02H HLA-A*36:01H HLA-A*33:03H HLA-A*30:01H HLA-A*30:02H HLA-A*68:01H HLA-A*34:01H HLA-A*34:02H HLA-C*07:27H HLA-A*31:01H
  REGION 1..9: note = CONT. FROM ABOVE: HLA-A*66:01H
  source 1..9: note = Severe acute respiratory syndrome coronavirus 2
VTYVPAQEK

SEQ ID NO: 6797 - protein, 9 aa, Severe acute respiratory syndrome-related coronavirus
  REGION 1..9: note = Table A: HLA-B*45:01H HLA-B*50:01H
  source 1..9: note = Severe acute respiratory syndrome coronavirus 2
AQEKNFTTA

SEQ ID NO: 6798 - protein, 9 aa, Severe acute respiratory syndrome-related coronavirus
  REGION 1..9: note = Table A: HLA-B*45:01H HLA-B*40:06M HLA-B*41:02H HLA-B*50:01H
  source 1..9: note = Severe acute respiratory syndrome coronavirus 2
QEKNFTTAP

SEQ ID NO: 6799 - protein, 9 aa, Severe acute respiratory syndrome-related coronavirus
  REGION 1..9: note = Table A: HLA-B*58:02H HLA-B*57:03H HLA-B*13:02H
  source 1..9: note = Severe acute respiratory syndrome coronavirus 2
KNFTTAPAI

SEQ ID NO: 6800 - protein, 9 aa, Severe acute respiratory syndrome-related coronavirus
  REGION 1..9: note = Table A: HLA-A*34:02M
  source 1..9: note = Severe acute respiratory syndrome coronavirus 2
FTTAPAICH

SEQ ID NO: 6801 - protein, 9 aa, Severe acute respiratory syndrome-related coronavirus
  REGION 1..9: note = Table A: HLA-A*02:11H HLA-B*07:04H
  source 1..9: note = Severe acute respiratory syndrome coronavirus 2
KAHFPREGV

SEQ ID NO: 6802 - protein, 9 aa, Severe acute respiratory syndrome-related coronavirus
  REGION 1..9: note = Table A: HLA-B*38:02M HLA-B*15:03M HLA-B*15:10M
  source 1..9: note = Severe acute respiratory syndrome coronavirus 2
AHFPREGVF

SEQ ID NO: 6803 - protein, 9 aa, Severe acute respiratory syndrome-related coronavirus
  REGION 1..9: note = Table A: HLA-C*04:03H
  source 1..9: note = Severe acute respiratory syndrome coronavirus 2
HFPREGVFV

SEQ ID NO: 6804 - protein, 9 aa, Severe acute respiratory syndrome-related coronavirus
  REGION 1..9: note = Table A: HLA-B*54:01H
  source 1..9: note = Severe acute respiratory syndrome coronavirus 2
FPREGVFVS

SEQ ID NO: 6805 - protein, 9 aa, Severe acute respiratory syndrome-related coronavirus
  REGION 1..9: note = Table A: HLA-C*14:03H HLA-A*24:02M HLA-A*24:07H HLA-A*23:01M
  source 1..9: note = Severe acute respiratory syndrome coronavirus 2
VFVSNGTHW

SEQ ID NO: 6806 - protein, 9 aa, Severe acute respiratory syndrome-related coronavirus
  REGION 1..9: note = Table A: HLA-C*15:02H
  source 1..9: note = Severe acute respiratory syndrome coronavirus 2
VSNGTHWFV

SEQ ID NO: 6807 - protein, 9 aa, Severe acute respiratory syndrome-related coronavirus
  REGION 1..9: note = Table A: HLA-A*11:303H HLA-A*74:01H HLA-A*03:01M HLA-A*03:02H HLA-A*11:01M HLA-A*11:02H HLA-A*36:01H HLA-B*57:01H HLA-A*33:01M HLA-A*33:03M HLA-A*26:03H HLA-B*27:05H HLA-A*30:01H HLA-A*30:02H HLA-A*68:01M
  REGION 1..9: note = CONT. FROM ABOVE: HLA-A*68:02H HLA-A*34:01M HLA-A*34:02H HLA- C*07:27M HLA-A*31:01H HLA-A*66:01H
  source 1..9: note = Severe acute respiratory syndrome coronavirus 2
GTHWFVTQR

SEQ ID NO: 6808 - protein, 9 aa, Severe acute respiratory syndrome-related coronavirus
  REGION 1..9: note = Table A: HLA-A*29:02H
  source 1..9: note = Severe acute respiratory syndrome coronavirus 2
WFVTQRNFY

SEQ ID NO: 6809 - protein, 9 aa, Severe acute respiratory syndrome-related coronavirus
  REGION 1..9: note = Table A: HLA-B*38:02H
  source 1..9: note = Severe acute respiratory syndrome coronavirus 2
QRNFYEPQI

SEQ ID NO: 6810 - protein, 9 aa, Severe acute respiratory syndrome-related coronavirus
  REGION 1..9: note = Table A: HLA-C*15:02M HLA-B*57:03H
  source 1..9: note = Severe acute respiratory syndrome coronavirus 2
RNFYEPQII

SEQ ID NO: 6811 - protein, 9 aa, Severe acute respiratory syndrome-related coronavirus
  REGION 1..9: note = Table A: HLA-B*39:01H
  source 1..9: note = Severe acute respiratory syndrome coronavirus 2
FYEPQIITT

SEQ ID NO: 6812 - protein, 9 aa, Severe acute respiratory syndrome-related coronavirus
  REGION 1..9: note = Table A: HLA-B*58:01H HLA-B*46:01H HLA-B*35:02H HLA-B*38:02M HLA-B*15:01M HLA-B*15:02M HLA-B*57:03H
  source 1..9: note = Severe acute respiratory syndrome coronavirus 2
QIITTDNTF

SEQ ID NO: 6813 - protein, 9 aa, Severe acute respiratory syndrome-related coronavirus
  REGION 1..9: note = Table A: HLA-A*02:11H HLA-A*68:02H HLA-A*02:05M HLA-A*02:06H HLA-A*02:08M
  source 1..9: note = Severe acute respiratory syndrome coronavirus 2
VVIGIVNNT

SEQ ID NO: 6814 - protein, 9 aa, Severe acute respiratory syndrome-related coronavirus
  REGION 1..9: note = Table A: HLA-B*46:01H HLA-B*35:01H HLA-B*15:01H HLA-B*15:02H HLA-B*15:03H HLA-B*15:11H
  source 1..9: note = Severe acute respiratory syndrome coronavirus 2
IGIVNNTVY

SEQ ID NO: 6815 - protein, 9 aa, Severe acute respiratory syndrome-related coronavirus
  REGION 1..9: note = Table A: HLA-B*58:01H HLA-C*14:02H HLA-C*14:03H HLA-A*11:303H HLA-B*44:05H HLA-A*36:01H HLA-C*06:02H HLA-A*29:01H HLA-A*29:02H HLA-C*04:01H HLA-C*04:03H HLA-C*03:03H HLA-C*07:01H HLA-C*07:02H HLA-A*02:11H
  REGION 1..9: note = CONT. FROM ABOVE: HLA-C*03:04H HLA-B*35:03M HLA-C*15:05M HLA- A*02:04H HLA-A*02:06H HLA-A*02:07H HLA-A*02:01H HLA-A*24:02H HLA-B*35:01H HLA-B*35:02M HLA-A*24:07H HLA-C*08:01H HLA-C*08 :02M HLA-A*23:01H HLA-B*35:12M HLA-B*38:01M HLA-B*38:02M
  REGION 1..9: note = CONT. FROM ABOVE: HLA-B*40:01H HLA-B*40:02H HLA-B*39:01H HLA- B*07:05H HLA-C*05:01M HLA-C*07:04H
  source 1..9: note = Severe acute respiratory syndrome coronavirus 2
VYDPLQPEL

SEQ ID NO: 6816 - protein, 9 aa, Severe acute respiratory syndrome-related coronavirus
  REGION 1..9: note = Table A: HLA-A*02:07M HLA-B*38:02H
  source 1..9: note = Severe acute respiratory syndrome coronavirus 2
ELDSFKEEL

SEQ ID NO: 6817 - protein, 9 aa, Severe acute respiratory syndrome-related coronavirus
  REGION 1..9: note = Table A: HLA-A*29:02H HLA-A*30:02M
  source 1..9: note = Severe acute respiratory syndrome coronavirus 2
SFKEELDKY

SEQ ID NO: 6818 - protein, 9 aa, Severe acute respiratory syndrome-related coronavirus
  REGION 1..9: note = Table A: HLA-B*38:01M HLA-B*38:02H HLA-B*39:01H HLA-B*15:10M
  source 1..9: note = Severe acute respiratory syndrome coronavirus 2
NHTSPDVDL

SEQ ID NO: 6819 - protein, 9 aa, Severe acute respiratory syndrome-related coronavirus
  REGION 1..9: note = Table A: HLA-A*26:03H HLA-A*68:02H HLA-C*15:05H HLA-B*14:01H HLA-B*38:02M HLA-B*39:01H HLA-B*07:05H
  source 1..9: note = Severe acute respiratory syndrome coronavirus 2
DISGINASV

SEQ ID NO: 6820 - protein, 9 aa, Severe acute respiratory syndrome-related coronavirus
  REGION 1..9: note = Table A: HLA-C*15:05H HLA-A*02:04H HLA-A*02:03H HLA-B*13:02H
  source 1..9: note = Severe acute respiratory syndrome coronavirus 2
GINASVVNI

SEQ ID NO: 6821 - protein, 9 aa, Severe acute respiratory syndrome-related coronavirus
  REGION 1..9: note = Table A: HLA-A*11:303H HLA-A*03:02H HLA-A*11:01M HLA-A*11:02H HLA-A*33:03H HLA-A*68:01H HLA-A*68:02H HLA-A*34:01H HLA-A*34:02H HLA-C*07:27H HLA-A*66:01H
  source 1..9: note = Severe acute respiratory syndrome coronavirus 2
NASVVNIQK

SEQ ID NO: 6822 - protein, 9 aa, Severe acute respiratory syndrome-related coronavirus
  REGION 1..9: note = Table A: HLA-A*02:11H HLA-A*68:02M HLA-A*02:05M HLA-A*02:06H HLA-A*02:08M HLA-A*02:02H HLA-B*38:02H HLA-B*40:06H HLA-B*57:03H HLA-B*13:02H
  source 1..9: note = Severe acute respiratory syndrome coronavirus 2
SVVNIQKEI

SEQ ID NO: 6823 - protein, 9 aa, Severe acute respiratory syndrome-related coronavirus
  REGION 1..9: note = Table A: HLA-B*44:05H HLA-B*46:01H HLA-B*45:01H HLA-A*02:11M HLA-A*68:02H HLA-C*15:02H HLA-A*02:05M HLA-A*02:06H HLA-A*02:07H HLA-A*02:08H HLA-B*14:01H HLA-A*02:01H HLA-A*02:02H HLA-A*02:03H HLA-B*37:01H HLA-B*38:02H
  REGION 1..9: note = CONT. FROM ABOVE: HLA-B*40:01H HLA-B*40:02H HLA-B*40:06H HLA- B*41:02M HLA-B*13:02H HLA-B*49:01H HLA-B*50:01H
  source 1..9: note = Severe acute respiratory syndrome coronavirus 2
KEIDRLNEV

SEQ ID NO: 6824 - protein, 9 aa, Severe acute respiratory syndrome-related coronavirus
  REGION 1..9: note = Table A: HLA-A*74:01H HLA-A*02:11H HLA-C*15:02H HLA-A*02:04M HLA-A*02:07H HLA-A*02:01H HLA-A*02:02H HLA-A*02:03H HLA-B*38:02H HLA-B*07:04H HLA-B*13:01H HLA-B*13:02H
  source 1..9: note = Severe acute respiratory syndrome coronavirus 2
RLNEVAKNL

SEQ ID NO: 6825 - protein, 9 aa, Severe acute respiratory syndrome-related coronavirus
  REGION 1..9: note = Table A: HLA-A*26:03H HLA-A*34:01H
  source 1..9: note = Severe acute respiratory syndrome coronavirus 2
EVAKNLNES

SEQ ID NO: 6826 - protein, 9 aa, Severe acute respiratory syndrome-related coronavirus
  REGION 1..9: note = Table A: HLA-A*11:303H HLA-C*16:01H HLA-B*46:01H HLA-B*08:01H HLA-C*03:04H HLA-C*12:02H HLA-C*12:03H HLA-A*02:05H HLA-A*02:02H HLA-C*08:01H HLA-B*38:02H HLA-B*07:04H HLA-B*15:01H HLA-B*57:03H
  source 1..9: note = Severe acute respiratory syndrome coronavirus 2
VAKNLNESL

SEQ ID NO: 6827 - protein, 9 aa, Severe acute respiratory syndrome-related coronavirus
  REGION 1..9: note = Table A: HLA-A*02:04M HLA-B*14:01H HLA-A*02:01H HLA-A*02:02H HLA-A*02:03H HLA-B*38:02H
  source 1..9: note = Severe acute respiratory syndrome coronavirus 2
NLNESLIDL

SEQ ID NO: 6828 - protein, 9 aa, Severe acute respiratory syndrome-related coronavirus
  REGION 1..9: note = Table A: HLA-A*68:02H
  source 1..9: note = Severe acute respiratory syndrome coronavirus 2
ESLIDLQEL

SEQ ID NO: 6829 - protein, 9 aa, Severe acute respiratory syndrome-related coronavirus
  REGION 1..9: note = Table A: HLA-A*36:01M
  source 1..9: note = Severe acute respiratory syndrome coronavirus 2
LIDLQELGK

SEQ ID NO: 6830 - protein, 9 aa, Severe acute respiratory syndrome-related coronavirus
  REGION 1..9: note = Table A: HLA-B*44:02M HLA-B*44:05H HLA-C*16:04H HLA-B*44:03H HLA-B*18:01M HLA-B*35:01H HLA-B*38:02H HLA-B*07:05M
  source 1..9: note = Severe acute respiratory syndrome coronavirus 2
QELGKYEQY

SEQ ID NO: 6831 - protein, 9 aa, Severe acute respiratory syndrome-related coronavirus
  REGION 1..9: note = Table A: HLA-B*15:03M
  source 1..9: note = Severe acute respiratory syndrome coronavirus 2
GKYEQYIKW

SEQ ID NO: 6832 - protein, 9 aa, Severe acute respiratory syndrome-related coronavirus
  REGION 1..9: note = Table A: HLA-C*06:02H HLA-A*24:02M HLA-A*24:07H HLA-A*23:01M
  source 1..9: note = Severe acute respiratory syndrome coronavirus 2
QYIKWPWYI

SEQ ID NO: 6833 - protein, 9 aa, Severe acute respiratory syndrome-related coronavirus
  REGION 1..9: note = Table A: HLA-C*14:03H
  source 1..9: note = Severe acute respiratory syndrome coronavirus 2
GFIAGLIAI

SEQ ID NO: 6834 - protein, 9 aa, Severe acute respiratory syndrome-related coronavirus
  REGION 1..9: note = Table A: HLA-A*02:11H HLA-A*68:02M HLA-A*02:04H HLA-A*02:05H HLA-A*02:02H HLA-A*02:03H HLA-B*38:02H
  source 1..9: note = Severe acute respiratory syndrome coronavirus 2
FIAGLIAIV

SEQ ID NO: 6835 - protein, 9 aa, Severe acute respiratory syndrome-related coronavirus
  REGION 1..9: note = Table A: HLA-B*35:03H HLA-C*15:05H HLA-B*35:01H HLA-C*07:04H
  source 1..9: note = Severe acute respiratory syndrome coronavirus 2
IAGLIAIVM

SEQ ID NO: 6836 - protein, 9 aa, Severe acute respiratory syndrome-related coronavirus
  REGION 1..9: note = Table A: HLA-A*68:02H HLA-B*57:03H
  source 1..9: note = Severe acute respiratory syndrome coronavirus 2
LIAIVMVTI

SEQ ID NO: 6837 - protein, 9 aa, Severe acute respiratory syndrome-related coronavirus
  REGION 1..9: note = Table A: HLA-B*46:01H HLA-C*03:02H HLA-C*03:04H HLA-B*35:03M HLA-C*15:05H HLA-C*12:03H HLA-B*35:01H HLA-C*17:01H HLA-B*35:07H HLA-B*38:02H HLA-B*15:02H
  source 1..9: note = Severe acute respiratory syndrome coronavirus 2
IAIVMVTIM

SEQ ID NO: 6838 - protein, 9 aa, Severe acute respiratory syndrome-related coronavirus
  REGION 1..9: note = Table A: HLA-A*34:02H
  source 1..9: note = Severe acute respiratory syndrome coronavirus 2
MTSCCSCLK

SEQ ID NO: 6839 - protein, 9 aa, Severe acute respiratory syndrome-related coronavirus
  REGION 1..9: note = Table A: HLA-B*44:05H HLA-B*35:02M HLA-B*35:12M HLA-B*38:01H HLA-B*38:02H HLA-B*40:01M HLA-B*40:02H HLA-B*39:01M HLA-B*07:05H HLA-B*41:02H HLA-B*49:01H
  source 1..9: note = Severe acute respiratory syndrome coronavirus 2
DEDDSEPVL

SEQ ID NO: 6840 - protein, 9 aa, Severe acute respiratory syndrome-related coronavirus
  REGION 1..9: note = Table A: HLA-A*68:02H
  source 1..9: note = Severe acute respiratory syndrome coronavirus 2
DSEPVLKGV

SEQ ID NO: 6841 - protein, 9 aa, Severe acute respiratory syndrome-related coronavirus
  REGION 1..9: note = Table A: HLA-A*34:01H HLA-B*07:04H
  source 1..9: note = Severe acute respiratory syndrome coronavirus 2
EPVLKGVKL

SEQ ID NO: 6842 - protein, 9 aa, Severe acute respiratory syndrome-related coronavirus
  REGION 1..9: note = Table A: HLA-A*29:02H HLA-A*30:02H HLA-B*38:02H
  source 1..9: note = Severe acute respiratory syndrome coronavirus 2
VLKGVKLHY

SEQ ID NO: 6843 - protein, 10 aa, Severe acute respiratory syndrome-related coronavirus
  REGION 1..10: note = Table A: HLA-A*30:01H HLA-A*30:02M
  source 1..10: note = Severe acute respiratory syndrome coronavirus 2
TTRTQLPPAY

SEQ ID NO: 6844 - protein, 10 aa, Severe acute respiratory syndrome-related coronavirus
  REGION 1..10: note = Table A: HLA-B*44:05H HLA-A*25:01H HLA-B*46:01H HLA-A*24:07H HLA-B*38:01H HLA-B*38:02M HLA-B*15:01H HLA-B*15:02M
  source 1..10: note = Severe acute respiratory syndrome coronavirus 2
QLPPAYTNSF

SEQ ID NO: 6845 - protein, 10 aa, Severe acute respiratory syndrome-related coronavirus
  REGION 1..10: note = Table A: HLA-A*26:01H HLA-A*30:02M
  source 1..10: note = Severe acute respiratory syndrome coronavirus 2
YTNSFTRGVY

SEQ ID NO: 6846 - protein, 10 aa, Severe acute respiratory syndrome-related coronavirus
  REGION 1..10: note = Table A: HLA-A*11:303H HLA-A*74:01H HLA-A*03:01H HLA-A*03:02H HLA-A*11:01M HLA-A*11:02H HLA-A*33:01M HLA-A*33:03H HLA-A*26:03H HLA-A*30:02H HLA-A*68:01M HLA-A*68:02H HLA-A*34:01M HLA-A*34:02M HLA-C*07:27H
  REGION 1..10: note = CONT. FROM ABOVE: HLA-A*31:01M HLA-A*66:01H
  source 1..10: note = Severe acute respiratory syndrome coronavirus 2
GVYYPDKVFR

SEQ ID NO: 6847 - protein, 10 aa, Severe acute respiratory syndrome-related coronavirus
  REGION 1..10: note = Table A: HLA-C*15:05H
  source 1..10: note = Severe acute respiratory syndrome coronavirus 2
YPDKVFRSSV

SEQ ID NO: 6848 - protein, 10 aa, Severe acute respiratory syndrome-related coronavirus
  REGION 1..10: note = Table A: HLA-A*02:04H HLA-A*02:01H HLA-A*02:02M
  source 1..10: note = Severe acute respiratory syndrome coronavirus 2
VLHSTQDLFL

SEQ ID NO: 6849 - protein, 10 aa, Severe acute respiratory syndrome-related coronavirus
  REGION 1..10: note = Table A: HLA-A*02:04H
  source 1..10: note = Severe acute respiratory syndrome coronavirus 2
STQDLFLPFF

SEQ ID NO: 6850 - protein, 10 aa, Severe acute respiratory syndrome-related coronavirus
  REGION 1..10: note = Table A: HLA-A*68:02H
  source 1..10: note = Severe acute respiratory syndrome coronavirus 2
DLFLPFFSNV

SEQ ID NO: 6851 - protein, 10 aa, Severe acute respiratory syndrome-related coronavirus
  REGION 1..10: note = Table A: HLA-B*38:02H
  source 1..10: note = Severe acute respiratory syndrome coronavirus 2
FLPFFSNVTW

SEQ ID NO: 6852 - protein, 10 aa, Severe acute respiratory syndrome-related coronavirus
  REGION 1..10: note = Table A: HLA-B*35:07H
  source 1..10: note = Severe acute respiratory syndrome coronavirus 2
LPFFSNVTWF

SEQ ID NO: 6853 - protein, 10 aa, Severe acute respiratory syndrome-related coronavirus
  REGION 1..10: note = Table A: HLA-A*68:02H
  source 1..10: note = Severe acute respiratory syndrome coronavirus 2
NVTWFHAIHV

SEQ ID NO: 6854 - protein, 10 aa, Severe acute respiratory syndrome-related coronavirus
  REGION 1..10: note = Table A: HLA-A*66:01H
  source 1..10: note = Severe acute respiratory syndrome coronavirus 2
HAIHVSGTNG

SEQ ID NO: 6855 - protein, 10 aa, Severe acute respiratory syndrome-related coronavirus
  REGION 1..10: note = Table A: HLA-A*26:03M HLA-A*68:01M HLA-A*34:01M HLA-A*34:02H HLA-A*66:01M
  source 1..10: note = Severe acute respiratory syndrome coronavirus 2
HVSGTNGTKR

SEQ ID NO: 6856 - protein, 10 aa, Severe acute respiratory syndrome-related coronavirus
  REGION 1..10: note = Table A: HLA-A*30:01H HLA-B*57:03H
  source 1..10: note = Severe acute respiratory syndrome coronavirus 2
GTKRFDNPVL

SEQ ID NO: 6857 - protein, 10 aa, Severe acute respiratory syndrome-related coronavirus
  REGION 1..10: note = Table A: HLA-B*27:05M HLA-C*07:01H HLA-C*07:02H HLA-B*27:02H
  source 1..10: note = Severe acute respiratory syndrome coronavirus 2
KRFDNPVLPF

SEQ ID NO: 6858 - protein, 10 aa, Severe acute respiratory syndrome-related coronavirus
  REGION 1..10: note = Table A: HLA-A*24:07H
  source 1..10: note = Severe acute respiratory syndrome coronavirus 2
VLPFNDGVYF

SEQ ID NO: 6859 - protein, 10 aa, Severe acute respiratory syndrome-related coronavirus
  REGION 1..10: note = Table A: HLA-B*56:01H HLA-B*55:02H HLA-B*54:01H
  source 1..10: note = Severe acute respiratory syndrome coronavirus 2
LPFNDGVYFA

SEQ ID NO: 6860 - protein, 10 aa, Severe acute respiratory syndrome-related coronavirus
  REGION 1..10: note = Table A: HLA-B*44:02H HLA-B*44:03M
  source 1..10: note = Severe acute respiratory syndrome coronavirus 2
TEKSNIIRGW

SEQ ID NO: 6861 - protein, 10 aa, Severe acute respiratory syndrome-related coronavirus
  REGION 1..10: note = Table A: HLA-B*58:02M HLA-B*57:03M
  source 1..10: note = Severe acute respiratory syndrome coronavirus 2
KSNIIRGWIF

SEQ ID NO: 6862 - protein, 10 aa, Severe acute respiratory syndrome-related coronavirus
  REGION 1..10: note = Table A: HLA-A*34:02H
  source 1..10: note = Severe acute respiratory syndrome coronavirus 2
WIFGTTLDSK

SEQ ID NO: 6863 - protein, 10 aa, Severe acute respiratory syndrome-related coronavirus
  REGION 1..10: note = Table A: HLA-A*25:01H HLA-A*26:03H HLA-A*68:02H HLA-C*15:05H HLA-A*02:08H HLA-A*34:02H HLA-B*38:02H HLA-B*57:03H
  source 1..10: note = Severe acute respiratory syndrome coronavirus 2
TTLDSKTQSL

SEQ ID NO: 6864 - protein, 10 aa, Severe acute respiratory syndrome-related coronavirus
  REGION 1..10: note = Table A: HLA-C*15:05H
  source 1..10: note = Severe acute respiratory syndrome coronavirus 2
IVNNATNVVI

SEQ ID NO: 6865 - protein, 10 aa, Severe acute respiratory syndrome-related coronavirus
  REGION 1..10: note = Table A: HLA-B*57:03H
  source 1..10: note = Severe acute respiratory syndrome coronavirus 2
VVIKVCEFQF

SEQ ID NO: 6866 - protein, 10 aa, Severe acute respiratory syndrome-related coronavirus
  REGION 1..10: note = Table A: HLA-B*46:01H
  source 1..10: note = Severe acute respiratory syndrome coronavirus 2
FCNDPFLGVY

SEQ ID NO: 6867 - protein, 10 aa, Severe acute respiratory syndrome-related coronavirus
  REGION 1..10: note = Table A: HLA-A*36:01H
  source 1..10: note = Severe acute respiratory syndrome coronavirus 2
CNDPFLGVYY

SEQ ID NO: 6868 - protein, 10 aa, Severe acute respiratory syndrome-related coronavirus
  REGION 1..10: note = Table A: HLA-A*24:07H
  source 1..10: note = Severe acute respiratory syndrome coronavirus 2
VYYHKNNKSW

SEQ ID NO: 6869 - protein, 10 aa, Severe acute respiratory syndrome-related coronavirus
  REGION 1..10: note = Table A: HLA-C*14:03H HLA-A*30:02H
  source 1..10: note = Severe acute respiratory syndrome coronavirus 2
SWMESEFRVY

SEQ ID NO: 6870 - protein, 10 aa, Severe acute respiratory syndrome-related coronavirus
  REGION 1..10: note = Table A: HLA-B*45:01H HLA-B*50:01H
  source 1..10: note = Severe acute respiratory syndrome coronavirus 2
MESEFRVYSS

SEQ ID NO: 6871 - protein, 10 aa, Severe acute respiratory syndrome-related coronavirus
  REGION 1..10: note = Table A: HLA-C*14:02H HLA-C*14:03H HLA-A*24:02H HLA-A*24:07M HLA-A*23:01M
  source 1..10: note = Severe acute respiratory syndrome coronavirus 2
VYSSANNCTF

SEQ ID NO: 6872 - protein, 10 aa, Severe acute respiratory syndrome-related coronavirus
  REGION 1..10: note = Table A: HLA-C*04:01H HLA-C*04:03H
  source 1..10: note = Severe acute respiratory syndrome coronavirus 2
TFEYVSQPFL

SEQ ID NO: 6873 - protein, 10 aa, Severe acute respiratory syndrome-related coronavirus
  REGION 1..10: note = Table A: HLA-B*49:01H
  source 1..10: note = Severe acute respiratory syndrome coronavirus 2
FEYVSQPFLM

SEQ ID NO: 6874 - protein, 10 aa, Severe acute respiratory syndrome-related coronavirus
  REGION 1..10: note = Table A: HLA-A*68:02H
  source 1..10: note = Severe acute respiratory syndrome coronavirus 2
YVSQPFLMDL

SEQ ID NO: 6875 - protein, 10 aa, Severe acute respiratory syndrome-related coronavirus
  REGION 1..10: note = Table A: HLA-B*37:01H
  source 1..10: note = Severe acute respiratory syndrome coronavirus 2
MDLEGKQGNF

SEQ ID NO: 6876 - protein, 10 aa, Severe acute respiratory syndrome-related coronavirus
  REGION 1..10: note = Table A: HLA-A*24:07M
  source 1..10: note = Severe acute respiratory syndrome coronavirus 2
NFKNLREFVF

SEQ ID NO: 6877 - protein, 10 aa, Severe acute respiratory syndrome-related coronavirus
  REGION 1..10: note = Table A: HLA-B*40:06H
  source 1..10: note = Severe acute respiratory syndrome coronavirus 2
REFVFKNIDG

SEQ ID NO: 6878 - protein, 10 aa, Severe acute respiratory syndrome-related coronavirus
  REGION 1..10: note = Table A: HLA-A*30:01H HLA-A*30:02H HLA-A*23:01H
  source 1..10: note = Severe acute respiratory syndrome coronavirus 2
VFKNIDGYFK

SEQ ID NO: 6879 - protein, 10 aa, Severe acute respiratory syndrome-related coronavirus
  REGION 1..10: note = Table A: HLA-A*30:02H
  source 1..10: note = Severe acute respiratory syndrome coronavirus 2
KNIDGYFKIY

SEQ ID NO: 6880 - protein, 10 aa, Severe acute respiratory syndrome-related coronavirus
  REGION 1..10: note = Table A: HLA-A*24:02H HLA-A*24:07M HLA-A*23:01H
  source 1..10: note = Severe acute respiratory syndrome coronavirus 2
IYSKHTPINL

SEQ ID NO: 6881 - protein, 10 aa, Severe acute respiratory syndrome-related coronavirus
  REGION 1..10: note = Table A: HLA-A*68:02H
  source 1..10: note = Severe acute respiratory syndrome coronavirus 2
YSKHTPINLV

SEQ ID NO: 6882 - protein, 10 aa, Severe acute respiratory syndrome-related coronavirus
  REGION 1..10: note = Table A: HLA-A*02:07H
  source 1..10: note = Severe acute respiratory syndrome coronavirus 2
LVDLPIGINI

SEQ ID NO: 6883 - protein, 10 aa, Severe acute respiratory syndrome-related coronavirus
  REGION 1..10: note = Table A: HLA-A*26:03H HLA-A*68:01H HLA-A*34:01H
  source 1..10: note = Severe acute respiratory syndrome coronavirus 2
DLPIGINITR

SEQ ID NO: 6884 - protein, 10 aa, Severe acute respiratory syndrome-related coronavirus
  REGION 1..10: note = Table A: HLA-A*25:01H HLA-B*56:01H HLA-B*53:01H HLA-B*55:02H HLA-A*68:01H HLA-B*35:03H HLA-C*15:05M HLA-A*34:01M HLA-B*35:01M HLA-B*51:01H HLA-B*35:07H HLA-B*54:01H HLA-B*07:02H HLA-B*07:04H HLA-B*07:05H HLA-B*15:11H
  source 1..10: note = Severe acute respiratory syndrome coronavirus 2
LPIGINITRF

SEQ ID NO: 6885 - protein, 10 aa, Severe acute respiratory syndrome-related coronavirus
  REGION 1..10: note = Table A: HLA-A*02:11H HLA-A*02:04H
  source 1..10: note = Severe acute respiratory syndrome coronavirus 2
TLLALHRSYL

SEQ ID NO: 6886 - protein, 10 aa, Severe acute respiratory syndrome-related coronavirus
  REGION 1..10: note = Table A: HLA-B*58:01H HLA-A*25:01M HLA-A*26:03H HLA-B*57:03H
  source 1..10: note = Severe acute respiratory syndrome coronavirus 2
LTPGDSSSGW

SEQ ID NO: 6887 - protein, 10 aa, Severe acute respiratory syndrome-related coronavirus
  REGION 1..10: note = Table A: HLA-A*30:02H HLA-B*35:01H HLA-B*39:01H HLA-B*15:11H
  source 1..10: note = Severe acute respiratory syndrome coronavirus 2
SGWTAGAAAY

SEQ ID NO: 6888 - protein, 10 aa, Severe acute respiratory syndrome-related coronavirus
  REGION 1..10: note = Table A: HLA-A*29:02H
  source 1..10: note = Severe acute respiratory syndrome coronavirus 2
GWTAGAAAYY

SEQ ID NO: 6889 - protein, 10 aa, Severe acute respiratory syndrome-related coronavirus
  REGION 1..10: note = Table A: HLA-A*68:02H
  source 1..10: note = Severe acute respiratory syndrome coronavirus 2
WTAGAAAYYV

SEQ ID NO: 6890 - protein, 10 aa, Severe acute respiratory syndrome-related coronavirus
  REGION 1..10: note = Table A: HLA-C*14:03H HLA-A*74:01H HLA-A*33:01H HLA-A*33:03H HLA-A*31:01H
  source 1..10: note = Severe acute respiratory syndrome coronavirus 2
AYYVGYLQPR

SEQ ID NO: 6891 - protein, 10 aa, Severe acute respiratory syndrome-related coronavirus
  REGION 1..10: note = Table A: HLA-A*24:07H HLA-A*23:01H
  source 1..10: note = Severe acute respiratory syndrome coronavirus 2
GYLQPRTFLL

SEQ ID NO: 6892 - protein, 10 aa, Severe acute respiratory syndrome-related coronavirus
  REGION 1..10: note = Table A: HLA-A*34:02H
  source 1..10: note = Severe acute respiratory syndrome coronavirus 2
YLQPRTFLLK

SEQ ID NO: 6893 - protein, 10 aa, Severe acute respiratory syndrome-related coronavirus
  REGION 1..10: note = Table A: HLA-A*30:02H
  source 1..10: note = Severe acute respiratory syndrome coronavirus 2
LQPRTFLLKY

SEQ ID NO: 6894 - protein, 10 aa, Severe acute respiratory syndrome-related coronavirus
  REGION 1..10: note = Table A: HLA-A*02:05H HLA-A*02:08M
  source 1..10: note = Severe acute respiratory syndrome coronavirus 2
GTITDAVDCA

SEQ ID NO: 6895 - protein, 10 aa, Severe acute respiratory syndrome-related coronavirus
  REGION 1..10: note = Table A: HLA-B*35:03H HLA-B*35:02M HLA-B*35:12H HLA-B*38:02H HLA-B*39:01H
  source 1..10: note = Severe acute respiratory syndrome coronavirus 2
TITDAVDCAL

SEQ ID NO: 6896 - protein, 10 aa, Severe acute respiratory syndrome-related coronavirus
  REGION 1..10: note = Table A: HLA-A*02:11H HLA-A*02:07H HLA-A*02:01H HLA-B*38:02H
  source 1..10: note = Severe acute respiratory syndrome coronavirus 2
ALDPLSETKC

SEQ ID NO: 6897 - protein, 10 aa, Severe acute respiratory syndrome-related coronavirus
  REGION 1..10: note = Table A: HLA-B*35:03H HLA-C*15:05M HLA-B*35:02H HLA-B*35:12H HLA-B*07:05H
  source 1..10: note = Severe acute respiratory syndrome coronavirus 2
DPLSETKCTL

SEQ ID NO: 6898 - protein, 10 aa, Severe acute respiratory syndrome-related coronavirus
  REGION 1..10: note = Table A: HLA-B*44:03H
  source 1..10: note = Severe acute respiratory syndrome coronavirus 2
SETKCTLKSF

SEQ ID NO: 6899 - protein, 10 aa, Severe acute respiratory syndrome-related coronavirus
  REGION 1..10: note = Table A: HLA-A*11:01H HLA-A*11:02H HLA-A*34:02H
  source 1..10: note = Severe acute respiratory syndrome coronavirus 2
CTLKSFTVEK

SEQ ID NO: 6900 - protein, 10 aa, Severe acute respiratory syndrome-related coronavirus
  REGION 1..10: note = Table A: HLA-A*02:02H HLA-A*02:03H
  source 1..10: note = Severe acute respiratory syndrome coronavirus 2
TLKSFTVEKG

SEQ ID NO: 6901 - protein, 10 aa, Severe acute respiratory syndrome-related coronavirus
  REGION 1..10: note = Table A: HLA-B*58:01H HLA-A*36:01M HLA-B*57:01H HLA-A*30:02M HLA-B*15:01H HLA-B*57:03H
  source 1..10: note = Severe acute respiratory syndrome coronavirus 2
KSFTVEKGIY

SEQ ID NO: 6902 - protein, 10 aa, Severe acute respiratory syndrome-related coronavirus
  REGION 1..10: note = Table A: HLA-A*02:11H HLA-A*68:02M HLA-A*02:05M HLA-A*02:06H HLA-A*02:08H HLA-A*02:02H
  source 1..10: note = Severe acute respiratory syndrome coronavirus 2
FTVEKGIYQT

SEQ ID NO: 6903 - protein, 10 aa, Severe acute respiratory syndrome-related coronavirus
  REGION 1..10: note = Table A: HLA-A*11:303H HLA-A*74:01H HLA-A*03:01H HLA-A*03:02M HLA-A*11:01M HLA-A*11:02M HLA-A*36:01H HLA-A*30:02H HLA-A*31:01H
  source 1..10: note = Severe acute respiratory syndrome coronavirus 2
RVQPTESIVR

SEQ ID NO: 6904 - protein, 10 aa, Severe acute respiratory syndrome-related coronavirus
  REGION 1..10: note = Table A: HLA-A*23:01H HLA-B*15:01M HLA-B*13:01H
  source 1..10: note = Severe acute respiratory syndrome coronavirus 2
VQPTESIVRF

SEQ ID NO: 6905 - protein, 10 aa, Severe acute respiratory syndrome-related coronavirus
  REGION 1..10: note = Table A: HLA-B*07:02H HLA-B*07:04M
  source 1..10: note = Severe acute respiratory syndrome coronavirus 2
IVRFPNITNL

SEQ ID NO: 6906 - protein, 10 aa, Severe acute respiratory syndrome-related coronavirus
  REGION 1..10: note = Table A: HLA-B*56:01H HLA-B*55:02H
  source 1..10: note = Severe acute respiratory syndrome coronavirus 2
CPFGEVFNAT

SEQ ID NO: 6907 - protein, 10 aa, Severe acute respiratory syndrome-related coronavirus
  REGION 1..10: note = Table A: HLA-B*45:01H HLA-B*40:06H HLA-B*50:01M
  source 1..10: note = Severe acute respiratory syndrome coronavirus 2
GEVFNATRFA

SEQ ID NO: 6908 - protein, 10 aa, Severe acute respiratory syndrome-related coronavirus
  REGION 1..10: note = Table A: HLA-B*57:01H HLA-A*32:01H HLA-B*57:03M
  source 1..10: note = Severe acute respiratory syndrome coronavirus 2
ATRFASVYAW

SEQ ID NO: 6909 - protein, 10 aa, Severe acute respiratory syndrome-related coronavirus
  REGION 1..10: note = Table A: HLA-A*74:01M HLA-A*31:01H
  source 1..10: note = Severe acute respiratory syndrome coronavirus 2
RFASVYAWNR

SEQ ID NO: 6910 - protein, 10 aa, Severe acute respiratory syndrome-related coronavirus
  REGION 1..10: note = Table A: HLA-B*35:01H
  source 1..10: note = Severe acute respiratory syndrome coronavirus 2
NCVADYSVLY

SEQ ID NO: 6911 - protein, 10 aa, Severe acute respiratory syndrome-related coronavirus
  REGION 1..10: note = Table A: HLA-B*50:01H
  source 1..10: note = Severe acute respiratory syndrome coronavirus 2
ADYSVLYNSA

SEQ ID NO: 6912 - protein, 10 aa, Severe acute respiratory syndrome-related coronavirus
  REGION 1..10: note = Table A: HLA-C*14:02H HLA-C*14:03H HLA-A*24:02M HLA-A*24:07M HLA-A*23:01M
  source 1..10: note = Severe acute respiratory syndrome coronavirus 2
LYNSASFSTF

SEQ ID NO: 6913 - protein, 10 aa, Severe acute respiratory syndrome-related coronavirus
  REGION 1..10: note = Table A: HLA-A*34:02H
  source 1..10: note = Severe acute respiratory syndrome coronavirus 2
YNSASFSTFK

SEQ ID NO: 6914 - protein, 10 aa, Severe acute respiratory syndrome-related coronavirus
  REGION 1..10: note = Table A: HLA-A*68:02H HLA-A*31:01H
  source 1..10: note = Severe acute respiratory syndrome coronavirus 2
ASFSTFKCYG

SEQ ID NO: 6915 - protein, 10 aa, Severe acute respiratory syndrome-related coronavirus
  REGION 1..10: note = Table A: HLA-A*03:01H HLA-A*02:08H
  source 1..10: note = Severe acute respiratory syndrome coronavirus 2
KCYGVSPTKL

SEQ ID NO: 6916 - protein, 10 aa, Severe acute respiratory syndrome-related coronavirus
  REGION 1..10: note = Table A: HLA-A*02:02H
  source 1..10: note = Severe acute respiratory syndrome coronavirus 2
GVSPTKLNDL

SEQ ID NO: 6917 - protein, 10 aa, Severe acute respiratory syndrome-related coronavirus
  REGION 1..10: note = Table A: HLA-C*15:05H
  source 1..10: note = Severe acute respiratory syndrome coronavirus 2
SPTKLNDLCF

SEQ ID NO: 6918 - protein, 10 aa, Severe acute respiratory syndrome-related coronavirus
  REGION 1..10: note = Table A: HLA-A*02:11H HLA-A*02:03H
  source 1..10: note = Severe acute respiratory syndrome coronavirus 2
KLNDLCFTNV

SEQ ID NO: 6919 - protein, 10 aa, Severe acute respiratory syndrome-related coronavirus
  REGION 1..10: note = Table A: HLA-A*33:01H HLA-A*33:03H HLA-A*68:01M HLA-A*68:02H HLA-A*34:01M HLA-A*34:02M HLA-A*66:01M
  source 1..10: note = Severe acute respiratory syndrome coronavirus 2
NVYADSFVIR

SEQ ID NO: 6920 - protein, 10 aa, Severe acute respiratory syndrome-related coronavirus
  REGION 1..10: note = Table A: HLA-A*68:02M HLA-B*38:02H
  source 1..10: note = Severe acute respiratory syndrome coronavirus 2
DSFVIRGDEV

SEQ ID NO: 6921 - protein, 10 aa, Severe acute respiratory syndrome-related coronavirus
  REGION 1..10: note = Table A: HLA-A*02:03H HLA-B*07:04H
  source 1..10: note = Severe acute respiratory syndrome coronavirus 2
VIRGDEVRQI

SEQ ID NO: 6922 - protein, 10 aa, Severe acute respiratory syndrome-related coronavirus
  REGION 1..10: note = Table A: HLA-A*03:01H HLA-A*03:02H HLA-A*11:01H HLA-A*11:02H
  source 1..10: note = Severe acute respiratory syndrome coronavirus 2
RQIAPGQTGK

SEQ ID NO: 6923 - protein, 10 aa, Severe acute respiratory syndrome-related coronavirus
  REGION 1..10: note = Table A: HLA-B*53:01H HLA-B*55:02H HLA-B*35:03M HLA-C*15:05M HLA-B*35:01H HLA-B*35:02M HLA-B*35:08H HLA-B*51:01H HLA-C*08:01H HLA-B*35:12M HLA-B*38:02M HLA-B*54:01H HLA-B*07:05H
  source 1..10: note = Severe acute respiratory syndrome coronavirus 2
LPDDFTGCVI

SEQ ID NO: 6924 - protein, 10 aa, Severe acute respiratory syndrome-related coronavirus
  REGION 1..10: note = Table A: HLA-A*36:01M HLA-A*01:01M HLA-A*30:02H
  source 1..10: note = Severe acute respiratory syndrome coronavirus 2
NLDSKVGGNY

SEQ ID NO: 6925 - protein, 10 aa, Severe acute respiratory syndrome-related coronavirus
  REGION 1..10: note = Table A: HLA-A*36:01H HLA-A*29:02H HLA-A*30:02H
  source 1..10: note = Severe acute respiratory syndrome coronavirus 2
KVGGNYNYLY

SEQ ID NO: 6926 - protein, 10 aa, Severe acute respiratory syndrome-related coronavirus
  REGION 1..10: note = Table A: HLA-B*18:01H
  source 1..10: note = Severe acute respiratory syndrome coronavirus 2
FERDISTEIY

SEQ ID NO: 6927 - protein, 10 aa, Severe acute respiratory syndrome-related coronavirus
  REGION 1..10: note = Table A: HLA-B*40:06H
  source 1..10: note = Severe acute respiratory syndrome coronavirus 2
RDISTEIYQA

SEQ ID NO: 6928 - protein, 10 aa, Severe acute respiratory syndrome-related coronavirus
  REGION 1..10: note = Table A: HLA-A*68:02H
  source 1..10: note = Severe acute respiratory syndrome coronavirus 2
DISTEIYQAG

SEQ ID NO: 6929 - protein, 10 aa, Severe acute respiratory syndrome-related coronavirus
  REGION 1..10: note = Table A: HLA-B*50:01H
  source 1..10: note = Severe acute respiratory syndrome coronavirus 2
TEIYQAGSTP

SEQ ID NO: 6930 - protein, 10 aa, Severe acute respiratory syndrome-related coronavirus
  REGION 1..10: note = Table A: HLA-B*39:01H
  source 1..10: note = Severe acute respiratory syndrome coronavirus 2
YQAGSTPCNG

SEQ ID NO: 6931 - protein, 10 aa, Severe acute respiratory syndrome-related coronavirus
  REGION 1..10: note = Table A: HLA-A*24:02H HLA-A*24:07M HLA-A*23:01H
  source 1..10: note = Severe acute respiratory syndrome coronavirus 2
CYFPLQSYGF

SEQ ID NO: 6932 - protein, 10 aa, Severe acute respiratory syndrome-related coronavirus
  REGION 1..10: note = Table A: HLA-A*29:01H HLA-A*29:02H HLA-B*27:02H HLA-A*30:02M HLA-B*15:01H HLA-B*39:01H HLA-B*07:05H
  source 1..10: note = Severe acute respiratory syndrome coronavirus 2
GFQPTNGVGY

SEQ ID NO: 6933 - protein, 10 aa, Severe acute respiratory syndrome-related coronavirus
  REGION 1..10: note = Table A: HLA-B*55:02H
  source 1..10: note = Severe acute respiratory syndrome coronavirus 2
QPTNGVGYQP

SEQ ID NO: 6934 - protein, 10 aa, Severe acute respiratory syndrome-related coronavirus
  REGION 1..10: note = Table A: HLA-B*52:01H
  source 1..10: note = Severe acute respiratory syndrome coronavirus 2
VGYQPYRVVV

SEQ ID NO: 6935 - protein, 10 aa, Severe acute respiratory syndrome-related coronavirus
  REGION 1..10: note = Table A: HLA-C*15:05H
  source 1..10: note = Severe acute respiratory syndrome coronavirus 2
QPYRVVVLSF

SEQ ID NO: 6936 - protein, 10 aa, Severe acute respiratory syndrome-related coronavirus
  REGION 1..10: note = Table A: HLA-B*57:03H
  source 1..10: note = Severe acute respiratory syndrome coronavirus 2
RVVVLSFELL

SEQ ID NO: 6937 - protein, 10 aa, Severe acute respiratory syndrome-related coronavirus
  REGION 1..10: note = Table A: HLA-A*02:11H HLA-A*02:05H HLA-A*02:06M HLA-A*02:01H HLA-A*02:03H
  source 1..10: note = Severe acute respiratory syndrome coronavirus 2
VVLSFELLHA

SEQ ID NO: 6938 - protein, 10 aa, Severe acute respiratory syndrome-related coronavirus
  REGION 1..10: note = Table A: HLA-A*02:03H HLA-B*40:02H HLA-B*40:06H HLA-B*49:01H HLA-B*50:01H
  source 1..10: note = Severe acute respiratory syndrome coronavirus 2
FELLHAPATV

SEQ ID NO: 6939 - protein, 10 aa, Severe acute respiratory syndrome-related coronavirus
  REGION 1..10: note = Table A: HLA-A*02:11H HLA-A*02:01H HLA-A*02:02H
  source 1..10: note = Severe acute respiratory syndrome coronavirus 2
LLHAPATVCG

SEQ ID NO: 6940 - protein, 10 aa, Severe acute respiratory syndrome-related coronavirus
  REGION 1..10: note = Table A: HLA-A*34:02H
  source 1..10: note = Severe acute respiratory syndrome coronavirus 2
HAPATVCGPK

SEQ ID NO: 6941 - protein, 10 aa, Severe acute respiratory syndrome-related coronavirus
  REGION 1..10: note = Table A: HLA-A*03:02M HLA-A*11:01M HLA-C*07:27H
  source 1..10: note = Severe acute respiratory syndrome coronavirus 2
GTGVLTESNK

SEQ ID NO: 6942 - protein, 10 aa, Severe acute respiratory syndrome-related coronavirus
  REGION 1..10: note = Table A: HLA-A*74:01M HLA-A*31:01H
  source 1..10: note = Severe acute respiratory syndrome coronavirus 2
KFLPFQQFGR

SEQ ID NO: 6943 - protein, 10 aa, Severe acute respiratory syndrome-related coronavirus
  REGION 1..10: note = Table A: HLA-C*15:05H HLA-B*51:01H HLA-B*07:04H
  source 1..10: note = Severe acute respiratory syndrome coronavirus 2
LPFQQFGRDI

SEQ ID NO: 6944 - protein, 10 aa, Severe acute respiratory syndrome-related coronavirus
  REGION 1..10: note = Table A: HLA-A*33:01H HLA-A*26:03M HLA-A*68:01M HLA-A*68:02H HLA-A*34:01H HLA-A*34:02H HLA-A*66:01M
  source 1..10: note = Severe acute respiratory syndrome coronavirus 2
DIADTTDAVR

SEQ ID NO: 6945 - protein, 10 aa, Severe acute respiratory syndrome-related coronavirus
  REGION 1..10: note = Table A: HLA-C*15:05H HLA-B*38:02H HLA-B*07:02H HLA-B*07:04H
  source 1..10: note = Severe acute respiratory syndrome coronavirus 2
AVRDPQTLEI

SEQ ID NO: 6946 - protein, 10 aa, Severe acute respiratory syndrome-related coronavirus
  REGION 1..10: note = Table A: HLA-B*38:02H
  source 1..10: note = Severe acute respiratory syndrome coronavirus 2
VRDPQTLEIL

SEQ ID NO: 6947 - protein, 10 aa, Severe acute respiratory syndrome-related coronavirus
  REGION 1..10: note = Table A: HLA-A*25:01H HLA-A*26:01H HLA-A*26:02H HLA-A*26:03M HLA-A*68:02H HLA-A*34:02H HLA-B*38:02H HLA-B*39:01H
  source 1..10: note = Severe acute respiratory syndrome coronavirus 2
EILDITPCSF

SEQ ID NO: 6948 - protein, 10 aa, Severe acute respiratory syndrome-related coronavirus
  REGION 1..10: note = Table A: HLA-B*56:01M HLA-B*55:02M HLA-C*15:05H HLA-B*55:01H HLA-B*54:01M HLA-B*07:05H
  source 1..10: note = Severe acute respiratory syndrome coronavirus 2
TPCSFGGVSV

SEQ ID NO: 6949 - protein, 10 aa, Severe acute respiratory syndrome-related coronavirus
  REGION 1..10: note = Table A: HLA-A*02:08H
  source 1..10: note = Severe acute respiratory syndrome coronavirus 2
SVITPGTNTS

SEQ ID NO: 6950 - protein, 10 aa, Severe acute respiratory syndrome-related coronavirus
  REGION 1..10: note = Table A: HLA-A*29:02H
  source 1..10: note = Severe acute respiratory syndrome coronavirus 2
NTSNQVAVLY

SEQ ID NO: 6951 - protein, 10 aa, Severe acute respiratory syndrome-related coronavirus
  REGION 1..10: note = Table A: HLA-B*53:01H HLA-B*35:03M HLA-C*15:05H HLA-B*35:01M HLA-B*35:02M HLA-B*35:08H HLA-B*35:07M HLA-C*08:01H HLA-B*35:12M HLA-B*38:02H HLA-B*07:02H HLA-B*07:05M
  source 1..10: note = Severe acute respiratory syndrome coronavirus 2
VPVAIHADQL

SEQ ID NO: 6952 - protein, 10 aa, Severe acute respiratory syndrome-related coronavirus
  REGION 1..10: note = Table A: HLA-B*38:01M HLA-B*38:02M HLA-B*39:01H
  source 1..10: note = Severe acute respiratory syndrome coronavirus 2
IHADQLTPTW

SEQ ID NO: 6953 - protein, 10 aa, Severe acute respiratory syndrome-related coronavirus
  REGION 1..10: note = Table A: HLA-B*15:02H
  source 1..10: note = Severe acute respiratory syndrome coronavirus 2
DQLTPTWRVY

SEQ ID NO: 6954 - protein, 10 aa, Severe acute respiratory syndrome-related coronavirus
  REGION 1..10: note = Table A: HLA-A*30:02H HLA-C*15:05H HLA-B*38:02H HLA-A*32:01H HLA-B*15:01M HLA-B*15:03H HLA-B*07:05H HLA-B*57:03M HLA-B*13:01H
  source 1..10: note = Severe acute respiratory syndrome coronavirus 2
RVYSTGSNVF

SEQ ID NO: 6955 - protein, 10 aa, Severe acute respiratory syndrome-related coronavirus
  REGION 1..10: note = Table A: HLA-A*11:303H HLA-A*74:01M HLA-A*03:01H HLA-A*03:02H HLA-A*11:01H HLA-A*11:02M HLA-A*36:01H HLA-B*57:01H HLA-A*33:01H HLA-A*33:03H HLA-A*26:03M HLA-B*27:02H HLA-A*30:02H HLA-A*68:01H HLA-A*68:02M
  REGION 1..10: note = CONT. FROM ABOVE: HLA-A*34:01M HLA-A*34:02M HLA-C*07:27H HLA- A*31:01M HLA-A*66:01M
  source 1..10: note = Severe acute respiratory syndrome coronavirus 2
STGSNVFQTR

SEQ ID NO: 6956 - protein, 10 aa, Severe acute respiratory syndrome-related coronavirus
  REGION 1..10: note = Table A: HLA-B*58:01H HLA-B*46:01M HLA-A*30:02M HLA-B*35:01H HLA-B*38:02M HLA-B*15:01M HLA-B*15:02H HLA-B*15:03H HLA-B*07:05H HLA-B*15:11H
  source 1..10: note = Severe acute respiratory syndrome coronavirus 2
IGAEHVNNSY

SEQ ID NO: 6957 - protein, 10 aa, Severe acute respiratory syndrome-related coronavirus
  REGION 1..10: note = Table A: HLA-B*45:01H
  source 1..10: note = Severe acute respiratory syndrome coronavirus 2
AEHVNNSYEC

SEQ ID NO: 6958 - protein, 10 aa, Severe acute respiratory syndrome-related coronavirus
  REGION 1..10: note = Table A: HLA-B*56:01H HLA-B*55:02H
  source 1..10: note = Severe acute respiratory syndrome coronavirus 2
IPIGAGICAS

SEQ ID NO: 6959 - protein, 10 aa, Severe acute respiratory syndrome-related coronavirus
  REGION 1..10: note = Table A: HLA-C*14:02H HLA-C*14:03H HLA-A*03:02H HLA-A*11:01H HLA-A*33:01M HLA-A*33:03H HLA-B*27:02H HLA-A*30:02H HLA-A*68:01H HLA-A*31:01M HLA-A*66:01H
  source 1..10: note = Severe acute respiratory syndrome coronavirus 2
SYQTQTNSPR

SEQ ID NO: 6960 - protein, 10 aa, Severe acute respiratory syndrome-related coronavirus
  REGION 1..10: note = Table A: HLA-A*03:01H HLA-A*03:02H HLA-A*11:01M HLA-A*11:02H HLA-A*25:01M HLA-B*46:01H HLA-A*26:01M HLA-A*26:02M HLA-A*26:03H HLA-A*29:01H HLA-A*29:02H HLA-A*30:02M HLA-A*68:01H HLA-C*15:05H HLA-A*34:02H HLA-C*07:27H
  REGION 1..10: note = CONT. FROM ABOVE: HLA-B*35:01M HLA-B*35:07H HLA-B*38:02M HLA- B*15:01M HLA-B*15:02M HLA-B*39:01H HLA-B*07:05M
  source 1..10: note = Severe acute respiratory syndrome coronavirus 2
SVASQSIIAY

SEQ ID NO: 6961 - protein, 10 aa, Severe acute respiratory syndrome-related coronavirus
  REGION 1..10: note = Table A: HLA-A*68:02H
  source 1..10: note = Severe acute respiratory syndrome coronavirus 2
VASQSIIAYT

SEQ ID NO: 6962 - protein, 10 aa, Severe acute respiratory syndrome-related coronavirus
  REGION 1..10: note = Table A: HLA-B*38:02H
  source 1..10: note = Severe acute respiratory syndrome coronavirus 2
TMSLGAENSV

SEQ ID NO: 6963 - protein, 10 aa, Severe acute respiratory syndrome-related coronavirus
  REGION 1..10: note = Table A: HLA-B*38:02H HLA-B*15:01M HLA-B*15:02M
  source 1..10: note = Severe acute respiratory syndrome coronavirus 2
SLGAENSVAY

SEQ ID NO: 6964 - protein, 10 aa, Severe acute respiratory syndrome-related coronavirus
  REGION 1..10: note = Table A: HLA-C*15:05H
  source 1..10: note = Severe acute respiratory syndrome coronavirus 2
VAYSNNSIAI

SEQ ID NO: 6965 - protein, 10 aa, Severe acute respiratory syndrome-related coronavirus
  REGION 1..10: note = Table A: HLA-B*55:02H
  source 1..10: note = Severe acute respiratory syndrome coronavirus 2
IPTNFTISVT

SEQ ID NO: 6966 - protein, 10 aa, Severe acute respiratory syndrome-related coronavirus
  REGION 1..10: note = Table A: HLA-A*68:02H
  source 1..10: note = Severe acute respiratory syndrome coronavirus 2
FTISVTTEIL

SEQ ID NO: 6967 - protein, 10 aa, Severe acute respiratory syndrome-related coronavirus
  REGION 1..10: note = Table A: HLA-A*68:02H HLA-C*15:05H HLA-B*57:03H
  source 1..10: note = Severe acute respiratory syndrome coronavirus 2
VTTEILPVSM

SEQ ID NO: 6968 - protein, 10 aa, Severe acute respiratory syndrome-related coronavirus
  REGION 1..10: note = Table A: HLA-B*56:01H HLA-B*55:02H HLA-C*15:05H HLA-B*51:01H HLA-B*54:01H
  source 1..10: note = Severe acute respiratory syndrome coronavirus 2
LPVSMTKTSV

SEQ ID NO: 6969 - protein, 10 aa, Severe acute respiratory syndrome-related coronavirus
  REGION 1..10: note = Table A: HLA-B*57:03H
  source 1..10: note = Severe acute respiratory syndrome coronavirus 2
KTSVDCTMYI

SEQ ID NO: 6970 - protein, 10 aa, Severe acute respiratory syndrome-related coronavirus
  REGION 1..10: note = Table A: HLA-B*44:03H HLA-B*07:05H
  source 1..10: note = Severe acute respiratory syndrome coronavirus 2
TECSNLLLQY

SEQ ID NO: 6971 - protein, 10 aa, Severe acute respiratory syndrome-related coronavirus
  REGION 1..10: note = Table A: HLA-A*02:06H HLA-A*02:03H HLA-B*38:02H HLA-B*13:02M
  source 1..10: note = Severe acute respiratory syndrome coronavirus 2
TQLNRALTGI

SEQ ID NO: 6972 - protein, 10 aa, Severe acute respiratory syndrome-related coronavirus
  REGION 1..10: note = Table A: HLA-B*45:01H HLA-B*41:02H HLA-B*49:01H
  source 1..10: note = Severe acute respiratory syndrome coronavirus 2
VEQDKNTQEV

SEQ ID NO: 6973 - protein, 10 aa, Severe acute respiratory syndrome-related coronavirus
  REGION 1..10: note = Table A: HLA-B*44:05H HLA-B*38:01M HLA-B*38:02M HLA-B*15:02H HLA-B*39:01M HLA-B*13:01M
  source 1..10: note = Severe acute respiratory syndrome coronavirus 2
EQDKNTQEVF

SEQ ID NO: 6974 - protein, 10 aa, Severe acute respiratory syndrome-related coronavirus
  REGION 1..10: note = Table A: HLA-A*03:02H HLA-A*11:01H HLA-A*11:02H HLA-A*36:01H HLA-A*68:01H HLA-A*34:02M
  source 1..10: note = Severe acute respiratory syndrome coronavirus 2
NTQEVFAQVK

SEQ ID NO: 6975 - protein, 10 aa, Severe acute respiratory syndrome-related coronavirus
  REGION 1..10: note = Table A: HLA-B*44:02H HLA-B*44:05M HLA-B*44:03M HLA-B*40:02H HLA-B*49:01M
  source 1..10: note = Severe acute respiratory syndrome coronavirus 2
QEVFAQVKQI

SEQ ID NO: 6976 - protein, 10 aa, Severe acute respiratory syndrome-related coronavirus
  REGION 1..10: note = Table A: HLA-A*25:01M HLA-A*26:01M HLA-A*26:02M HLA-A*26:03H HLA-A*34:01H HLA-A*34:02H HLA-B*35:01H HLA-B*35:07H HLA-B*38:02H HLA-B*15:02M
  source 1..10: note = Severe acute respiratory syndrome coronavirus 2
EVFAQVKQIY

SEQ ID NO: 6977 - protein, 10 aa, Severe acute respiratory syndrome-related coronavirus
  REGION 1..10: note = Table A: HLA-A*30:01H HLA-A*34:02H
  source 1..10: note = Severe acute respiratory syndrome coronavirus 2
VFAQVKQIYK

SEQ ID NO: 6978 - protein, 10 aa, Severe acute respiratory syndrome-related coronavirus
  REGION 1..10: note = Table A: HLA-A*30:01H
  source 1..10: note = Severe acute respiratory syndrome coronavirus 2
KQIYKTPPIK

SEQ ID NO: 6979 - protein, 10 aa, Severe acute respiratory syndrome-related coronavirus
  REGION 1..10: note = Table A: HLA-C*14:03H HLA-A*24:07H
  source 1..10: note = Severe acute respiratory syndrome coronavirus 2
IYKTPPIKDF

SEQ ID NO: 6980 - protein, 10 aa, Severe acute respiratory syndrome-related coronavirus
  REGION 1..10: note = Table A: HLA-A*11:01H
  source 1..10: note = Severe acute respiratory syndrome coronavirus 2
FSQILPDPSK

SEQ ID NO: 6981 - protein, 10 aa, Severe acute respiratory syndrome-related coronavirus
  REGION 1..10: note = Table A: HLA-A*74:01H HLA-A*03:01H HLA-A*03:02H HLA-A*11:01H HLA-A*11:02H HLA-A*30:02H
  source 1..10: note = Severe acute respiratory syndrome coronavirus 2
ILPDPSKPSK

SEQ ID NO: 6982 - protein, 10 aa, Severe acute respiratory syndrome-related coronavirus
  REGION 1..10: note = Table A: HLA-A*34:01H
  source 1..10: note = Severe acute respiratory syndrome coronavirus 2
LPDPSKPSKR

SEQ ID NO: 6983 - protein, 10 aa, Severe acute respiratory syndrome-related coronavirus
  REGION 1..10: note = Table A: HLA-A*02:11H HLA-A*02:06H HLA-A*02:07M
  source 1..10: note = Severe acute respiratory syndrome coronavirus 2
FIEDLLFNKV

SEQ ID NO: 6984 - protein, 10 aa, Severe acute respiratory syndrome-related coronavirus
  REGION 1..10: note = Table A: HLA-B*44:05H
  source 1..10: note = Severe acute respiratory syndrome coronavirus 2
EDLLFNKVTL

SEQ ID NO: 6985 - protein, 10 aa, Severe acute respiratory syndrome-related coronavirus
  REGION 1..10: note = Table A: HLA-A*11:01H HLA-A*11:02H HLA-A*36:01H HLA-A*34:02H
  source 1..10: note = Severe acute respiratory syndrome coronavirus 2
VTLADAGFIK

SEQ ID NO: 6986 - protein, 10 aa, Severe acute respiratory syndrome-related coronavirus
  REGION 1..10: note = Table A: HLA-A*36:01H
  source 1..10: note = Severe acute respiratory syndrome coronavirus 2
LADAGFIKQY

SEQ ID NO: 6987 - protein, 10 aa, Severe acute respiratory syndrome-related coronavirus
  REGION 1..10: note = Table A: HLA-A*68:02H HLA-A*02:02H
  source 1..10: note = Severe acute respiratory syndrome coronavirus 2
ADAGFIKQYG

SEQ ID NO: 6988 - protein, 10 aa, Severe acute respiratory syndrome-related coronavirus
  REGION 1..10: note = Table A: HLA-B*15:01H
  source 1..10: note = Severe acute respiratory syndrome coronavirus 2
AQKFNGLTVL

SEQ ID NO: 6989 - protein, 10 aa, Severe acute respiratory syndrome-related coronavirus
  REGION 1..10: note = Table A: HLA-B*45:01H HLA-B*18:01H HLA-B*07:05H HLA-B*50:01H
  source 1..10: note = Severe acute respiratory syndrome coronavirus 2
DEMIAQYTSA

SEQ ID NO: 6990 - protein, 10 aa, Severe acute respiratory syndrome-related coronavirus
  REGION 1..10: note = Table A: HLA-A*26:03H HLA-B*38:02H
  source 1..10: note = Severe acute respiratory syndrome coronavirus 2
EMIAQYTSAL

SEQ ID NO: 6991 - protein, 10 aa, Severe acute respiratory syndrome-related coronavirus
  REGION 1..10: note = Table A: HLA-A*68:02H HLA-A*34:01H
  source 1..10: note = Severe acute respiratory syndrome coronavirus 2
MIAQYTSALL

SEQ ID NO: 6992 - protein, 10 aa, Severe acute respiratory syndrome-related coronavirus
  REGION 1..10: note = Table A: HLA-A*68:02H
  source 1..10: note = Severe acute respiratory syndrome coronavirus 2
YTSALLAGTI

SEQ ID NO: 6993 - protein, 10 aa, Severe acute respiratory syndrome-related coronavirus
  REGION 1..10: note = Table A: HLA-A*25:01H HLA-B*15:13H HLA-B*38:02H
  source 1..10: note = Severe acute respiratory syndrome coronavirus 2
LLAGTITSGW

SEQ ID NO: 6994 - protein, 10 aa, Severe acute respiratory syndrome-related coronavirus
  REGION 1..10: note = Table A: HLA-C*08:03H
  source 1..10: note = Severe acute respiratory syndrome coronavirus 2
GAGAALQIPF

SEQ ID NO: 6995 - protein, 10 aa, Severe acute respiratory syndrome-related coronavirus
  REGION 1..10: note = Table A: HLA-A*02:05H
  source 1..10: note = Severe acute respiratory syndrome coronavirus 2
LQIPFAMQMA

SEQ ID NO: 6996 - protein, 10 aa, Severe acute respiratory syndrome-related coronavirus
  REGION 1..10: note = Table A: HLA-A*36:01H
  source 1..10: note = Severe acute respiratory syndrome coronavirus 2
QIPFAMQMAY

SEQ ID NO: 6997 - protein, 10 aa, Severe acute respiratory syndrome-related coronavirus
  REGION 1..10: note = Table A: HLA-A*34:01H
  source 1..10: note = Severe acute respiratory syndrome coronavirus 2
IPFAMQMAYR

SEQ ID NO: 6998 - protein, 10 aa, Severe acute respiratory syndrome-related coronavirus
  REGION 1..10: note = Table A: HLA-A*24:07H
  source 1..10: note = Severe acute respiratory syndrome coronavirus 2
PFAMQMAYRF

SEQ ID NO: 6999 - protein, 10 aa, Severe acute respiratory syndrome-related coronavirus
  REGION 1..10: note = Table A: HLA-A*02:11H HLA-A*68:02H HLA-B*54:01H
  source 1..10: note = Severe acute respiratory syndrome coronavirus 2
MAYRFNGIGV

SEQ ID NO: 7000 - protein, 10 aa, Severe acute respiratory syndrome-related coronavirus
  REGION 1..10: note = Table A: HLA-B*27:05M HLA-B*27:02H
  source 1..10: note = Severe acute respiratory syndrome coronavirus 2
YRFNGIGVTQ

SEQ ID NO: 7001 - protein, 10 aa, Severe acute respiratory syndrome-related coronavirus
  REGION 1..10: note = Table A: HLA-B*35:03H
  source 1..10: note = Severe acute respiratory syndrome coronavirus 2
NGIGVTQNVL

SEQ ID NO: 7002 - protein, 10 aa, Severe acute respiratory syndrome-related coronavirus
  REGION 1..10: note = Table A: HLA-B*27:02H
  source 1..10: note = Severe acute respiratory syndrome coronavirus 2
TQNVLYENQK

SEQ ID NO: 7003 - protein, 10 aa, Severe acute respiratory syndrome-related coronavirus
  REGION 1..10: note = Table A: HLA-B*56:01H HLA-A*02:11H HLA-B*55:02H HLA-B*55:01H HLA-B*14:01H HLA-A*02:01H HLA-A*02:02M HLA-A*02:03M HLA-C*08:01H HLA-B*38:02H HLA-B*54:01H HLA-B*13:02H HLA-B*50:01H
  source 1..10: note = Severe acute respiratory syndrome coronavirus 2
VLYENQKLIA

SEQ ID NO: 7004 - protein, 10 aa, Severe acute respiratory syndrome-related coronavirus
  REGION 1..10: note = Table A: HLA-B*56:01H HLA-A*02:11H HLA-B*55:02H HLA-A*02:05H HLA-A*02:06H HLA-A*02:08M HLA-A*02:02H HLA-A*02:03H HLA-B*38:02H HLA-B*40:06H HLA-B*50:01H
  source 1..10: note = Severe acute respiratory syndrome coronavirus 2
KLIANQFNSA

SEQ ID NO: 7005 - protein, 10 aa, Severe acute respiratory syndrome-related coronavirus
  REGION 1..10: note = Table A: HLA-A*03:02H HLA-A*11:01H
  source 1..10: note = Severe acute respiratory syndrome coronavirus 2
ANQFNSAIGK

SEQ ID NO: 7006 - protein, 10 aa, Severe acute respiratory syndrome-related coronavirus
  REGION 1..10: note = Table A: HLA-A*02:05H HLA-A*02:08H HLA-B*38:02H HLA-B*13:02H
  source 1..10: note = Severe acute respiratory syndrome coronavirus 2
NQFNSAIGKI

SEQ ID NO: 7007 - protein, 10 aa, Severe acute respiratory syndrome-related coronavirus
  REGION 1..10: note = Table A: HLA-A*11:303H HLA-C*03:03H HLA-C*12:05H HLA-C*03:04H HLA-A*68:02H HLA-B*35:03H HLA-C*15:05H HLA-A*02:05H HLA-A*02:08H HLA-B*35:02H HLA-C*08:01M HLA-C*08:03H HLA-B*35:12H HLA-B*38:02M HLA-B*07:05H
  REGION 1..10: note = CONT. FROM ABOVE: HLA-B*57:03H
  source 1..10: note = Severe acute respiratory syndrome coronavirus 2
SAIGKIQDSL

SEQ ID NO: 7008 - protein, 10 aa, Severe acute respiratory syndrome-related coronavirus
  REGION 1..10: note = Table A: HLA-A*34:02H
  source 1..10: note = Severe acute respiratory syndrome coronavirus 2
LSSTASALGK

SEQ ID NO: 7009 - protein, 10 aa, Severe acute respiratory syndrome-related coronavirus
  REGION 1..10: note = Table A: HLA-A*03:02H HLA-A*02:11H HLA-A*02:04H HLA-A*02:05H HLA-A*02:08M HLA-A*02:01M HLA-A*02:02H HLA-A*02:03M HLA-B*38:02H HLA-B*13:02H
  source 1..10: note = Severe acute respiratory syndrome coronavirus 2
KLQDVVNQNA

SEQ ID NO: 7010 - protein, 10 aa, Severe acute respiratory syndrome-related coronavirus
  REGION 1..10: note = Table A: HLA-A*25:01H HLA-A*26:02H HLA-A*26:03M HLA-A*68:01H HLA-A*68:02H
  source 1..10: note = Severe acute respiratory syndrome coronavirus 2
DVVNQNAQAL

SEQ ID NO: 7011 - protein, 10 aa, Severe acute respiratory syndrome-related coronavirus
  REGION 1..10: note = Table A: HLA-B*38:02H HLA-B*39:01H
  source 1..10: note = Severe acute respiratory syndrome coronavirus 2
NQNAQALNTL

SEQ ID NO: 7012 - protein, 10 aa, Severe acute respiratory syndrome-related coronavirus
  REGION 1..10: note = Table A: HLA-B*38:02H
  source 1..10: note = Severe acute respiratory syndrome coronavirus 2
TLVKQLSSNF

SEQ ID NO: 7013 - protein, 10 aa, Severe acute respiratory syndrome-related coronavirus
  REGION 1..10: note = Table A: HLA-A*68:02H HLA-C*15:05H
  source 1..10: note = Severe acute respiratory syndrome coronavirus 2
SSNFGAISSV

SEQ ID NO: 7014 - protein, 10 aa, Severe acute respiratory syndrome-related coronavirus
  REGION 1..10: note = Table A: HLA-A*11:02H HLA-A*02:11H HLA-A*68:02H HLA-A*02:04H HLA-A*02:05H HLA-A*02:06H HLA-A*02:08H HLA-A*02:02H HLA-A*34:01H HLA-A*34:02H HLA-A*66:01H
  source 1..10: note = Severe acute respiratory syndrome coronavirus 2
SVLNDILSRL

SEQ ID NO: 7015 - protein, 10 aa, Severe acute respiratory syndrome-related coronavirus
  REGION 1..10: note = Table A: HLA-B*44:05M HLA-B*44:03H HLA-A*68:02H HLA-B*38:02H HLA-B*40:01H HLA-B*40:02M HLA-B*41:02H HLA-B*49:01H
  source 1..10: note = Severe acute respiratory syndrome coronavirus 2
VEAEVQIDRL

SEQ ID NO: 7016 - protein, 10 aa, Severe acute respiratory syndrome-related coronavirus
  REGION 1..10: note = Table A: HLA-B*45:01H HLA-B*40:02H HLA-B*40:06H HLA-B*41:02H HLA-B*49:01H HLA-B*50:01H
  source 1..10: note = Severe acute respiratory syndrome coronavirus 2
AEVQIDRLIT

SEQ ID NO: 7017 - protein, 10 aa, Severe acute respiratory syndrome-related coronavirus
  REGION 1..10: note = Table A: HLA-A*74:01M HLA-A*31:01M
  source 1..10: note = Severe acute respiratory syndrome coronavirus 2
VQIDRLITGR

SEQ ID NO: 7018 - protein, 10 aa, Severe acute respiratory syndrome-related coronavirus
  REGION 1..10: note = Table A: HLA-A*74:01H HLA-B*46:01H HLA-B*08:01H HLA-A*02:11H HLA-C*01:02H HLA-A*02:04M HLA-A*02:05H HLA-A*02:08H HLA-A*02:01H HLA-A*02:02M HLA-A*02:03M HLA-B*38:02H HLA-B*07:04H HLA-B*13:01H HLA-B*13:02H
  source 1..10: note = Severe acute respiratory syndrome coronavirus 2
RLITGRLQSL

SEQ ID NO: 7019 - protein, 10 aa, Severe acute respiratory syndrome-related coronavirus
  REGION 1..10: note = Table A: HLA-A*02:04H HLA-A*02:02H HLA-B*38:02H
  source 1..10: note = Severe acute respiratory syndrome coronavirus 2
SLQTYVTQQL

SEQ ID NO: 7020 - protein, 10 aa, Severe acute respiratory syndrome-related coronavirus
  REGION 1..10: note = Table A: HLA-B*13:02H
  source 1..10: note = Severe acute respiratory syndrome coronavirus 2
LQTYVTQQLI

SEQ ID NO: 7021 - protein, 10 aa, Severe acute respiratory syndrome-related coronavirus
  REGION 1..10: note = Table A: HLA-A*74:01H HLA-A*36:01H HLA-A*68:01H HLA-A*34:01H HLA-A*34:02H HLA-A*66:01H
  source 1..10: note = Severe acute respiratory syndrome coronavirus 2
QTYVTQQLIR

SEQ ID NO: 7022 - protein, 10 aa, Severe acute respiratory syndrome-related coronavirus
  REGION 1..10: note = Table A: HLA-B*56:01H HLA-B*55:02H HLA-B*55:01H HLA-A*02:08H HLA-B*54:01H
  source 1..10: note = Severe acute respiratory syndrome coronavirus 2
YVTQQLIRAA

SEQ ID NO: 7023 - protein, 10 aa, Severe acute respiratory syndrome-related coronavirus
  REGION 1..10: note = Table A: HLA-B*38:02H
  source 1..10: note = Severe acute respiratory syndrome coronavirus 2
TQQLIRAAEI

SEQ ID NO: 7024 - protein, 10 aa, Severe acute respiratory syndrome-related coronavirus
  REGION 1..10: note = Table A: HLA-B*44:05H HLA-B*45:01H HLA-B*40:02H HLA-B*40:06M HLA-B*41:02H HLA-B*49:01M HLA-B*50:01H
  source 1..10: note = Severe acute respiratory syndrome coronavirus 2
AEIRASANLA

SEQ ID NO: 7025 - protein, 10 aa, Severe acute respiratory syndrome-related coronavirus
  REGION 1..10: note = Table A: HLA-A*03:01H HLA-A*03:02M
  source 1..10: note = Severe acute respiratory syndrome coronavirus 2
RASANLAATK

SEQ ID NO: 7026 - protein, 10 aa, Severe acute respiratory syndrome-related coronavirus
  REGION 1..10: note = Table A: HLA-A*68:01H HLA-C*15:05H HLA-B*57:03H
  source 1..10: note = Severe acute respiratory syndrome coronavirus 2
ASANLAATKM

SEQ ID NO: 7027 - protein, 10 aa, Severe acute respiratory syndrome-related coronavirus
  REGION 1..10: note = Table A: HLA-A*36:01H
  source 1..10: note = Severe acute respiratory syndrome coronavirus 2
MSECVLGQSK

SEQ ID NO: 7028 - protein, 10 aa, Severe acute respiratory syndrome-related coronavirus
  REGION 1..10: note = Table A: HLA-B*13:02H
  source 1..10: note = Severe acute respiratory syndrome coronavirus 2
GQSKRVDFCG

SEQ ID NO: 7029 - protein, 10 aa, Severe acute respiratory syndrome-related coronavirus
  REGION 1..10: note = Table A: HLA-B*27:05H
  source 1..10: note = Severe acute respiratory syndrome coronavirus 2
KRVDFCGKGY

SEQ ID NO: 7030 - protein, 10 aa, Severe acute respiratory syndrome-related coronavirus
  REGION 1..10: note = Table A: HLA-A*02:02H
  source 1..10: note = Severe acute respiratory syndrome coronavirus 2
VDFCGKGYHL

SEQ ID NO: 7031 - protein, 10 aa, Severe acute respiratory syndrome-related coronavirus
  REGION 1..10: note = Table A: HLA-B*39:06M
  source 1..10: note = Severe acute respiratory syndrome coronavirus 2
YHLMSFPQSA

SEQ ID NO: 7032 - protein, 10 aa, Severe acute respiratory syndrome-related coronavirus
  REGION 1..10: note = Table A: HLA-B*55:02H HLA-B*54:01H
  source 1..10: note = Severe acute respiratory syndrome coronavirus 2
FPQSAPHGVV

SEQ ID NO: 7033 - protein, 10 aa, Severe acute respiratory syndrome-related coronavirus
  REGION 1..10: note = Table A: HLA-B*15:01H
  source 1..10: note = Severe acute respiratory syndrome coronavirus 2
PQSAPHGVVF

SEQ ID NO: 7034 - protein, 10 aa, Severe acute respiratory syndrome-related coronavirus
  REGION 1..10: note = Table A: HLA-C*15:02H HLA-B*57:03H
  source 1..10: note = Severe acute respiratory syndrome coronavirus 2
QSAPHGVVFL

SEQ ID NO: 7035 - protein, 10 aa, Severe acute respiratory syndrome-related coronavirus
  REGION 1..10: note = Table A: HLA-B*56:01M HLA-B*55:02M HLA-C*15:05H HLA-B*55:01H HLA-B*07:04H
  source 1..10: note = Severe acute respiratory syndrome coronavirus 2
APHGVVFLHV

SEQ ID NO: 7036 - protein, 10 aa, Severe acute respiratory syndrome-related coronavirus
  REGION 1..10: note = Table A: HLA-A*03:01H HLA-A*03:02M HLA-A*11:01H HLA-A*11:02H HLA-A*36:01H HLA-B*27:02H HLA-A*68:01M HLA-A*68:02H HLA-A*34:01H HLA-A*34:02H HLA-A*66:01H
  source 1..10: note = Severe acute respiratory syndrome coronavirus 2
HVTYVPAQEK

SEQ ID NO: 7037 - protein, 10 aa, Severe acute respiratory syndrome-related coronavirus
  REGION 1..10: note = Table A: HLA-A*24:02H HLA-A*24:07M HLA-A*23:01M
  source 1..10: note = Severe acute respiratory syndrome coronavirus 2
TYVPAQEKNF

SEQ ID NO: 7038 - protein, 10 aa, Severe acute respiratory syndrome-related coronavirus
  REGION 1..10: note = Table A: HLA-A*68:02H
  source 1..10: note = Severe acute respiratory syndrome coronavirus 2
TTAPAICHDG

SEQ ID NO: 7039 - protein, 10 aa, Severe acute respiratory syndrome-related coronavirus
  REGION 1..10: note = Table A: HLA-C*06:02H HLA-A*02:11H HLA-A*68:02H HLA-A*02:05H HLA-A*02:02H HLA-B*38:01H HLA-B*38:02M HLA-B*39:06H HLA-B*39:01H HLA-B*15:10M
  source 1..10: note = Severe acute respiratory syndrome coronavirus 2
AHFPREGVFV

SEQ ID NO: 7040 - protein, 10 aa, Severe acute respiratory syndrome-related coronavirus
  REGION 1..10: note = Table A: HLA-B*56:01H HLA-B*55:02H HLA-B*54:01H
  source 1..10: note = Severe acute respiratory syndrome coronavirus 2
FPREGVFVSN

SEQ ID NO: 7041 - protein, 10 aa, Severe acute respiratory syndrome-related coronavirus
  REGION 1..10: note = Table A: HLA-B*58:01H HLA-B*57:01H HLA-A*25:01H HLA-B*15:13M HLA-A*32:01H HLA-B*57:03M
  source 1..10: note = Severe acute respiratory syndrome coronavirus 2
GVFVSNGTHW

SEQ ID NO: 7042 - protein, 10 aa, Severe acute respiratory syndrome-related coronavirus
  REGION 1..10: note = Table A: HLA-C*14:02H HLA-C*14:03H HLA-A*24:07M HLA-A*23:01H
  source 1..10: note = Severe acute respiratory syndrome coronavirus 2
VFVSNGTHWF

SEQ ID NO: 7043 - protein, 10 aa, Severe acute respiratory syndrome-related coronavirus
  REGION 1..10: note = Table A: HLA-A*68:02M HLA-A*02:02H
  source 1..10: note = Severe acute respiratory syndrome coronavirus 2
FVSNGTHWFV

SEQ ID NO: 7044 - protein, 10 aa, Severe acute respiratory syndrome-related coronavirus
  REGION 1..10: note = Table A: HLA-C*14:03H HLA-A*29:02H
  source 1..10: note = Severe acute respiratory syndrome coronavirus 2
HWFVTQRNFY

SEQ ID NO: 7045 - protein, 10 aa, Severe acute respiratory syndrome-related coronavirus
  REGION 1..10: note = Table A: HLA-B*52:01H HLA-B*13:02H
  source 1..10: note = Severe acute respiratory syndrome coronavirus 2
TQRNFYEPQI

SEQ ID NO: 7046 - protein, 10 aa, Severe acute respiratory syndrome-related coronavirus
  REGION 1..10: note = Table A: HLA-A*02:11H HLA-A*68:02H HLA-A*02:05M HLA-A*02:06H HLA-A*02:07H HLA-A*02:08M HLA-A*02:01H HLA-A*02:02H HLA-A*02:03H HLA-C*08:01H HLA-B*38:02H HLA-B*13:02H
  source 1..10: note = Severe acute respiratory syndrome coronavirus 2
VVIGIVNNTV

SEQ ID NO: 7047 - protein, 10 aa, Severe acute respiratory syndrome-related coronavirus
  REGION 1..10: note = Table A: HLA-A*11:303H HLA-A*03:01H HLA-A*03:02H HLA-A*11:01H HLA-A*11:02H HLA-A*02:11H HLA-C*03:04H HLA-A*30:02H HLA-A*68:01H HLA-A*68:02H HLA-B*35:03H HLA-C*15:05H HLA-A*02:04H HLA-A*02:05H HLA-A*02:06H
  REGION 1..10: note = CONT. FROM ABOVE: HLA-A*02:07H HLA-A*02:08H HLA-A*02:01H HLA- A*02:02H HLA-A*34:02H HLA-B*35:01H HLA-C*08:01H HLA-C*08:03H HLA-B*38:02H HLA-B*39:01H HLA-B*07:05H
  source 1..10: note = Severe acute respiratory syndrome coronavirus 2
TVYDPLQPEL

SEQ ID NO: 7048 - protein, 10 aa, Severe acute respiratory syndrome-related coronavirus
  REGION 1..10: note = Table A: HLA-B*35:01M HLA-B*35:02H HLA-B*35:08M HLA-B*35:07H HLA-B*35:12H HLA-B*38:02H HLA-B*39:01H HLA-B*07:05H
  source 1..10: note = Severe acute respiratory syndrome coronavirus 2
DPLQPELDSF

SEQ ID NO: 7049 - protein, 10 aa, Severe acute respiratory syndrome-related coronavirus
  REGION 1..10: note = Table A: HLA-B*35:01H
  source 1..10: note = Severe acute respiratory syndrome coronavirus 2
DSFKEELDKY

SEQ ID NO: 7050 - protein, 10 aa, Severe acute respiratory syndrome-related coronavirus
  REGION 1..10: note = Table A: HLA-B*39:01H
  source 1..10: note = Severe acute respiratory syndrome coronavirus 2
NHTSPDVDLG

SEQ ID NO: 7051 - protein, 10 aa, Severe acute respiratory syndrome-related coronavirus
  REGION 1..10: note = Table A: HLA-B*40:02H
  source 1..10: note = Severe acute respiratory syndrome coronavirus 2
GDISGINASV

SEQ ID NO: 7052 - protein, 10 aa, Severe acute respiratory syndrome-related coronavirus
  REGION 1..10: note = Table A: HLA-A*68:02H
  source 1..10: note = Severe acute respiratory syndrome coronavirus 2
DISGINASVV

SEQ ID NO: 7053 - protein, 10 aa, Severe acute respiratory syndrome-related coronavirus
  REGION 1..10: note = Table A: HLA-A*03:02H HLA-A*68:01H HLA-A*34:02H
  source 1..10: note = Severe acute respiratory syndrome coronavirus 2
INASVVNIQK

SEQ ID NO: 7054 - protein, 10 aa, Severe acute respiratory syndrome-related coronavirus
  REGION 1..10: note = Table A: HLA-B*45:01M HLA-B*40:02H HLA-B*40:06M HLA-B*50:01H
  source 1..10: note = Severe acute respiratory syndrome coronavirus 2
KEIDRLNEVA

SEQ ID NO: 7055 - protein, 10 aa, Severe acute respiratory syndrome-related coronavirus
  REGION 1..10: note = Table A: HLA-A*36:01H HLA-A*68:01H HLA-A*68:02H HLA-A*34:02H
  source 1..10: note = Severe acute respiratory syndrome coronavirus 2
EIDRLNEVAK

SEQ ID NO: 7056 - protein, 10 aa, Severe acute respiratory syndrome-related coronavirus
  REGION 1..10: note = Table A: HLA-A*68:02H HLA-A*02:08H
  source 1..10: note = Severe acute respiratory syndrome coronavirus 2
EVAKNLNESL

SEQ ID NO: 7057 - protein, 10 aa, Severe acute respiratory syndrome-related coronavirus
  REGION 1..10: note = Table A: HLA-B*44:05M HLA-B*40:01H HLA-B*40:02H
  source 1..10: note = Severe acute respiratory syndrome coronavirus 2
NESLIDLQEL

SEQ ID NO: 7058 - protein, 10 aa, Severe acute respiratory syndrome-related coronavirus
  REGION 1..10: note = Table A: HLA-A*03:02H HLA-A*11:01H HLA-A*11:02H HLA-B*27:02H
  source 1..10: note = Severe acute respiratory syndrome coronavirus 2
SLIDLQELGK

SEQ ID NO: 7059 - protein, 10 aa, Severe acute respiratory syndrome-related coronavirus
  REGION 1..10: note = Table A: HLA-A*36:01M HLA-A*01:01M
  source 1..10: note = Severe acute respiratory syndrome coronavirus 2
LIDLQELGKY

SEQ ID NO: 7060 - protein, 10 aa, Severe acute respiratory syndrome-related coronavirus
  REGION 1..10: note = Table A: HLA-A*36:01H HLA-A*01:01H
  source 1..10: note = Severe acute respiratory syndrome coronavirus 2
LQELGKYEQY

SEQ ID NO: 7061 - protein, 10 aa, Severe acute respiratory syndrome-related coronavirus
  REGION 1..10: note = Table A: HLA-B*49:01H
  source 1..10: note = Severe acute respiratory syndrome coronavirus 2
QELGKYEQYI

SEQ ID NO: 7062 - protein, 10 aa, Severe acute respiratory syndrome-related coronavirus
  REGION 1..10: note = Table A: HLA-A*24:07M
  source 1..10: note = Severe acute respiratory syndrome coronavirus 2
QYIKWPWYIW

SEQ ID NO: 7063 - protein, 10 aa, Severe acute respiratory syndrome-related coronavirus
  REGION 1..10: note = Table A: HLA-A*24:07M
  source 1..10: note = Severe acute respiratory syndrome coronavirus 2
KWPWYIWLGF

SEQ ID NO: 7064 - protein, 10 aa, Severe acute respiratory syndrome-related coronavirus
  REGION 1..10: note = Table A: HLA-B*39:01H
  source 1..10: note = Severe acute respiratory syndrome coronavirus 2
FDEDDSEPVL

SEQ ID NO: 7065 - protein, 10 aa, Severe acute respiratory syndrome-related coronavirus
  REGION 1..10: note = Table A: HLA-B*44:05H HLA-B*40:01H HLA-B*40:02M
  source 1..10: note = Severe acute respiratory syndrome coronavirus 2
SEPVLKGVKL

SEQ ID NO: 7066 - protein, 10 aa, Severe acute respiratory syndrome-related coronavirus
  REGION 1..10: note = Table A: HLA-A*02:02M HLA-A*02:03H
  source 1..10: note = Severe acute respiratory syndrome coronavirus 2
VLKGVKLHYT

SEQ ID NO: 7067 - protein, 11 aa, Severe acute respiratory syndrome-related coronavirus
  REGION 1..11: note = Table A: HLA-A*02:11H HLA-A*02:01H
  source 1..11: note = Severe acute respiratory syndrome coronavirus 2
VLLPLVSSQCV

SEQ ID NO: 7068 - protein, 11 aa, Severe acute respiratory syndrome-related coronavirus
  REGION 1..11: note = Table A: HLA-A*36:01H
  source 1..11: note = Severe acute respiratory syndrome coronavirus 2
LTTRTQLPPAY

SEQ ID NO: 7069 - protein, 11 aa, Severe acute respiratory syndrome-related coronavirus
  REGION 1..11: note = Table A: HLA-B*44:05H HLA-A*24:02H HLA-A*23:01H HLA-B*38:01H HLA-B*38:02M HLA-B*15:01M HLA-B*15:02H HLA-B*15:03H HLA-B*39:01H HLA-B*13:01H
  source 1..11: note = Severe acute respiratory syndrome coronavirus 2
TQLPPAYTNSF

SEQ ID NO: 7070 - protein, 11 aa, Severe acute respiratory syndrome-related coronavirus
  REGION 1..11: note = Table A: HLA-A*74:01M HLA-A*31:01H
  source 1..11: note = Severe acute respiratory syndrome coronavirus 2
RGVYYPDKVFR

SEQ ID NO: 7071 - protein, 11 aa, Severe acute respiratory syndrome-related coronavirus
  REGION 1..11: note = Table A: HLA-C*14:03H
  source 1..11: note = Severe acute respiratory syndrome coronavirus 2
YYPDKVFRSSV

SEQ ID NO: 7072 - protein, 11 aa, Severe acute respiratory syndrome-related coronavirus
  REGION 1..11: note = Table A: HLA-B*35:03H HLA-C*15:05H HLA-B*07:02H HLA-B*07:04H
  source 1..11: note = Severe acute respiratory syndrome coronavirus 2
YPDKVFRSSVL

SEQ ID NO: 7073 - protein, 11 aa, Severe acute respiratory syndrome-related coronavirus
  REGION 1..11: note = Table A: HLA-A*02:11H HLA-A*02:08H
  source 1..11: note = Severe acute respiratory syndrome coronavirus 2
KVFRSSVLHST

SEQ ID NO: 7074 - protein, 11 aa, Severe acute respiratory syndrome-related coronavirus
  REGION 1..11: note = Table A: HLA-B*58:01H HLA-B*57:03H
  source 1..11: note = Severe acute respiratory syndrome coronavirus 2
SSVLHSTQDLF

SEQ ID NO: 7075 - protein, 11 aa, Severe acute respiratory syndrome-related coronavirus
  REGION 1..11: note = Table A: HLA-B*57:03H
  source 1..11: note = Severe acute respiratory syndrome coronavirus 2
HSTQDLFLPFF

SEQ ID NO: 7076 - protein, 11 aa, Severe acute respiratory syndrome-related coronavirus
  REGION 1..11: note = Table A: HLA-A*24:07H HLA-A*23:01H
  source 1..11: note = Severe acute respiratory syndrome coronavirus 2
LFLPFFSNVTW

SEQ ID NO: 7077 - protein, 11 aa, Severe acute respiratory syndrome-related coronavirus
  REGION 1..11: note = Table A: HLA-C*08:03H
  source 1..11: note = Severe acute respiratory syndrome coronavirus 2
HAIHVSGTNGT

SEQ ID NO: 7078 - protein, 11 aa, Severe acute respiratory syndrome-related coronavirus
  REGION 1..11: note = Table A: HLA-A*03:02H HLA-A*36:01H HLA-A*30:02H
  source 1..11: note = Severe acute respiratory syndrome coronavirus 2
AIHVSGTNGTK

SEQ ID NO: 7079 - protein, 11 aa, Severe acute respiratory syndrome-related coronavirus
  REGION 1..11: note = Table A: HLA-A*34:01H
  source 1..11: note = Severe acute respiratory syndrome coronavirus 2
HVSGTNGTKRF

SEQ ID NO: 7080 - protein, 11 aa, Severe acute respiratory syndrome-related coronavirus
  REGION 1..11: note = Table A: HLA-B*35:01H
  source 1..11: note = Severe acute respiratory syndrome coronavirus 2
NPVLPFNDGVY

SEQ ID NO: 7081 - protein, 11 aa, Severe acute respiratory syndrome-related coronavirus
  REGION 1..11: note = Table A: HLA-A*24:07H HLA-B*57:03H
  source 1..11: note = Severe acute respiratory syndrome coronavirus 2
PVLPFNDGVYF

SEQ ID NO: 7082 - protein, 11 aa, Severe acute respiratory syndrome-related coronavirus
  REGION 1..11: note = Table A: HLA-A*24:02H HLA-A*24:07H HLA-A*23:01H
  source 1..11: note = Severe acute respiratory syndrome coronavirus 2
VYFASTEKSNI

SEQ ID NO: 7083 - protein, 11 aa, Severe acute respiratory syndrome-related coronavirus
  REGION 1..11: note = Table A: HLA-A*68:01H
  source 1..11: note = Severe acute respiratory syndrome coronavirus 2
FASTEKSNIIR

SEQ ID NO: 7084 - protein, 11 aa, Severe acute respiratory syndrome-related coronavirus
  REGION 1..11: note = Table A: HLA-B*58:01H HLA-B*57:01H HLA-B*57:03M
  source 1..11: note = Severe acute respiratory syndrome coronavirus 2
STEKSNIIRGW

SEQ ID NO: 7085 - protein, 11 aa, Severe acute respiratory syndrome-related coronavirus
  REGION 1..11: note = Table A: HLA-C*08:03H
  source 1..11: note = Severe acute respiratory syndrome coronavirus 2
GTTLDSKTQSL

SEQ ID NO: 7086 - protein, 11 aa, Severe acute respiratory syndrome-related coronavirus
  REGION 1..11: note = Table A: HLA-A*34:02H HLA-C*08:03H
  source 1..11: note = Severe acute respiratory syndrome coronavirus 2
TTLDSKTQSLL

SEQ ID NO: 7087 - protein, 11 aa, Severe acute respiratory syndrome-related coronavirus
  REGION 1..11: note = Table A: HLA-A*02:08H
  source 1..11: note = Severe acute respiratory syndrome coronavirus 2
KTQSLLIVNNA

SEQ ID NO: 7088 - protein, 11 aa, Severe acute respiratory syndrome-related coronavirus
  REGION 1..11: note = Table A: HLA-A*03:02M HLA-A*11:01M HLA-A*11:02H HLA-A*36:01H HLA-A*68:01H HLA-A*34:02H
  source 1..11: note = Severe acute respiratory syndrome coronavirus 2
IVNNATNVVIK

SEQ ID NO: 7089 - protein, 11 aa, Severe acute respiratory syndrome-related coronavirus
  REGION 1..11: note = Table A: HLA-B*57:03H
  source 1..11: note = Severe acute respiratory syndrome coronavirus 2
ATNVVIKVCEF

SEQ ID NO: 7090 - protein, 11 aa, Severe acute respiratory syndrome-related coronavirus
  REGION 1..11: note = Table A: HLA-C*12:02H
  source 1..11: note = Severe acute respiratory syndrome coronavirus 2
FCNDPFLGVYY

SEQ ID NO: 7091 - protein, 11 aa, Severe acute respiratory syndrome-related coronavirus
  REGION 1..11: note = Table A: HLA-A*33:01H
  source 1..11: note = Severe acute respiratory syndrome coronavirus 2
NNKSWMESEFR

SEQ ID NO: 7092 - protein, 11 aa, Severe acute respiratory syndrome-related coronavirus
  REGION 1..11: note = Table A: HLA-B*58:01H HLA-B*58:02M HLA-A*74:01H HLA-A*36:01M HLA-B*57:01H HLA-A*30:02H HLA-A*32:01M HLA-B*15:03H HLA-B*57:03H
  source 1..11: note = Severe acute respiratory syndrome coronavirus 2
KSWMESEFRVY

SEQ ID NO: 7093 - protein, 11 aa, Severe acute respiratory syndrome-related coronavirus
  REGION 1..11: note = Table A: HLA-B*45:01M HLA-B*40:06H HLA-B*50:01H
  source 1..11: note = Severe acute respiratory syndrome coronavirus 2
MESEFRVYSSA

SEQ ID NO: 7094 - protein, 11 aa, Severe acute respiratory syndrome-related coronavirus
  REGION 1..11: note = Table A: HLA-A*32:01H HLA-B*57:03H
  source 1..11: note = Severe acute respiratory syndrome coronavirus 2
RVYSSANNCTF

SEQ ID NO: 7095 - protein, 11 aa, Severe acute respiratory syndrome-related coronavirus
  REGION 1..11: note = Table A: HLA-C*04:03H
  source 1..11: note = Severe acute respiratory syndrome coronavirus 2
TFEYVSQPFLM

SEQ ID NO: 7096 - protein, 11 aa, Severe acute respiratory syndrome-related coronavirus
  REGION 1..11: note = Table A: HLA-A*34:02H
  source 1..11: note = Severe acute respiratory syndrome coronavirus 2
MDLEGKQGNFK

SEQ ID NO: 7097 - protein, 11 aa, Severe acute respiratory syndrome-related coronavirus
  REGION 1..11: note = Table A: HLA-A*11:01H HLA-A*11:02H HLA-A*34:02H
  source 1..11: note = Severe acute respiratory syndrome coronavirus 2
FVFKNIDGYFK

SEQ ID NO: 7098 - protein, 11 aa, Severe acute respiratory syndrome-related coronavirus
  REGION 1..11: note = Table A: HLA-A*24:07M HLA-A*23:01H
  source 1..11: note = Severe acute respiratory syndrome coronavirus 2
VFKNIDGYFKI

SEQ ID NO: 7099 - protein, 11 aa, Severe acute respiratory syndrome-related coronavirus
  REGION 1..11: note = Table A: HLA-B*58:02H HLA-A*74:01H HLA-A*02:11H HLA-A*02:08H HLA-B*57:03H
  source 1..11: note = Severe acute respiratory syndrome coronavirus 2
KIYSKHTPINL

SEQ ID NO: 7100 - protein, 11 aa, Severe acute respiratory syndrome-related coronavirus
  REGION 1..11: note = Table A: HLA-B*56:01H HLA-B*55:02H HLA-B*54:01H
  source 1..11: note = Severe acute respiratory syndrome coronavirus 2
LVRDLPQGFSA

SEQ ID NO: 7101 - protein, 11 aa, Severe acute respiratory syndrome-related coronavirus
  REGION 1..11: note = Table A: HLA-B*35:03H
  source 1..11: note = Severe acute respiratory syndrome coronavirus 2
LPQGFSALEPL

SEQ ID NO: 7102 - protein, 11 aa, Severe acute respiratory syndrome-related coronavirus
  REGION 1..11: note = Table A: HLA-A*26:01H
  source 1..11: note = Severe acute respiratory syndrome coronavirus 2
DLPIGINITRF

SEQ ID NO: 7103 - protein, 11 aa, Severe acute respiratory syndrome-related coronavirus
  REGION 1..11: note = Table A: HLA-A*25:01M HLA-B*15:13M HLA-B*38:02H
  source 1..11: note = Severe acute respiratory syndrome coronavirus 2
YLTPGDSSSGW

SEQ ID NO: 7104 - protein, 11 aa, Severe acute respiratory syndrome-related coronavirus
  REGION 1..11: note = Table A: HLA-B*56:01H HLA-B*55:02M
  source 1..11: note = Severe acute respiratory syndrome coronavirus 2
TPGDSSSGWTA

SEQ ID NO: 7105 - protein, 11 aa, Severe acute respiratory syndrome-related coronavirus
  REGION 1..11: note = Table A: HLA-A*29:02H HLA-A*30:02H
  source 1..11: note = Severe acute respiratory syndrome coronavirus 2
SGWTAGAAAYY

SEQ ID NO: 7106 - protein, 11 aa, Severe acute respiratory syndrome-related coronavirus
  REGION 1..11: note = Table A: HLA-A*74:01H
  source 1..11: note = Severe acute respiratory syndrome coronavirus 2
AAYYVGYLQPR

SEQ ID NO: 7107 - protein, 11 aa, Severe acute respiratory syndrome-related coronavirus
  REGION 1..11: note = Table A: HLA-C*14:02H HLA-C*14:03M HLA-A*24:02M HLA-A*24:07H HLA-A*23:01M
  source 1..11: note = Severe acute respiratory syndrome coronavirus 2
YYVGYLQPRTF

SEQ ID NO: 7108 - protein, 11 aa, Severe acute respiratory syndrome-related coronavirus
  REGION 1..11: note = Table A: HLA-A*29:02H
  source 1..11: note = Severe acute respiratory syndrome coronavirus 2
YLQPRTFLLKY

SEQ ID NO: 7109 - protein, 11 aa, Severe acute respiratory syndrome-related coronavirus
  REGION 1..11: note = Table A: HLA-B*57:03H
  source 1..11: note = Severe acute respiratory syndrome coronavirus 2
KSFTVEKGIYQ

SEQ ID NO: 7110 - protein, 11 aa, Severe acute respiratory syndrome-related coronavirus
  REGION 1..11: note = Table A: HLA-A*68:02H
  source 1..11: note = Severe acute respiratory syndrome coronavirus 2
FTVEKGIYQTS

SEQ ID NO: 7111 - protein, 11 aa, Severe acute respiratory syndrome-related coronavirus
  REGION 1..11: note = Table A: HLA-B*27:05H
  source 1..11: note = Severe acute respiratory syndrome coronavirus 2
FRVQPTESIVR

SEQ ID NO: 7112 - protein, 11 aa, Severe acute respiratory syndrome-related coronavirus
  REGION 1..11: note = Table A: HLA-B*58:01H HLA-A*74:01M HLA-A*03:02M HLA-A*11:01H HLA-A*11:02H HLA-B*57:01H HLA-A*30:02M HLA-A*32:01H HLA-B*15:01H HLA-A*31:01H HLA-B*57:03H HLA-B*13:01H
  source 1..11: note = Severe acute respiratory syndrome coronavirus 2
RVQPTESIVRF

SEQ ID NO: 7113 - protein, 11 aa, Severe acute respiratory syndrome-related coronavirus
  REGION 1..11: note = Table A: HLA-A*24:07M HLA-A*23:01H
  source 1..11: note = Severe acute respiratory syndrome coronavirus 2
PFGEVFNATRF

SEQ ID NO: 7114 - protein, 11 aa, Severe acute respiratory syndrome-related coronavirus
  REGION 1..11: note = Table A: HLA-A*25:01H HLA-A*26:01M HLA-A*26:02H HLA-A*26:03H HLA-A*68:02M HLA-A*34:01H HLA-A*34:02H HLA-A*66:01H
  source 1..11: note = Severe acute respiratory syndrome coronavirus 2
EVFNATRFASV

SEQ ID NO: 7115 - protein, 11 aa, Severe acute respiratory syndrome-related coronavirus
  REGION 1..11: note = Table A: HLA-C*14:03H
  source 1..11: note = Severe acute respiratory syndrome coronavirus 2
VFNATRFASVY

SEQ ID NO: 7116 - protein, 11 aa, Severe acute respiratory syndrome-related coronavirus
  REGION 1..11: note = Table A: HLA-B*27:05H
  source 1..11: note = Severe acute respiratory syndrome coronavirus 2
TRFASVYAWNR

SEQ ID NO: 7117 - protein, 11 aa, Severe acute respiratory syndrome-related coronavirus
  REGION 1..11: note = Table A: HLA-B*46:01H HLA-A*24:07H HLA-A*23:01H HLA-B*38:02H HLA-B*15:01H
  source 1..11: note = Severe acute respiratory syndrome coronavirus 2
VLYNSASFSTF

SEQ ID NO: 7118 - protein, 11 aa, Severe acute respiratory syndrome-related coronavirus
  REGION 1..11: note = Table A: HLA-C*03:04H
  source 1..11: note = Severe acute respiratory syndrome coronavirus 2
YGVSPTKLNDL

SEQ ID NO: 7119 - protein, 11 aa, Severe acute respiratory syndrome-related coronavirus
  REGION 1..11: note = Table A: HLA-A*68:02H
  source 1..11: note = Severe acute respiratory syndrome coronavirus 2
ADSFVIRGDEV

SEQ ID NO: 7120 - protein, 11 aa, Severe acute respiratory syndrome-related coronavirus
  REGION 1..11: note = Table A: HLA-A*33:01H HLA-A*68:01H HLA-A*68:02H
  source 1..11: note = Severe acute respiratory syndrome coronavirus 2
DSFVIRGDEVR

SEQ ID NO: 7121 - protein, 11 aa, Severe acute respiratory syndrome-related coronavirus
  REGION 1..11: note = Table A: HLA-A*25:01H HLA-A*02:11H HLA-A*68:02M HLA-A*02:05M HLA-A*02:06M HLA-A*02:08M HLA-A*02:02H HLA-A*02:03H HLA-B*38:02H
  source 1..11: note = Severe acute respiratory syndrome coronavirus 2
FVIRGDEVRQI

SEQ ID NO: 7122 - protein, 11 aa, Severe acute respiratory syndrome-related coronavirus
  REGION 1..11: note = Table A: HLA-A*33:03H HLA-A*34:01H
  source 1..11: note = Severe acute respiratory syndrome coronavirus 2
EVRQIAPGQTG

SEQ ID NO: 7123 - protein, 11 aa, Severe acute respiratory syndrome-related coronavirus
  REGION 1..11: note = Table A: HLA-A*30:02H HLA-B*38:02H HLA-B*13:01M HLA-B*13:02M
  source 1..11: note = Severe acute respiratory syndrome coronavirus 2
RQIAPGQTGKI

SEQ ID NO: 7124 - protein, 11 aa, Severe acute respiratory syndrome-related coronavirus
  REGION 1..11: note = Table A: HLA-B*35:01H
  source 1..11: note = Severe acute respiratory syndrome coronavirus 2
APGQTGKIADY

SEQ ID NO: 7125 - protein, 11 aa, Severe acute respiratory syndrome-related coronavirus
  REGION 1..11: note = Table A: HLA-A*30:02H
  source 1..11: note = Severe acute respiratory syndrome coronavirus 2
GQTGKIADYNY

SEQ ID NO: 7126 - protein, 11 aa, Severe acute respiratory syndrome-related coronavirus
  REGION 1..11: note = Table A: HLA-A*02:11H HLA-A*02:07H HLA-B*13:02H
  source 1..11: note = Severe acute respiratory syndrome coronavirus 2
KLPDDFTGCVI

SEQ ID NO: 7127 - protein, 11 aa, Severe acute respiratory syndrome-related coronavirus
  REGION 1..11: note = Table A: HLA-B*54:01H
  source 1..11: note = Severe acute respiratory syndrome coronavirus 2
LPDDFTGCVIA

SEQ ID NO: 7128 - protein, 11 aa, Severe acute respiratory syndrome-related coronavirus
  REGION 1..11: note = Table A: HLA-A*36:01H
  source 1..11: note = Severe acute respiratory syndrome coronavirus 2
IAWNSNNLDSK

SEQ ID NO: 7129 - protein, 11 aa, Severe acute respiratory syndrome-related coronavirus
  REGION 1..11: note = Table A: HLA-A*29:02H HLA-A*30:02H
  source 1..11: note = Severe acute respiratory syndrome coronavirus 2
NNLDSKVGGNY

SEQ ID NO: 7130 - protein, 11 aa, Severe acute respiratory syndrome-related coronavirus
  REGION 1..11: note = Table A: HLA-A*33:01H HLA-A*33:03H
  source 1..11: note = Severe acute respiratory syndrome coronavirus 2
DSKVGGNYNYL

SEQ ID NO: 7131 - protein, 11 aa, Severe acute respiratory syndrome-related coronavirus
  REGION 1..11: note = Table A: HLA-A*74:01H
  source 1..11: note = Severe acute respiratory syndrome coronavirus 2
KVGGNYNYLYR

SEQ ID NO: 7132 - protein, 11 aa, Severe acute respiratory syndrome-related coronavirus
  REGION 1..11: note = Table A: HLA-A*74:01H HLA-A*32:01H
  source 1..11: note = Severe acute respiratory syndrome coronavirus 2
RLFRKSNLKPF

SEQ ID NO: 7133 - protein, 11 aa, Severe acute respiratory syndrome-related coronavirus
  REGION 1..11: note = Table A: HLA-B*42:01H HLA-B*56:01H HLA-A*02:11H HLA-B*53:01H HLA-B*55:02H HLA-C*15:05M HLA-B*55:01H HLA-C*08:01H HLA-B*38:02H HLA-B*07:02H HLA-B*07:04H HLA-B*07:05H HLA-B*57:03H
  source 1..11: note = Severe acute respiratory syndrome coronavirus 2
KPFERDISTEI

SEQ ID NO: 7134 - protein, 11 aa, Severe acute respiratory syndrome-related coronavirus
  REGION 1..11: note = Table A: HLA-B*50:01H
  source 1..11: note = Severe acute respiratory syndrome coronavirus 2
TEIYQAGSTPC

SEQ ID NO: 7135 - protein, 11 aa, Severe acute respiratory syndrome-related coronavirus
  REGION 1..11: note = Table A: HLA-B*13:02H
  source 1..11: note = Severe acute respiratory syndrome coronavirus 2
YQAGSTPCNGV

SEQ ID NO: 7136 - protein, 11 aa, Severe acute respiratory syndrome-related coronavirus
  REGION 1..11: note = Table A: HLA-A*11:303H HLA-C*16:04H HLA-B*46:01M HLA-A*26:01H HLA-A*29:01H HLA-A*29:02H HLA-B*27:02H HLA-C*03:02H HLA-A*30:02H HLA-C*12:02H HLA-C*12:03H HLA-B*35:01H HLA-B*35:07H HLA-C*08:03H HLA-B*38:02H
  REGION 1..11: note = CONT. FROM ABOVE: HLA-B*15:01M HLA-B*15:02H HLA-B*15:03H HLA- B*39:01H HLA-C*02:02H HLA-B*15:11H
  source 1..11: note = Severe acute respiratory syndrome coronavirus 2
YGFQPTNGVGY

SEQ ID NO: 7137 - protein, 11 aa, Severe acute respiratory syndrome-related coronavirus
  REGION 1..11: note = Table A: HLA-B*35:01H
  source 1..11: note = Severe acute respiratory syndrome coronavirus 2
QPTNGVGYQPY

SEQ ID NO: 7138 - protein, 11 aa, Severe acute respiratory syndrome-related coronavirus
  REGION 1..11: note = Table A: HLA-A*68:02H HLA-A*02:03H HLA-B*38:02H
  source 1..11: note = Severe acute respiratory syndrome coronavirus 2
FNFNGLTGTGV

SEQ ID NO: 7139 - protein, 11 aa, Severe acute respiratory syndrome-related coronavirus
  REGION 1..11: note = Table A: HLA-C*08:03H
  source 1..11: note = Severe acute respiratory syndrome coronavirus 2
NFNGLTGTGVL

SEQ ID NO: 7140 - protein, 11 aa, Severe acute respiratory syndrome-related coronavirus
  REGION 1..11: note = Table A: HLA-B*27:02H
  source 1..11: note = Severe acute respiratory syndrome coronavirus 2
TGTGVLTESNK

SEQ ID NO: 7141 - protein, 11 aa, Severe acute respiratory syndrome-related coronavirus
  REGION 1..11: note = Table A: HLA-B*56:01M HLA-B*55:02H HLA-B*54:01H
  source 1..11: note = Severe acute respiratory syndrome coronavirus 2
LPFQQFGRDIA

SEQ ID NO: 7142 - protein, 11 aa, Severe acute respiratory syndrome-related coronavirus
  REGION 1..11: note = Table A: HLA-C*15:05H HLA-C*08:02H HLA-B*07:02H
  source 1..11: note = Severe acute respiratory syndrome coronavirus 2
TTDAVRDPQTL

SEQ ID NO: 7143 - protein, 11 aa, Severe acute respiratory syndrome-related coronavirus
  REGION 1..11: note = Table A: HLA-B*38:02H HLA-B*07:04H
  source 1..11: note = Severe acute respiratory syndrome coronavirus 2
AVRDPQTLEIL

SEQ ID NO: 7144 - protein, 11 aa, Severe acute respiratory syndrome-related coronavirus
  REGION 1..11: note = Table A: HLA-B*55:02H
  source 1..11: note = Severe acute respiratory syndrome coronavirus 2
TPGTNTSNQVA

SEQ ID NO: 7145 - protein, 11 aa, Severe acute respiratory syndrome-related coronavirus
  REGION 1..11: note = Table A: HLA-A*02:01H
  source 1..11: note = Severe acute respiratory syndrome coronavirus 2
VLYQDVNCTEV

SEQ ID NO: 7146 - protein, 11 aa, Severe acute respiratory syndrome-related coronavirus
  REGION 1..11: note = Table A: HLA-A*68:02H
  source 1..11: note = Severe acute respiratory syndrome coronavirus 2
EVPVAIHADQL

SEQ ID NO: 7147 - protein, 11 aa, Severe acute respiratory syndrome-related coronavirus
  REGION 1..11: note = Table A: HLA-B*58:01H HLA-B*57:03H
  source 1..11: note = Severe acute respiratory syndrome coronavirus 2
AIHADQLTPTW

SEQ ID NO: 7148 - protein, 11 aa, Severe acute respiratory syndrome-related coronavirus
  REGION 1..11: note = Table A: HLA-A*36:01H HLA-A*33:01H HLA-A*33:03M HLA-A*26:03H HLA-B*27:02H HLA-A*68:01M HLA-A*68:02H HLA-A*34:02H HLA-A*31:01H HLA-A*66:01M
  source 1..11: note = Severe acute respiratory syndrome coronavirus 2
YSTGSNVFQTR

SEQ ID NO: 7149 - protein, 11 aa, Severe acute respiratory syndrome-related coronavirus
  REGION 1..11: note = Table A: HLA-B*38:02M HLA-B*39:01H
  source 1..11: note = Severe acute respiratory syndrome coronavirus 2
EHVNNSYECDI

SEQ ID NO: 7150 - protein, 11 aa, Severe acute respiratory syndrome-related coronavirus
  REGION 1..11: note = Table A: HLA-B*49:01H
  source 1..11: note = Severe acute respiratory syndrome coronavirus 2
YECDIPIGAGI

SEQ ID NO: 7151 - protein, 11 aa, Severe acute respiratory syndrome-related coronavirus
  REGION 1..11: note = Table A: HLA-A*26:01H HLA-A*29:01H HLA-A*29:02H HLA-A*30:02H HLA-B*35:01H HLA-B*35:08H HLA-B*35:07M HLA-B*38:02H HLA-B*15:02H HLA-B*07:05H HLA-B*15:11M
  source 1..11: note = Severe acute respiratory syndrome coronavirus 2
IPIGAGICASY

SEQ ID NO: 7152 - protein, 11 aa, Severe acute respiratory syndrome-related coronavirus
  REGION 1..11: note = Table A: HLA-A*74:01M HLA-A*03:01H HLA-A*03:02H HLA-A*11:01M HLA-A*11:02M HLA-A*36:01H HLA-A*33:03H HLA-A*68:01M HLA-A*34:01H HLA-A*34:02H HLA-C*07:27H HLA-A*31:01H HLA-A*66:01M
  source 1..11: note = Severe acute respiratory syndrome coronavirus 2
ASYQTQTNSPR

SEQ ID NO: 7153 - protein, 11 aa, Severe acute respiratory syndrome-related coronavirus
  REGION 1..11: note = Table A: HLA-A*33:01H HLA-A*33:03H HLA-A*30:02H
  source 1..11: note = Severe acute respiratory syndrome coronavirus 2
SYQTQTNSPRR

SEQ ID NO: 7154 - protein, 11 aa, Severe acute respiratory syndrome-related coronavirus
  REGION 1..11: note = Table A: HLA-B*58:01H HLA-A*36:01H HLA-A*30:02H HLA-B*15:01H HLA-B*57:03H
  source 1..11: note = Severe acute respiratory syndrome coronavirus 2
RSVASQSIIAY

SEQ ID NO: 7155 - protein, 11 aa, Severe acute respiratory syndrome-related coronavirus
  REGION 1..11: note = Table A: HLA-A*68:02H HLA-A*02:05H HLA-A*02:08H
  source 1..11: note = Severe acute respiratory syndrome coronavirus 2
SVASQSIIAYT

SEQ ID NO: 7156 - protein, 11 aa, Severe acute respiratory syndrome-related coronavirus
  REGION 1..11: note = Table A: HLA-A*68:02H
  source 1..11: note = Severe acute respiratory syndrome coronavirus 2
YTMSLGAENSV

SEQ ID NO: 7157 - protein, 11 aa, Severe acute respiratory syndrome-related coronavirus
  REGION 1..11: note = Table A: HLA-A*36:01H HLA-A*29:01H HLA-A*30:02H HLA-A*34:02H HLA-B*35:01M HLA-B*35:08H HLA-B*35:07H HLA-B*38:02H HLA-B*15:01H HLA-B*15:02H HLA-B*39:01H
  source 1..11: note = Severe acute respiratory syndrome coronavirus 2
MSLGAENSVAY

SEQ ID NO: 7158 - protein, 11 aa, Severe acute respiratory syndrome-related coronavirus
  REGION 1..11: note = Table A: HLA-A*68:02H HLA-B*57:03H
  source 1..11: note = Severe acute respiratory syndrome coronavirus 2
NSIAIPTNFTI

SEQ ID NO: 7159 - protein, 11 aa, Severe acute respiratory syndrome-related coronavirus
  REGION 1..11: note = Table A: HLA-A*03:02H HLA-A*36:01H
  source 1..11: note = Severe acute respiratory syndrome coronavirus 2
TTEILPVSMTK

SEQ ID NO: 7160 - protein, 11 aa, Severe acute respiratory syndrome-related coronavirus
  REGION 1..11: note = Table A: HLA-A*36:01M HLA-A*01:01H
  source 1..11: note = Severe acute respiratory syndrome coronavirus 2
STECSNLLLQY

SEQ ID NO: 7161 - protein, 11 aa, Severe acute respiratory syndrome-related coronavirus
  REGION 1..11: note = Table A: HLA-B*27:02H
  source 1..11: note = Severe acute respiratory syndrome coronavirus 2
ALTGIAVEQDK

SEQ ID NO: 7162 - protein, 11 aa, Severe acute respiratory syndrome-related coronavirus
  REGION 1..11: note = Table A: HLA-B*44:02H HLA-B*44:05H HLA-B*44:03H HLA-B*40:01H HLA-B*40:02H HLA-B*41:02H
  source 1..11: note = Severe acute respiratory syndrome coronavirus 2
VEQDKNTQEVF

SEQ ID NO: 7163 - protein, 11 aa, Severe acute respiratory syndrome-related coronavirus
  REGION 1..11: note = Table A: HLA-B*44:02H HLA-B*44:03M
  source 1..11: note = Severe acute respiratory syndrome coronavirus 2
QEVFAQVKQIY

SEQ ID NO: 7164 - protein, 11 aa, Severe acute respiratory syndrome-related coronavirus
  REGION 1..11: note = Table A: HLA-A*03:02H HLA-A*11:01H HLA-A*11:02H HLA-A*33:01H HLA-A*33:03H HLA-A*68:01M HLA-A*68:02H HLA-A*34:01H HLA-A*34:02H HLA-A*66:01H
  source 1..11: note = Severe acute respiratory syndrome coronavirus 2
EVFAQVKQIYK

SEQ ID NO: 7165 - protein, 11 aa, Severe acute respiratory syndrome-related coronavirus
  REGION 1..11: note = Table A: HLA-A*74:01H HLA-A*36:01H HLA-A*30:02H HLA-B*57:03M
  source 1..11: note = Severe acute respiratory syndrome coronavirus 2
KTPPIKDFGGF

SEQ ID NO: 7166 - protein, 11 aa, Severe acute respiratory syndrome-related coronavirus
  REGION 1..11: note = Table A: HLA-A*03:02H HLA-A*11:01H HLA-A*11:02M HLA-A*30:01H HLA-A*30:02H
  source 1..11: note = Severe acute respiratory syndrome coronavirus 2
QILPDPSKPSK

SEQ ID NO: 7167 - protein, 11 aa, Severe acute respiratory syndrome-related coronavirus
  REGION 1..11: note = Table A: HLA-A*74:01M HLA-A*26:03H HLA-A*68:01H HLA-A*34:01H
  source 1..11: note = Severe acute respiratory syndrome coronavirus 2
ILPDPSKPSKR

SEQ ID NO: 7168 - protein, 11 aa, Severe acute respiratory syndrome-related coronavirus
  REGION 1..11: note = Table A: HLA-B*07:04H
  source 1..11: note = Severe acute respiratory syndrome coronavirus 2
KPSKRSFIEDL

SEQ ID NO: 7169 - protein, 11 aa, Severe acute respiratory syndrome-related coronavirus
  REGION 1..11: note = Table A: HLA-A*11:01H HLA-A*11:02H
  source 1..11: note = Severe acute respiratory syndrome coronavirus 2
RSFIEDLLFNK

SEQ ID NO: 7170 - protein, 11 aa, Severe acute respiratory syndrome-related coronavirus
  REGION 1..11: note = Table A: HLA-B*44:05H HLA-B*40:01M HLA-B*40:02M HLA-B*41:02H
  source 1..11: note = Severe acute respiratory syndrome coronavirus 2
IEDLLFNKVTL

SEQ ID NO: 7171 - protein, 11 aa, Severe acute respiratory syndrome-related coronavirus
  REGION 1..11: note = Table A: HLA-A*02:02M HLA-A*02:03H
  source 1..11: note = Severe acute respiratory syndrome coronavirus 2
LLFNKVTLADA

SEQ ID NO: 7172 - protein, 11 aa, Severe acute respiratory syndrome-related coronavirus
  REGION 1..11: note = Table A: HLA-A*11:01H HLA-A*36:01H
  source 1..11: note = Severe acute respiratory syndrome coronavirus 2
KVTLADAGFIK

SEQ ID NO: 7173 - protein, 11 aa, Severe acute respiratory syndrome-related coronavirus
  REGION 1..11: note = Table A: HLA-A*25:01H HLA-B*46:01H HLA-A*26:01M HLA-A*26:02H HLA-A*29:02H HLA-B*44:03H HLA-A*30:02M HLA-A*02:04H HLA-A*02:02H HLA-A*02:03H HLA-B*35:01H HLA-B*38:02M HLA-B*15:01H HLA-B*15:02M
  source 1..11: note = Severe acute respiratory syndrome coronavirus 2
TLADAGFIKQY

SEQ ID NO: 7174 - protein, 11 aa, Severe acute respiratory syndrome-related coronavirus
  REGION 1..11: note = Table A: HLA-A*02:11H HLA-A*02:02H
  source 1..11: note = Severe acute respiratory syndrome coronavirus 2
CLGDIAARDLI

SEQ ID NO: 7175 - protein, 11 aa, Severe acute respiratory syndrome-related coronavirus
  REGION 1..11: note = Table A: HLA-B*44:05H HLA-B*18:01H HLA-B*07:05H
  source 1..11: note = Severe acute respiratory syndrome coronavirus 2
DEMIAQYTSAL

SEQ ID NO: 7176 - protein, 11 aa, Severe acute respiratory syndrome-related coronavirus
  REGION 1..11: note = Table A: HLA-B*38:02H HLA-A*32:01H
  source 1..11: note = Severe acute respiratory syndrome coronavirus 2
ALLAGTITSGW

SEQ ID NO: 7177 - protein, 11 aa, Severe acute respiratory syndrome-related coronavirus
  REGION 1..11: note = Table A: HLA-A*30:02H HLA-B*15:01H
  source 1..11: note = Severe acute respiratory syndrome coronavirus 2
LQIPFAMQMAY

SEQ ID NO: 7178 - protein, 11 aa, Severe acute respiratory syndrome-related coronavirus
  REGION 1..11: note = Table A: HLA-B*35:01H
  source 1..11: note = Severe acute respiratory syndrome coronavirus 2
NGIGVTQNVLY

SEQ ID NO: 7179 - protein, 11 aa, Severe acute respiratory syndrome-related coronavirus
  REGION 1..11: note = Table A: HLA-A*03:02H HLA-A*11:01M HLA-A*11:02H
  source 1..11: note = Severe acute respiratory syndrome coronavirus 2
VTQNVLYENQK

SEQ ID NO: 7180 - protein, 11 aa, Severe acute respiratory syndrome-related coronavirus
  REGION 1..11: note = Table A: HLA-B*38:02H
  source 1..11: note = Severe acute respiratory syndrome coronavirus 2
TQNVLYENQKL

SEQ ID NO: 7181 - protein, 11 aa, Severe acute respiratory syndrome-related coronavirus
  REGION 1..11: note = Table A: HLA-B*54:01H
  source 1..11: note = Severe acute respiratory syndrome coronavirus 2
NVLYENQKLIA

SEQ ID NO: 7182 - protein, 11 aa, Severe acute respiratory syndrome-related coronavirus
  REGION 1..11: note = Table A: HLA-A*02:03H
  source 1..11: note = Severe acute respiratory syndrome coronavirus 2
VLYENQKLIAN

SEQ ID NO: 7183 - protein, 11 aa, Severe acute respiratory syndrome-related coronavirus
  REGION 1..11: note = Table A: HLA-B*44:05H
  source 1..11: note = Severe acute respiratory syndrome coronavirus 2
YENQKLIANQF

SEQ ID NO: 7184 - protein, 11 aa, Severe acute respiratory syndrome-related coronavirus
  REGION 1..11: note = Table A: HLA-A*03:02H HLA-A*34:02H
  source 1..11: note = Severe acute respiratory syndrome coronavirus 2
IANQFNSAIGK

SEQ ID NO: 7185 - protein, 11 aa, Severe acute respiratory syndrome-related coronavirus
  REGION 1..11: note = Table A: HLA-A*03:01M HLA-A*03:02M HLA-A*11:01H
  source 1..11: note = Severe acute respiratory syndrome coronavirus 2
SLSSTASALGK

SEQ ID NO: 7186 - protein, 11 aa, Severe acute respiratory syndrome-related coronavirus
  REGION 1..11: note = Table A: HLA-A*03:02H
  source 1..11: note = Severe acute respiratory syndrome coronavirus 2
KLQDVVNQNAQ

SEQ ID NO: 7187 - protein, 11 aa, Severe acute respiratory syndrome-related coronavirus
  REGION 1..11: note = Table A: HLA-B*44:05H HLA-B*40:02H
  source 1..11: note = Severe acute respiratory syndrome coronavirus 2
QDVVNQNAQAL

SEQ ID NO: 7188 - protein, 11 aa, Severe acute respiratory syndrome-related coronavirus
  REGION 1..11: note = Table A: HLA-A*02:08H
  source 1..11: note = Severe acute respiratory syndrome coronavirus 2
AQALNTLVKQL

SEQ ID NO: 7189 - protein, 11 aa, Severe acute respiratory syndrome-related coronavirus
  REGION 1..11: note = Table A: HLA-A*68:02H
  source 1..11: note = Severe acute respiratory syndrome coronavirus 2
LSSNFGAISSV

SEQ ID NO: 7190 - protein, 11 aa, Severe acute respiratory syndrome-related coronavirus
  REGION 1..11: note = Table A: HLA-C*15:05H HLA-C*08:03H
  source 1..11: note = Severe acute respiratory syndrome coronavirus 2
SSNFGAISSVL

SEQ ID NO: 7191 - protein, 11 aa, Severe acute respiratory syndrome-related coronavirus
  REGION 1..11: note = Table A: HLA-C*08:01H HLA-C*08:03H HLA-B*35:12H
  source 1..11: note = Severe acute respiratory syndrome coronavirus 2
GAISSVLNDIL

SEQ ID NO: 7192 - protein, 11 aa, Severe acute respiratory syndrome-related coronavirus
  REGION 1..11: note = Table A: HLA-B*13:01H
  source 1..11: note = Severe acute respiratory syndrome coronavirus 2
RLDKVEAEVQI

SEQ ID NO: 7193 - protein, 11 aa, Severe acute respiratory syndrome-related coronavirus
  REGION 1..11: note = Table A: HLA-B*44:03H HLA-B*49:01H
  source 1..11: note = Severe acute respiratory syndrome coronavirus 2
VEAEVQIDRLI

SEQ ID NO: 7194 - protein, 11 aa, Severe acute respiratory syndrome-related coronavirus
  REGION 1..11: note = Table A: HLA-B*45:01H HLA-B*40:02H HLA-B*40:06H HLA-B*50:01H
  source 1..11: note = Severe acute respiratory syndrome coronavirus 2
AEVQIDRLITG

SEQ ID NO: 7195 - protein, 11 aa, Severe acute respiratory syndrome-related coronavirus
  REGION 1..11: note = Table A: HLA-A*33:01H HLA-A*33:03H HLA-A*26:03M HLA-A*68:01M HLA-A*34:01M HLA-A*34:02H HLA-A*66:01M
  source 1..11: note = Severe acute respiratory syndrome coronavirus 2
EVQIDRLITGR

SEQ ID NO: 7196 - protein, 11 aa, Severe acute respiratory syndrome-related coronavirus
  REGION 1..11: note = Table A: HLA-B*14:02H HLA-B*14:01H
  source 1..11: note = Severe acute respiratory syndrome coronavirus 2
DRLITGRLQSL

SEQ ID NO: 7197 - protein, 11 aa, Severe acute respiratory syndrome-related coronavirus
  REGION 1..11: note = Table A: HLA-B*57:03H
  source 1..11: note = Severe acute respiratory syndrome coronavirus 2
ITGRLQSLQTY

SEQ ID NO: 7198 - protein, 11 aa, Severe acute respiratory syndrome-related coronavirus
  REGION 1..11: note = Table A: HLA-A*02:05H HLA-A*02:08H
  source 1..11: note = Severe acute respiratory syndrome coronavirus 2
QTYVTQQLIRA

SEQ ID NO: 7199 - protein, 11 aa, Severe acute respiratory syndrome-related coronavirus
  REGION 1..11: note = Table A: HLA-B*57:03H
  source 1..11: note = Severe acute respiratory syndrome coronavirus 2
VTQQLIRAAEI

SEQ ID NO: 7200 - protein, 11 aa, Severe acute respiratory syndrome-related coronavirus
  REGION 1..11: note = Table A: HLA-A*02:11H HLA-C*15:05H HLA-A*02:05H HLA-A*02:02H HLA-B*07:02H HLA-B*07:04H HLA-B*57:03H
  source 1..11: note = Severe acute respiratory syndrome coronavirus 2
RAAEIRASANL

SEQ ID NO: 7201 - protein, 11 aa, Severe acute respiratory syndrome-related coronavirus
  REGION 1..11: note = Table A: HLA-B*45:01H HLA-B*40:02H HLA-B*40:06M HLA-B*50:01H
  source 1..11: note = Severe acute respiratory syndrome coronavirus 2
AEIRASANLAA

SEQ ID NO: 7202 - protein, 11 aa, Severe acute respiratory syndrome-related coronavirus
  REGION 1..11: note = Table A: HLA-C*15:05H HLA-B*57:03H
  source 1..11: note = Severe acute respiratory syndrome coronavirus 2
RASANLAATKM

SEQ ID NO: 7203 - protein, 11 aa, Severe acute respiratory syndrome-related coronavirus
  REGION 1..11: note = Table A: HLA-A*03:02H
  source 1..11: note = Severe acute respiratory syndrome coronavirus 2
KMSECVLGQSK

SEQ ID NO: 7204 - protein, 11 aa, Severe acute respiratory syndrome-related coronavirus
  REGION 1..11: note = Table A: HLA-A*02:11M HLA-A*68:02M HLA-A*02:05H HLA-A*02:08H HLA-A*02:02H HLA-A*02:03H
  source 1..11: note = Severe acute respiratory syndrome coronavirus 2
MSFPQSAPHGV

SEQ ID NO: 7205 - protein, 11 aa, Severe acute respiratory syndrome-related coronavirus
  REGION 1..11: note = Table A: HLA-B*42:01H HLA-B*56:01H HLA-B*53:01M HLA-B*55:02M HLA-B*35:03M HLA-C*15:05M HLA-B*35:01H HLA-B*35:02H HLA-B*35:08M HLA-B*35:07H HLA-B*35:12H HLA-B*38:02H HLA-B*54:01H HLA-B*07:02H HLA-B*07:04M HLA-B*15:02H
  REGION 1..11: note = CONT. FROM ABOVE: HLA-B*07:05H HLA-B*15:11M
  source 1..11: note = Severe acute respiratory syndrome coronavirus 2
FPQSAPHGVVF

SEQ ID NO: 7206 - protein, 11 aa, Severe acute respiratory syndrome-related coronavirus
  REGION 1..11: note = Table A: HLA-B*56:01H HLA-B*55:02H
  source 1..11: note = Severe acute respiratory syndrome coronavirus 2
APHGVVFLHVT

SEQ ID NO: 7207 - protein, 11 aa, Severe acute respiratory syndrome-related coronavirus
  REGION 1..11: note = Table A: HLA-B*57:01H HLA-B*57:03H
  source 1..11: note = Severe acute respiratory syndrome coronavirus 2
VTYVPAQEKNF

SEQ ID NO: 7208 - protein, 11 aa, Severe acute respiratory syndrome-related coronavirus
  REGION 1..11: note = Table A: HLA-B*56:01M HLA-B*55:02H HLA-C*15:05M HLA-B*55:01M HLA-B*54:01M HLA-B*07:02H HLA-B*07:04H HLA-B*07:05H
  source 1..11: note = Severe acute respiratory syndrome coronavirus 2
VPAQEKNFTTA

SEQ ID NO: 7209 - protein, 11 aa, Severe acute respiratory syndrome-related coronavirus
  REGION 1..11: note = Table A: HLA-A*03:02H
  source 1..11: note = Severe acute respiratory syndrome coronavirus 2
TTAPAICHDGK

SEQ ID NO: 7210 - protein, 11 aa, Severe acute respiratory syndrome-related coronavirus
  REGION 1..11: note = Table A: HLA-B*15:03H
  source 1..11: note = Severe acute respiratory syndrome coronavirus 2
GKAHFPREGVF

SEQ ID NO: 7211 - protein, 11 aa, Severe acute respiratory syndrome-related coronavirus
  REGION 1..11: note = Table A: HLA-A*02:11H HLA-C*15:02H HLA-C*08:01H
  source 1..11: note = Severe acute respiratory syndrome coronavirus 2
KAHFPREGVFV

SEQ ID NO: 7212 - protein, 11 aa, Severe acute respiratory syndrome-related coronavirus
  REGION 1..11: note = Table A: HLA-B*44:03H
  source 1..11: note = Severe acute respiratory syndrome coronavirus 2
EGVFVSNGTHW

SEQ ID NO: 7213 - protein, 11 aa, Severe acute respiratory syndrome-related coronavirus
  REGION 1..11: note = Table A: HLA-B*44:05H HLA-B*53:01H HLA-B*35:01H
  source 1..11: note = Severe acute respiratory syndrome coronavirus 2
EPQIITTDNTF

SEQ ID NO: 7214 - protein, 11 aa, Severe acute respiratory syndrome-related coronavirus
  REGION 1..11: note = Table A: HLA-A*68:02H
  source 1..11: note = Severe acute respiratory syndrome coronavirus 2
DVVIGIVNNTV

SEQ ID NO: 7215 - protein, 11 aa, Severe acute respiratory syndrome-related coronavirus
  REGION 1..11: note = Table A: HLA-B*46:01H HLA-A*29:02H HLA-A*30:02H HLA-C*15:05H HLA-B*35:01H HLA-B*38:02H HLA-B*15:01M HLA-B*15:02H HLA-B*07:05H
  source 1..11: note = Severe acute respiratory syndrome coronavirus 2
VVIGIVNNTVY

SEQ ID NO: 7216 - protein, 11 aa, Severe acute respiratory syndrome-related coronavirus
  REGION 1..11: note = Table A: HLA-C*08:03H
  source 1..11: note = Severe acute respiratory syndrome coronavirus 2
GIVNNTVYDPL

SEQ ID NO: 7217 - protein, 11 aa, Severe acute respiratory syndrome-related coronavirus
  REGION 1..11: note = Table A: HLA-A*11:303H HLA-A*03:01H HLA-A*03:02H HLA-A*11:01H HLA-A*11:02H HLA-B*27:02H
  source 1..11: note = Severe acute respiratory syndrome coronavirus 2
GINASVVNIQK

SEQ ID NO: 7218 - protein, 11 aa, Severe acute respiratory syndrome-related coronavirus
  REGION 1..11: note = Table A: HLA-A*68:01M HLA-A*68:02H
  source 1..11: note = Severe acute respiratory syndrome coronavirus 2
SVVNIQKEIDR

SEQ ID NO: 7219 - protein, 11 aa, Severe acute respiratory syndrome-related coronavirus
  REGION 1..11: note = Table A: HLA-A*02:11H HLA-A*02:05H HLA-A*02:06H HLA-A*02:02M HLA-A*02:03H HLA-B*52:01H HLA-B*38:02H
  source 1..11: note = Severe acute respiratory syndrome coronavirus 2
IQKEIDRLNEV

SEQ ID NO: 7220 - protein, 11 aa, Severe acute respiratory syndrome-related coronavirus
  REGION 1..11: note = Table A: HLA-B*46:01H HLA-A*26:01M HLA-A*26:02M HLA-A*29:02H HLA-A*30:02M HLA-B*38:02H HLA-B*15:01H
  source 1..11: note = Severe acute respiratory syndrome coronavirus 2
SLIDLQELGKY

SEQ ID NO: 7221 - protein, 11 aa, Severe acute respiratory syndrome-related coronavirus
  REGION 1..11: note = Table A: HLA-B*38:02H
  source 1..11: note = Severe acute respiratory syndrome coronavirus 2
DLQELGKYEQY

SEQ ID NO: 7222 - protein, 11 aa, Severe acute respiratory syndrome-related coronavirus
  REGION 1..11: note = Table A: HLA-A*68:02H HLA-A*02:04H
  source 1..11: note = Severe acute respiratory syndrome coronavirus 2
FIAGLIAIVMV

SEQ ID NO: 7223 - protein, 8 aa, Severe acute respiratory syndrome-related coronavirus
  REGION 1..8: note = Table A: HLA-B*52:01H
  source 1..8: note = Severe acute respiratory syndrome coronavirus 2
LFMRIFTI

SEQ ID NO: 7224 - protein, 8 aa, Severe acute respiratory syndrome-related coronavirus
  REGION 1..8: note = Table A: HLA-A*02:11H HLA-B*52:01H HLA-B*13:02H
  source 1..8: note = Severe acute respiratory syndrome coronavirus 2
RIFTIGTV

SEQ ID NO: 7225 - protein, 8 aa, Severe acute respiratory syndrome-related coronavirus
  REGION 1..8: note = Table A: HLA-C*03:03H HLA-C*03:04M HLA-A*68:02H HLA-C*15:05H HLA-C*15:02H HLA-C*17:01H HLA-C*08:01H HLA-B*38:02H HLA-B*57:03H HLA-C*07:04H
  source 1..8: note = Severe acute respiratory syndrome coronavirus 2
FTIGTVTL

SEQ ID NO: 7226 - protein, 8 aa, Severe acute respiratory syndrome-related coronavirus
  REGION 1..8: note = Table A: HLA-A*03:01M HLA-A*03:02M HLA-A*11:01H HLA-A*11:02H HLA-A*36:01H HLA-A*34:02M
  source 1..8: note = Severe acute respiratory syndrome coronavirus 2
TIGTVTLK

SEQ ID NO: 7227 - protein, 8 aa, Severe acute respiratory syndrome-related coronavirus
  REGION 1..8: note = Table A: HLA-B*58:02H HLA-C*15:05H
  source 1..8: note = Severe acute respiratory syndrome coronavirus 2
VTLKQGEI

SEQ ID NO: 7228 - protein, 8 aa, Severe acute respiratory syndrome-related coronavirus
  REGION 1..8: note = Table A: HLA-B*50:01H
  source 1..8: note = Severe acute respiratory syndrome coronavirus 2
GEIKDATP

SEQ ID NO: 7229 - protein, 8 aa, Severe acute respiratory syndrome-related coronavirus
  REGION 1..8: note = Table A: HLA-B*51:01H
  source 1..8: note = Severe acute respiratory syndrome coronavirus 2
DATPSDFV

SEQ ID NO: 7230 - protein, 8 aa, Severe acute respiratory syndrome-related coronavirus
  REGION 1..8: note = Table A: HLA-B*56:01H HLA-B*55:02H HLA-B*55:01M HLA-B*54:01H
  source 1..8: note = Severe acute respiratory syndrome coronavirus 2
TPSDFVRA

SEQ ID NO: 7231 - protein, 8 aa, Severe acute respiratory syndrome-related coronavirus
  REGION 1..8: note = Table A: HLA-B*39:06H HLA-B*50:01H
  source 1..8: note = Severe acute respiratory syndrome coronavirus 2
SDFVRATA

SEQ ID NO: 7232 - protein, 8 aa, Severe acute respiratory syndrome-related coronavirus
  REGION 1..8: note = Table A: HLA-B*52:01H
  source 1..8: note = Severe acute respiratory syndrome coronavirus 2
FVRATATI

SEQ ID NO: 7233 - protein, 8 aa, Severe acute respiratory syndrome-related coronavirus
  REGION 1..8: note = Table A: HLA-C*15:05H HLA-B*39:06H HLA-B*54:01H
  source 1..8: note = Severe acute respiratory syndrome coronavirus 2
TATIPIQA

SEQ ID NO: 7234 - protein, 8 aa, Severe acute respiratory syndrome-related coronavirus
  REGION 1..8: note = Table A: HLA-B*58:01H HLA-B*53:01H
  source 1..8: note = Severe acute respiratory syndrome coronavirus 2
QASLPFGW

SEQ ID NO: 7235 - protein, 8 aa, Severe acute respiratory syndrome-related coronavirus
  REGION 1..8: note = Table A: HLA-B*51:01M HLA-B*54:01H
  source 1..8: note = Severe acute respiratory syndrome coronavirus 2
LPFGWLIV

SEQ ID NO: 7236 - protein, 8 aa, Severe acute respiratory syndrome-related coronavirus
  REGION 1..8: note = Table A: HLA-B*51:01H
  source 1..8: note = Severe acute respiratory syndrome coronavirus 2
FGWLIVGV

SEQ ID NO: 7237 - protein, 8 aa, Severe acute respiratory syndrome-related coronavirus
  REGION 1..8: note = Table A: HLA-A*03:02H HLA-A*11:02H
  source 1..8: note = Severe acute respiratory syndrome coronavirus 2
AVFQSASK

SEQ ID NO: 7238 - protein, 8 aa, Severe acute respiratory syndrome-related coronavirus
  REGION 1..8: note = Table A: HLA-B*52:01H
  source 1..8: note = Severe acute respiratory syndrome coronavirus 2
VFQSASKI

SEQ ID NO: 7239 - protein, 8 aa, Severe acute respiratory syndrome-related coronavirus
  REGION 1..8: note = Table A: HLA-B*52:01H
  source 1..8: note = Severe acute respiratory syndrome coronavirus 2
FQSASKII

SEQ ID NO: 7240 - protein, 8 aa, Severe acute respiratory syndrome-related coronavirus
  REGION 1..8: note = Table A: HLA-B*48:01H HLA-B*58:01H HLA-A*11:303H HLA-C*16:01H HLA-C*03:03H HLA-C*12:05H HLA-C*03:04H HLA-A*68:02H HLA-B*35:03H HLA-C*15:05H HLA-C*12:03H HLA-C*15:02M HLA-A*02:02H HLA-C*17:01H HLA-C*08:01H
  REGION 1..8: note = CONT. FROM ABOVE: HLA-B*38:02H HLA-B*40:01H HLA-B*40:02H HLA- B*07:02H HLA-B*07:04H HLA-B*07:05H HLA-B*41:02H HLA-B*57:03H HLA-C*07:04M
  source 1..8: note = Severe acute respiratory syndrome coronavirus 2
SASKIITL

SEQ ID NO: 7241 - protein, 8 aa, Severe acute respiratory syndrome-related coronavirus
  REGION 1..8: note = Table A: HLA-A*30:01H
  source 1..8: note = Severe acute respiratory syndrome coronavirus 2
ASKIITLK

SEQ ID NO: 7242 - protein, 8 aa, Severe acute respiratory syndrome-related coronavirus
  REGION 1..8: note = Table A: HLA-B*08:01M
  source 1..8: note = Severe acute respiratory syndrome coronavirus 2
TLKKRWQL

SEQ ID NO: 7243 - protein, 8 aa, Severe acute respiratory syndrome-related coronavirus
  REGION 1..8: note = Table A: HLA-B*38:02H HLA-B*15:02H
  source 1..8: note = Severe acute respiratory syndrome coronavirus 2
LLLFVTVY

SEQ ID NO: 7244 - protein, 8 aa, Severe acute respiratory syndrome-related coronavirus
  REGION 1..8: note = Table A: HLA-C*17:01H
  source 1..8: note = Severe acute respiratory syndrome coronavirus 2
FVTVYSHL

SEQ ID NO: 7245 - protein, 8 aa, Severe acute respiratory syndrome-related coronavirus
  REGION 1..8: note = Table A: HLA-B*58:02H HLA-C*15:02H HLA-B*57:03H
  source 1..8: note = Severe acute respiratory syndrome coronavirus 2
VTVYSHLL

SEQ ID NO: 7246 - protein, 8 aa, Severe acute respiratory syndrome-related coronavirus
  REGION 1..8: note = Table A: HLA-C*03:02H HLA-B*54:01H
  source 1..8: note = Severe acute respiratory syndrome coronavirus 2
YSHLLLVA

SEQ ID NO: 7247 - protein, 8 aa, Severe acute respiratory syndrome-related coronavirus
  REGION 1..8: note = Table A: HLA-B*55:02H HLA-B*39:06H HLA-B*54:01H
  source 1..8: note = Severe acute respiratory syndrome coronavirus 2
SHLLLVAA

SEQ ID NO: 7248 - protein, 8 aa, Severe acute respiratory syndrome-related coronavirus
  REGION 1..8: note = Table A: HLA-B*18:01H HLA-B*40:01H HLA-B*40:02H HLA-B*49:01M
  source 1..8: note = Severe acute respiratory syndrome coronavirus 2
LEAPFLYL

SEQ ID NO: 7249 - protein, 8 aa, Severe acute respiratory syndrome-related coronavirus
  REGION 1..8: note = Table A: HLA-C*14:03H
  source 1..8: note = Severe acute respiratory syndrome coronavirus 2
LYLYALVY

SEQ ID NO: 7250 - protein, 8 aa, Severe acute respiratory syndrome-related coronavirus
  REGION 1..8: note = Table A: HLA-C*14:02H HLA-C*14:03H
  source 1..8: note = Severe acute respiratory syndrome coronavirus 2
YFLQSINF

SEQ ID NO: 7251 - protein, 8 aa, Severe acute respiratory syndrome-related coronavirus
  REGION 1..8: note = Table A: HLA-A*02:04H
  source 1..8: note = Severe acute respiratory syndrome coronavirus 2
FLQSINFV

SEQ ID NO: 7252 - protein, 8 aa, Severe acute respiratory syndrome-related coronavirus
  REGION 1..8: note = Table A: HLA-B*58:02H HLA-B*52:01H
  source 1..8: note = Severe acute respiratory syndrome coronavirus 2
QSINFVRI

SEQ ID NO: 7253 - protein, 8 aa, Severe acute respiratory syndrome-related coronavirus
  REGION 1..8: note = Table A: HLA-B*58:02H
  source 1..8: note = Severe acute respiratory syndrome coronavirus 2
SINFVRII

SEQ ID NO: 7254 - protein, 8 aa, Severe acute respiratory syndrome-related coronavirus
  REGION 1..8: note = Table A: HLA-B*58:01H HLA-B*58:02H HLA-A*36:01H HLA-B*57:01H HLA-A*30:02H HLA-B*57:03H
  source 1..8: note = Severe acute respiratory syndrome coronavirus 2
RSKNPLLY

SEQ ID NO: 7255 - protein, 8 aa, Severe acute respiratory syndrome-related coronavirus
  REGION 1..8: note = Table A: HLA-C*04:01H
  source 1..8: note = Severe acute respiratory syndrome coronavirus 2
LYDANYFL

SEQ ID NO: 7256 - protein, 8 aa, Severe acute respiratory syndrome-related coronavirus
  REGION 1..8: note = Table A: HLA-B*35:01H HLA-B*35:08H
  source 1..8: note = Severe acute respiratory syndrome coronavirus 2
SPISEHDY

SEQ ID NO: 7257 - protein, 8 aa, Severe acute respiratory syndrome-related coronavirus
  REGION 1..8: note = Table A: HLA-B*18:01H HLA-B*38:02H HLA-B*15:02H
  source 1..8: note = Severe acute respiratory syndrome coronavirus 2
HDYQIGGY

SEQ ID NO: 7258 - protein, 8 aa, Severe acute respiratory syndrome-related coronavirus
  REGION 1..8: note = Table A: HLA-B*58:01M HLA-B*53:01H HLA-B*57:03H
  source 1..8: note = Severe acute respiratory syndrome coronavirus 2
IGGYTEKW

SEQ ID NO: 7259 - protein, 8 aa, Severe acute respiratory syndrome-related coronavirus
  REGION 1..8: note = Table A: HLA-B*18:01H HLA-B*15:02H
  source 1..8: note = Severe acute respiratory syndrome coronavirus 2
DCVVLHSY

SEQ ID NO: 7260 - protein, 8 aa, Severe acute respiratory syndrome-related coronavirus
  REGION 1..8: note = Table A: HLA-C*14:02M HLA-C*14:03M HLA-A*29:02H HLA-A*30:02H HLA-B*39:01H
  source 1..8: note = Severe acute respiratory syndrome coronavirus 2
SYFTSDYY

SEQ ID NO: 7261 - protein, 8 aa, Severe acute respiratory syndrome-related coronavirus
  REGION 1..8: note = Table A: HLA-A*36:01M HLA-A*01:01H
  source 1..8: note = Severe acute respiratory syndrome coronavirus 2
TSDYYQLY

SEQ ID NO: 7262 - protein, 8 aa, Severe acute respiratory syndrome-related coronavirus
  REGION 1..8: note = Table A: HLA-B*48:01H HLA-B*14:01H HLA-B*52:01H HLA-B*38:02H HLA-B*15:01H HLA-B*15:02H HLA-B*15:03H HLA-B*39:01H HLA-B*13:02H HLA-B*15:10H
  source 1..8: note = Severe acute respiratory syndrome coronavirus 2
YQLYSTQL

SEQ ID NO: 7263 - protein, 8 aa, Severe acute respiratory syndrome-related coronavirus
  REGION 1..8: note = Table A: HLA-B*08:01H HLA-B*14:02H HLA-B*35:01H HLA-B*38:02H HLA-B*15:02H HLA-C*07:04H
  source 1..8: note = Severe acute respiratory syndrome coronavirus 2
TGVEHVTF

SEQ ID NO: 7264 - protein, 8 aa, Severe acute respiratory syndrome-related coronavirus
  REGION 1..8: note = Table A: HLA-B*49:01H
  source 1..8: note = Severe acute respiratory syndrome coronavirus 2
VEHVTFFI

SEQ ID NO: 7265 - protein, 8 aa, Severe acute respiratory syndrome-related coronavirus
  REGION 1..8: note = Table A: HLA-B*38:02H
  source 1..8: note = Severe acute respiratory syndrome coronavirus 2
EHVTFFIY

SEQ ID NO: 7266 - protein, 8 aa, Severe acute respiratory syndrome-related coronavirus
  REGION 1..8: note = Table A: HLA-A*11:02H
  source 1..8: note = Severe acute respiratory syndrome coronavirus 2
VTFFIYNK

SEQ ID NO: 7267 - protein, 8 aa, Severe acute respiratory syndrome-related coronavirus
  REGION 1..8: note = Table A: HLA-B*38:01M HLA-B*38:02M HLA-B*39:06M HLA-B*39:01H HLA-B*15:10H
  source 1..8: note = Severe acute respiratory syndrome coronavirus 2
EHVQIHTI

SEQ ID NO: 7268 - protein, 8 aa, Severe acute respiratory syndrome-related coronavirus
  REGION 1..8: note = Table A: HLA-C*08:02H
  source 1..8: note = Severe acute respiratory syndrome coronavirus 2
TIDGSSGV

SEQ ID NO: 7269 - protein, 8 aa, Severe acute respiratory syndrome-related coronavirus
  REGION 1..8: note = Table A: HLA-B*15:02H HLA-B*07:05H
  source 1..8: note = Severe acute respiratory syndrome coronavirus 2
SGVVNPVM

SEQ ID NO: 7270 - protein, 8 aa, Severe acute respiratory syndrome-related coronavirus
  REGION 1..8: note = Table A: HLA-C*15:05H HLA-B*51:01H
  source 1..8: note = Severe acute respiratory syndrome coronavirus 2
EPTTTTSV

SEQ ID NO: 7271 - protein, 8 aa, Severe acute respiratory syndrome-related coronavirus
  REGION 1..8: note = Table A: HLA-C*03:04H HLA-B*35:03H HLA-C*15:05H HLA-C*08:03H HLA-B*39:01H
  source 1..8: note = Severe acute respiratory syndrome coronavirus 2
TTTTSVPL

SEQ ID NO: 7272 - protein, 9 aa, Severe acute respiratory syndrome-related coronavirus
  REGION 1..9: note = Table A: HLA-B*08:01M HLA-A*02:11H HLA-A*68:02M HLA-B*14:02H HLA-A*02:04M HLA-A*02:02H HLA-B*51:01H HLA-B*38:02H HLA-B*40:06H
  source 1..9: note = Severe acute respiratory syndrome coronavirus 2
DLFMRIFTI

SEQ ID NO: 7273 - protein, 9 aa, Severe acute respiratory syndrome-related coronavirus
  REGION 1..9: note = Table A: HLA-B*38:02H HLA-B*39:01H
  source 1..9: note = Severe acute respiratory syndrome coronavirus 2
MRIFTIGTV

SEQ ID NO: 7274 - protein, 9 aa, Severe acute respiratory syndrome-related coronavirus
  REGION 1..9: note = Table A: HLA-C*14:02M HLA-C*14:03M HLA-C*04:03H HLA-A*24:02M HLA-A*24:07M HLA-A*23:01M
  source 1..9: note = Severe acute respiratory syndrome coronavirus 2
IFTIGTVTL

SEQ ID NO: 7275 - protein, 9 aa, Severe acute respiratory syndrome-related coronavirus
  REGION 1..9: note = Table A: HLA-A*11:303H HLA-A*03:01H HLA-A*03:02H HLA-A*11:01M HLA-A*11:02M HLA-A*33:03H HLA-A*26:03M HLA-A*68:01M HLA-A*68:02H HLA-A*34:01M HLA-A*34:02H HLA-C*07:27H HLA-A*66:01H
  source 1..9: note = Severe acute respiratory syndrome coronavirus 2
FTIGTVTLK

SEQ ID NO: 7276 - protein, 9 aa, Severe acute respiratory syndrome-related coronavirus
  REGION 1..9: note = Table A: HLA-A*11:01H HLA-A*34:02H
  source 1..9: note = Severe acute respiratory syndrome coronavirus 2
VTLKQGEIK

SEQ ID NO: 7277 - protein, 9 aa, Severe acute respiratory syndrome-related coronavirus
  REGION 1..9: note = Table A: HLA-B*50:01H
  source 1..9: note = Severe acute respiratory syndrome coronavirus 2
GEIKDATPS

SEQ ID NO: 7278 - protein, 9 aa, Severe acute respiratory syndrome-related coronavirus
  REGION 1..9: note = Table A: HLA-B*15:03H
  source 1..9: note = Severe acute respiratory syndrome coronavirus 2
IKDATPSDF

SEQ ID NO: 7279 - protein, 9 aa, Severe acute respiratory syndrome-related coronavirus
  REGION 1..9: note = Table A: HLA-A*33:01H HLA-A*68:01M HLA-A*34:01M HLA-A*34:02H HLA-B*35:02H HLA-A*66:01M
  source 1..9: note = Severe acute respiratory syndrome coronavirus 2
DATPSDFVR

SEQ ID NO: 7280 - protein, 9 aa, Severe acute respiratory syndrome-related coronavirus
  REGION 1..9: note = Table A: HLA-A*02:05H HLA-A*02:06H HLA-A*02:07H HLA-A*02:08H
  source 1..9: note = Severe acute respiratory syndrome coronavirus 2
ATPSDFVRA

SEQ ID NO: 7281 - protein, 9 aa, Severe acute respiratory syndrome-related coronavirus
  REGION 1..9: note = Table A: HLA-B*42:01H HLA-B*56:01M HLA-B*55:02M HLA-C*15:05H HLA-B*55:01M HLA-B*54:01H HLA-B*07:02H HLA-B*07:04M HLA-B*07:05H
  source 1..9: note = Severe acute respiratory syndrome coronavirus 2
TPSDFVRAT

SEQ ID NO: 7282 - protein, 9 aa, Severe acute respiratory syndrome-related coronavirus
  REGION 1..9: note = Table A: HLA-B*37:01H
  source 1..9: note = Severe acute respiratory syndrome coronavirus 2
SDFVRATAT

SEQ ID NO: 7283 - protein, 9 aa, Severe acute respiratory syndrome-related coronavirus
  REGION 1..9: note = Table A: HLA-B*51:01H
  source 1..9: note = Severe acute respiratory syndrome coronavirus 2
DFVRATATI

SEQ ID NO: 7284 - protein, 9 aa, Severe acute respiratory syndrome-related coronavirus
  REGION 1..9: note = Table A: HLA-C*16:04H HLA-A*11:01H HLA-C*12:05H HLA-A*68:02M HLA-C*15:05H HLA-A*02:05H HLA-A*02:08M HLA-A*02:03H HLA-B*13:02H
  source 1..9: note = Severe acute respiratory syndrome coronavirus 2
ATATIPIQA

SEQ ID NO: 7285 - protein, 9 aa, Severe acute respiratory syndrome-related coronavirus
  REGION 1..9: note = Table A: HLA-B*48:01H HLA-B*58:01M HLA-B*58:02H HLA-A*11:303M HLA-B*44:05H HLA-B*57:01H HLA-B*46:01H HLA-A*26:03H HLA-C*03:03M HLA-C*12:05H HLA-A*02:11H HLA-C*03:04M HLA-A*30:02H HLA-A*68:02M HLA-C*15:05M
  REGION 1..9: note = CONT. FROM ABOVE: HLA-C*15:02H HLA-A*02:04H HLA-A*02:05M HLA- A*02:06H HLA-A*02:08M HLA-A*02:01H HLA-A*02:02H HLA-A*02:03H HLA-C*07:27H HLA-C*17:01H HLA-C*08:01H HLA-B*38:02H HLA-B*15 :01H HLA-B*39:01H HLA-B*07:05H HLA-B*57:03H HLA-B*13:02H
  source 1..9: note = Severe acute respiratory syndrome coronavirus 2
ATIPIQASL

SEQ ID NO: 7286 - protein, 9 aa, Severe acute respiratory syndrome-related coronavirus
  REGION 1..9: note = Table A: HLA-B*53:01H HLA-B*35:03H HLA-C*15:05H HLA-B*35:01H HLA-B*35:07M HLA-B*38:02H HLA-B*15:02H HLA-B*15:11H
  source 1..9: note = Severe acute respiratory syndrome coronavirus 2
IPIQASLPF

SEQ ID NO: 7287 - protein, 9 aa, Severe acute respiratory syndrome-related coronavirus
  REGION 1..9: note = Table A: HLA-B*58:01H HLA-B*57:03H HLA-B*13:01H
  source 1..9: note = Severe acute respiratory syndrome coronavirus 2
IQASLPFGW

SEQ ID NO: 7288 - protein, 9 aa, Severe acute respiratory syndrome-related coronavirus
  REGION 1..9: note = Table A: HLA-B*58:02H HLA-A*02:04H HLA-B*57:03H
  source 1..9: note = Severe acute respiratory syndrome coronavirus 2
ASLPFGWLI

SEQ ID NO: 7289 - protein, 9 aa, Severe acute respiratory syndrome-related coronavirus
  REGION 1..9: note = Table A: HLA-B*54:01H
  source 1..9: note = Severe acute respiratory syndrome coronavirus 2
LPFGWLIVG

SEQ ID NO: 7290 - protein, 9 aa, Severe acute respiratory syndrome-related coronavirus
  REGION 1..9: note = Table A: HLA-A*02:04H HLA-A*02:02H HLA-A*02:03H HLA-C*17:01H HLA-B*38:02H
  source 1..9: note = Severe acute respiratory syndrome coronavirus 2
WLIVGVALL

SEQ ID NO: 7291 - protein, 9 aa, Severe acute respiratory syndrome-related coronavirus
  REGION 1..9: note = Table A: HLA-A*11:303H HLA-B*45:01H HLA-A*02:11H HLA-B*55:02H HLA-A*02:04H HLA-A*02:06H HLA-A*02:07H HLA-B*14:01H HLA-A*02:01M HLA-A*02:03H HLA-B*38:02H HLA-B*39:06H HLA-B*40:06H HLA-B*54:01H HLA-B*13:02H
  REGION 1..9: note = CONT. FROM ABOVE: HLA-B*50:01H
  source 1..9: note = Severe acute respiratory syndrome coronavirus 2
ALLAVFQSA

SEQ ID NO: 7292 - protein, 9 aa, Severe acute respiratory syndrome-related coronavirus
  REGION 1..9: note = Table A: HLA-A*36:01H HLA-C*03:03H HLA-A*68:01H HLA-A*34:01H HLA-A*34:02M HLA-A*66:01H
  source 1..9: note = Severe acute respiratory syndrome coronavirus 2
LAVFQSASK

SEQ ID NO: 7293 - protein, 9 aa, Severe acute respiratory syndrome-related coronavirus
  REGION 1..9: note = Table A: HLA-A*02:05H HLA-A*02:08H HLA-B*38:02H HLA-B*13:02H
  source 1..9: note = Severe acute respiratory syndrome coronavirus 2
AVFQSASKI

SEQ ID NO: 7294 - protein, 9 aa, Severe acute respiratory syndrome-related coronavirus
  REGION 1..9: note = Table A: HLA-C*14:03H
  source 1..9: note = Severe acute respiratory syndrome coronavirus 2
VFQSASKII

SEQ ID NO: 7295 - protein, 9 aa, Severe acute respiratory syndrome-related coronavirus
  REGION 1..9: note = Table A: HLA-B*58:01H HLA-B*58:02H HLA-C*16:01H HLA-B*08:01H HLA-C*03:04H HLA-A*68:02M HLA-C*15:05M HLA-C*12:03H HLA-C*15:02M HLA-A*02:05H HLA-A*02:08H HLA-A*02:02H HLA-A*02:03H HLA-C*17:01H HLA-C*08:01H HLA-B*38:02M
  REGION 1..9: note = CONT. FROM ABOVE: HLA-B*07:04H HLA-B*39:01H HLA-B*57:03H HLA- C*07:04M
  source 1..9: note = Severe acute respiratory syndrome coronavirus 2
QSASKIITL

SEQ ID NO: 7296 - protein, 9 aa, Severe acute respiratory syndrome-related coronavirus
  REGION 1..9: note = Table A: HLA-A*11:303M HLA-A*74:01H HLA-A*03:01M HLA-A*03:02H HLA-A*11:01H HLA-A*11:02H HLA-A*36:01H HLA-B*57:01H HLA-A*33:03H HLA-C*06:02H HLA-A*30:01H HLA-A*30:02H HLA-A*68:01H HLA-A*68:02M HLA-A*02:05H
  REGION 1..9: note = CONT. FROM ABOVE: HLA-A*34:01M HLA-A*34:02H HLA-C*07:27H HLA- C*17:01H HLA-B*57:03H HLA-C*02:02H HLA-B*13:02H HLA-A*66:01M
  source 1..9: note = Severe acute respiratory syndrome coronavirus 2
SASKIITLK

SEQ ID NO: 7297 - protein, 9 aa, Severe acute respiratory syndrome-related coronavirus
  REGION 1..9: note = Table A: HLA-A*11:02H HLA-A*30:01M
  source 1..9: note = Severe acute respiratory syndrome coronavirus 2
ASKIITLKK

SEQ ID NO: 7298 - protein, 9 aa, Severe acute respiratory syndrome-related coronavirus
  REGION 1..9: note = Table A: HLA-B*57:03H
  source 1..9: note = Severe acute respiratory syndrome coronavirus 2
KIITLKKRW

SEQ ID NO: 7299 - protein, 9 aa, Severe acute respiratory syndrome-related coronavirus
  REGION 1..9: note = Table A: HLA-B*58:02H HLA-A*02:11H HLA-A*02:04H HLA-A*32:01H HLA-B*57:03M
  source 1..9: note = Severe acute respiratory syndrome coronavirus 2
ITLKKRWQL

SEQ ID NO: 7300 - protein, 9 aa, Severe acute respiratory syndrome-related coronavirus
  REGION 1..9: note = Table A: HLA-B*27:05M
  source 1..9: note = Severe acute respiratory syndrome coronavirus 2
KRWQLALSK

SEQ ID NO: 7301 - protein, 9 aa, Severe acute respiratory syndrome-related coronavirus
  REGION 1..9: note = Table A: HLA-B*13:02H
  source 1..9: note = Severe acute respiratory syndrome coronavirus 2
WQLALSKGV

SEQ ID NO: 7302 - protein, 9 aa, Severe acute respiratory syndrome-related coronavirus
  REGION 1..9: note = Table A: HLA-B*57:03H
  source 1..9: note = Severe acute respiratory syndrome coronavirus 2
LALSKGVHF

SEQ ID NO: 7303 - protein, 9 aa, Severe acute respiratory syndrome-related coronavirus
  REGION 1..9: note = Table A: HLA-A*02:11H HLA-A*68:02H HLA-C*15:02H HLA-A*02:04H HLA-A*02:05M HLA-A*02:06M HLA-A*02:08M HLA-A*02:01H HLA-A*02:02H HLA-A*02:03H HLA-B*38:02M HLA-B*13:02M
  source 1..9: note = Severe acute respiratory syndrome coronavirus 2
ALSKGVHFV

SEQ ID NO: 7304 - protein, 9 aa, Severe acute respiratory syndrome-related coronavirus
  REGION 1..9: note = Table A: HLA-B*38:02H
  source 1..9: note = Severe acute respiratory syndrome coronavirus 2
VHFVCNLLL

SEQ ID NO: 7305 - protein, 9 aa, Severe acute respiratory syndrome-related coronavirus
  REGION 1..9: note = Table A: HLA-A*02:11H HLA-A*02:04H HLA-A*02:06H HLA-A*02:07H
  source 1..9: note = Severe acute respiratory syndrome coronavirus 2
NLLLLFVTV

SEQ ID NO: 7306 - protein, 9 aa, Severe acute respiratory syndrome-related coronavirus
  REGION 1..9: note = Table A: HLA-B*38:02M HLA-B*15:02M
  source 1..9: note = Severe acute respiratory syndrome coronavirus 2
LLLLFVTVY

SEQ ID NO: 7307 - protein, 9 aa, Severe acute respiratory syndrome-related coronavirus
  REGION 1..9: note = Table A: HLA-C*14:02H HLA-C*14:03H HLA-A*24:07H HLA-A*23:01H
  source 1..9: note = Severe acute respiratory syndrome coronavirus 2
LFVTVYSHL

SEQ ID NO: 7308 - protein, 9 aa, Severe acute respiratory syndrome-related coronavirus
  REGION 1..9: note = Table A: HLA-A*02:11H HLA-C*03:04H HLA-A*68:02H HLA-C*15:02H HLA-A*02:04H HLA-A*02:05H HLA-A*02:06H HLA-A*02:02M HLA-C*17:01H HLA-C*08:01H
  source 1..9: note = Severe acute respiratory syndrome coronavirus 2
FVTVYSHLL

SEQ ID NO: 7309 - protein, 9 aa, Severe acute respiratory syndrome-related coronavirus
  REGION 1..9: note = Table A: HLA-C*15:02M HLA-B*57:03H
  source 1..9: note = Severe acute respiratory syndrome coronavirus 2
VTVYSHLLL

SEQ ID NO: 7310 - protein, 9 aa, Severe acute respiratory syndrome-related coronavirus
  REGION 1..9: note = Table A: HLA-A*03:01H HLA-A*11:02H HLA-C*06:02H HLA-A*29:02H HLA-A*02:11M HLA-A*68:02M HLA-C*15:05H HLA-C*15:02H HLA-A*02:04M HLA-A*02:05H HLA-A*02:06H HLA-A*02:07M HLA-A*02:01H HLA-A*02:02H HLA-A*02:03M HLA-A*34:01H
  REGION 1..9: note = CONT. FROM ABOVE: HLA-A*34:02M HLA-B*51:01H HLA-C*08:01M HLA- B*38:02M HLA-B*40:06H HLA-B*13:02M
  source 1..9: note = Severe acute respiratory syndrome coronavirus 2
TVYSHLLLV

SEQ ID NO: 7311 - protein, 9 aa, Severe acute respiratory syndrome-related coronavirus
  REGION 1..9: note = Table A: HLA-A*29:02H
  source 1..9: note = Severe acute respiratory syndrome coronavirus 2
VYSHLLLVA

SEQ ID NO: 7312 - protein, 9 aa, Severe acute respiratory syndrome-related coronavirus
  REGION 1..9: note = Table A: HLA-B*56:01M HLA-B*55:02M HLA-B*55:01H HLA-C*08:01H HLA-B*39:06M HLA-B*40:06H HLA-B*54:01H
  source 1..9: note = Severe acute respiratory syndrome coronavirus 2
YSHLLLVAA

SEQ ID NO: 7313 - protein, 9 aa, Severe acute respiratory syndrome-related coronavirus
  REGION 1..9: note = Table A: HLA-B*39:06H HLA-B*39:01H
  source 1..9: note = Severe acute respiratory syndrome coronavirus 2
SHLLLVAAG

SEQ ID NO: 7314 - protein, 9 aa, Severe acute respiratory syndrome-related coronavirus
  REGION 1..9: note = Table A: HLA-A*02:11H HLA-A*02:04H
  source 1..9: note = Severe acute respiratory syndrome coronavirus 2
HLLLVAAGL

SEQ ID NO: 7315 - protein, 9 aa, Severe acute respiratory syndrome-related coronavirus
  REGION 1..9: note = Table A: HLA-B*38:02H
  source 1..9: note = Severe acute respiratory syndrome coronavirus 2
LLVAAGLEA

SEQ ID NO: 7316 - protein, 9 aa, Severe acute respiratory syndrome-related coronavirus
  REGION 1..9: note = Table A: HLA-B*35:01H HLA-B*35:02H HLA-B*35:08H HLA-B*35:07H
  source 1..9: note = Severe acute respiratory syndrome coronavirus 2
VAAGLEAPF

SEQ ID NO: 7317 - protein, 9 aa, Severe acute respiratory syndrome-related coronavirus
  REGION 1..9: note = Table A: HLA-A*29:01H HLA-A*29:02H HLA-C*07:01H HLA-A*30:02H
  source 1..9: note = Severe acute respiratory syndrome coronavirus 2
AGLEAPFLY

SEQ ID NO: 7318 - protein, 9 aa, Severe acute respiratory syndrome-related coronavirus
  REGION 1..9: note = Table A: HLA-A*02:07H
  source 1..9: note = Severe acute respiratory syndrome coronavirus 2
GLEAPFLYL

SEQ ID NO: 7319 - protein, 9 aa, Severe acute respiratory syndrome-related coronavirus
  REGION 1..9: note = Table A: HLA-A*29:02H HLA-B*44:03H HLA-B*18:01H HLA-C*07:01H HLA-B*07:05H
  source 1..9: note = Severe acute respiratory syndrome coronavirus 2
LEAPFLYLY

SEQ ID NO: 7320 - protein, 9 aa, Severe acute respiratory syndrome-related coronavirus
  REGION 1..9: note = Table A: HLA-C*15:05H HLA-B*07:05H
  source 1..9: note = Severe acute respiratory syndrome coronavirus 2
APFLYLYAL

SEQ ID NO: 7321 - protein, 9 aa, Severe acute respiratory syndrome-related coronavirus
  REGION 1..9: note = Table A: HLA-B*38:02H HLA-B*15:02H
  source 1..9: note = Severe acute respiratory syndrome coronavirus 2
FLYLYALVY

SEQ ID NO: 7322 - protein, 9 aa, Severe acute respiratory syndrome-related coronavirus
  REGION 1..9: note = Table A: HLA-A*02:11M HLA-A*02:04M HLA-A*02:07H HLA-A*02:01H HLA-A*02:02M
  source 1..9: note = Severe acute respiratory syndrome coronavirus 2
YLYALVYFL

SEQ ID NO: 7323 - protein, 9 aa, Severe acute respiratory syndrome-related coronavirus
  REGION 1..9: note = Table A: HLA-A*02:04M HLA-A*02:02H HLA-A*02:03H HLA-B*38:02H HLA-B*13:02H
  source 1..9: note = Severe acute respiratory syndrome coronavirus 2
ALVYFLQSI

SEQ ID NO: 7324 - protein, 9 aa, Severe acute respiratory syndrome-related coronavirus
  REGION 1..9: note = Table A: HLA-C*14:02M HLA-C*14:03H HLA-A*29:02H HLA-C*07:02H HLA-A*24:02H HLA-A*24:07H HLA-C*08:01H HLA-A*23:01M
  source 1..9: note = Severe acute respiratory syndrome coronavirus 2
VYFLQSINF

SEQ ID NO: 7325 - protein, 9 aa, Severe acute respiratory syndrome-related coronavirus
  REGION 1..9: note = Table A: HLA-C*14:03H
  source 1..9: note = Severe acute respiratory syndrome coronavirus 2
YFLQSINFV

SEQ ID NO: 7326 - protein, 9 aa, Severe acute respiratory syndrome-related coronavirus
  REGION 1..9: note = Table A: HLA-A*74:01M
  source 1..9: note = Severe acute respiratory syndrome coronavirus 2
FLQSINFVR

SEQ ID NO: 7327 - protein, 9 aa, Severe acute respiratory syndrome-related coronavirus
  REGION 1..9: note = Table A: HLA-B*13:01H HLA-B*13:02H
  source 1..9: note = Severe acute respiratory syndrome coronavirus 2
LQSINFVRI

SEQ ID NO: 7328 - protein, 9 aa, Severe acute respiratory syndrome-related coronavirus
  REGION 1..9: note = Table A: HLA-B*58:02H HLA-C*16:01H HLA-C*06:02M HLA-A*68:02H HLA-C*12:03M HLA-C*15:02M
  source 1..9: note = Severe acute respiratory syndrome coronavirus 2
QSINFVRII

SEQ ID NO: 7329 - protein, 9 aa, Severe acute respiratory syndrome-related coronavirus
  REGION 1..9: note = Table A: HLA-C*15:05H HLA-B*07:04M HLA-C*07:04H
  source 1..9: note = Severe acute respiratory syndrome coronavirus 2
SINFVRIIM

SEQ ID NO: 7330 - protein, 9 aa, Severe acute respiratory syndrome-related coronavirus
  REGION 1..9: note = Table A: HLA-A*36:01H HLA-B*27:05H
  source 1..9: note = Severe acute respiratory syndrome coronavirus 2
CRSKNPLLY

SEQ ID NO: 7331 - protein, 9 aa, Severe acute respiratory syndrome-related coronavirus
  REGION 1..9: note = Table A: HLA-B*39:06H
  source 1..9: note = Severe acute respiratory syndrome coronavirus 2
SKNPLLYDA

SEQ ID NO: 7332 - protein, 9 aa, Severe acute respiratory syndrome-related coronavirus
  REGION 1..9: note = Table A: HLA-B*35:01M HLA-B*35:08H HLA-B*35:07H
  source 1..9: note = Severe acute respiratory syndrome coronavirus 2
NPLLYDANY

SEQ ID NO: 7333 - protein, 9 aa, Severe acute respiratory syndrome-related coronavirus
  REGION 1..9: note = Table A: HLA-A*02:11M HLA-A*02:04M HLA-A*02:07H HLA-A*02:01M HLA-A*02:02M
  source 1..9: note = Severe acute respiratory syndrome coronavirus 2
LLYDANYFL

SEQ ID NO: 7334 - protein, 9 aa, Severe acute respiratory syndrome-related coronavirus
  REGION 1..9: note = Table A: HLA-B*56:01H HLA-B*55:02H HLA-C*15:05H HLA-B*54:01H
  source 1..9: note = Severe acute respiratory syndrome coronavirus 2
IPYNSVTSS

SEQ ID NO: 7335 - protein, 9 aa, Severe acute respiratory syndrome-related coronavirus
  REGION 1..9: note = Table A: HLA-A*24:02H HLA-A*23:01H
  source 1..9: note = Severe acute respiratory syndrome coronavirus 2
PYNSVTSSI

SEQ ID NO: 7336 - protein, 9 aa, Severe acute respiratory syndrome-related coronavirus
  REGION 1..9: note = Table A: HLA-A*68:01H HLA-A*68:02H
  source 1..9: note = Severe acute respiratory syndrome coronavirus 2
VTSSIVITS

SEQ ID NO: 7337 - protein, 9 aa, Severe acute respiratory syndrome-related coronavirus
  REGION 1..9: note = Table A: HLA-C*08:02H
  source 1..9: note = Severe acute respiratory syndrome coronavirus 2
SGDGTTSPI

SEQ ID NO: 7338 - protein, 9 aa, Severe acute respiratory syndrome-related coronavirus
  REGION 1..9: note = Table A: HLA-A*11:01H HLA-C*07:27H
  source 1..9: note = Severe acute respiratory syndrome coronavirus 2
GTTSPISEH

SEQ ID NO: 7339 - protein, 9 aa, Severe acute respiratory syndrome-related coronavirus
  REGION 1..9: note = Table A: HLA-A*30:02H
  source 1..9: note = Severe acute respiratory syndrome coronavirus 2
TSPISEHDY

SEQ ID NO: 7340 - protein, 9 aa, Severe acute respiratory syndrome-related coronavirus
  REGION 1..9: note = Table A: HLA-A*02:05H HLA-A*02:02H
  source 1..9: note = Severe acute respiratory syndrome coronavirus 2
PISEHDYQI

SEQ ID NO: 7341 - protein, 9 aa, Severe acute respiratory syndrome-related coronavirus
  REGION 1..9: note = Table A: HLA-B*38:02H HLA-B*39:01M
  source 1..9: note = Severe acute respiratory syndrome coronavirus 2
EHDYQIGGY

SEQ ID NO: 7342 - protein, 9 aa, Severe acute respiratory syndrome-related coronavirus
  REGION 1..9: note = Table A: HLA-A*11:01H HLA-A*11:02H HLA-A*26:03H HLA-A*34:01H HLA-A*34:02H HLA-A*66:01H
  source 1..9: note = Severe acute respiratory syndrome coronavirus 2
YQIGGYTEK

SEQ ID NO: 7343 - protein, 9 aa, Severe acute respiratory syndrome-related coronavirus
  REGION 1..9: note = Table A: HLA-B*58:01H HLA-B*53:01M HLA-B*57:03H HLA-B*13:01H
  source 1..9: note = Severe acute respiratory syndrome coronavirus 2
QIGGYTEKW

SEQ ID NO: 7344 - protein, 9 aa, Severe acute respiratory syndrome-related coronavirus
  REGION 1..9: note = Table A: HLA-A*02:11H HLA-A*68:02H
  source 1..9: note = Severe acute respiratory syndrome coronavirus 2
YTEKWESGV

SEQ ID NO: 7345 - protein, 9 aa, Severe acute respiratory syndrome-related coronavirus
  REGION 1..9: note = Table A: HLA-B*49:01H
  source 1..9: note = Severe acute respiratory syndrome coronavirus 2
WESGVKDCV

SEQ ID NO: 7346 - protein, 9 aa, Severe acute respiratory syndrome-related coronavirus
  REGION 1..9: note = Table A: HLA-B*58:01M HLA-A*36:01H HLA-A*29:02H HLA-A*01:01M HLA-A*30:02M HLA-A*34:02H HLA-B*35:07H HLA-B*38:02M HLA-B*15:02H
  source 1..9: note = Severe acute respiratory syndrome coronavirus 2
HSYFTSDYY

SEQ ID NO: 7347 - protein, 9 aa, Severe acute respiratory syndrome-related coronavirus
  REGION 1..9: note = Table A: HLA-A*24:02H HLA-A*24:07M HLA-A*23:01H
  source 1..9: note = Severe acute respiratory syndrome coronavirus 2
YFTSDYYQL

SEQ ID NO: 7348 - protein, 9 aa, Severe acute respiratory syndrome-related coronavirus
  REGION 1..9: note = Table A: HLA-C*16:01H HLA-C*16:04H HLA-A*36:01M HLA-C*06:02H HLA-A*26:01M HLA-A*29:01M HLA-A*29:02M HLA-A*01:01H HLA-C*07:01H HLA-A*30:02H HLA-C*15:05H HLA-C*12:03H HLA-A*34:02M HLA-B*35:01H HLA-B*35:07H HLA-B*38:02H
  REGION 1..9: note = CONT. FROM ABOVE: HLA-C*02:02H HLA-A*66:01H
  source 1..9: note = Severe acute respiratory syndrome coronavirus 2
FTSDYYQLY

SEQ ID NO: 7349 - protein, 9 aa, Severe acute respiratory syndrome-related coronavirus
  REGION 1..9: note = Table A: HLA-C*14:02H HLA-C*14:03H HLA-C*04:01H HLA-C*07:01H HLA-C*07:02M HLA-A*24:02H HLA-A*24:07M HLA-C*08:01H HLA-A*23:01M HLA-B*39:01H
  source 1..9: note = Severe acute respiratory syndrome coronavirus 2
YYQLYSTQL

SEQ ID NO: 7350 - protein, 9 aa, Severe acute respiratory syndrome-related coronavirus
  REGION 1..9: note = Table A: HLA-B*38:02H HLA-B*13:02H
  source 1..9: note = Severe acute respiratory syndrome coronavirus 2
QLYSTQLST

SEQ ID NO: 7351 - protein, 9 aa, Severe acute respiratory syndrome-related coronavirus
  REGION 1..9: note = Table A: HLA-B*38:02H HLA-B*13:02M
  source 1..9: note = Severe acute respiratory syndrome coronavirus 2
TQLSTDTGV

SEQ ID NO: 7352 - protein, 9 aa, Severe acute respiratory syndrome-related coronavirus
  REGION 1..9: note = Table A: HLA-A*11:303H HLA-B*46:01H
  source 1..9: note = Severe acute respiratory syndrome coronavirus 2
LSTDTGVEH

SEQ ID NO: 7353 - protein, 9 aa, Severe acute respiratory syndrome-related coronavirus
  REGION 1..9: note = Table A: HLA-A*01:01H HLA-C*04:03M HLA-A*02:11M HLA-A*68:02M HLA-A*02:05H HLA-A*02:06M HLA-A*02:07M HLA-A*02:01H HLA-C*08:02M HLA-B*38:02H HLA-C*05:01M
  source 1..9: note = Severe acute respiratory syndrome coronavirus 2
STDTGVEHV

SEQ ID NO: 7354 - protein, 9 aa, Severe acute respiratory syndrome-related coronavirus
  REGION 1..9: note = Table A: HLA-A*25:01H HLA-A*26:02H HLA-B*35:01H HLA-B*15:02H
  source 1..9: note = Severe acute respiratory syndrome coronavirus 2
DTGVEHVTF

SEQ ID NO: 7355 - protein, 9 aa, Severe acute respiratory syndrome-related coronavirus
  REGION 1..9: note = Table A: HLA-C*12:02H HLA-C*12:03H HLA-C*17:01H HLA-B*38:02H HLA-B*57:03H HLA-C*07:04M
  source 1..9: note = Severe acute respiratory syndrome coronavirus 2
TGVEHVTFF

SEQ ID NO: 7356 - protein, 9 aa, Severe acute respiratory syndrome-related coronavirus
  REGION 1..9: note = Table A: HLA-B*44:03H HLA-B*18:01H HLA-B*07:05H
  source 1..9: note = Severe acute respiratory syndrome coronavirus 2
VEHVTFFIY

SEQ ID NO: 7357 - protein, 9 aa, Severe acute respiratory syndrome-related coronavirus
  REGION 1..9: note = Table A: HLA-A*11:01H HLA-A*11:02H HLA-A*36:01H HLA-A*34:02M
  source 1..9: note = Severe acute respiratory syndrome coronavirus 2
HVTFFIYNK

SEQ ID NO: 7358 - protein, 9 aa, Severe acute respiratory syndrome-related coronavirus
  REGION 1..9: note = Table A: HLA-B*58:02H HLA-A*02:11H HLA-A*68:02H HLA-B*57:03M
  source 1..9: note = Severe acute respiratory syndrome coronavirus 2
VTFFIYNKI

SEQ ID NO: 7359 - protein, 9 aa, Severe acute respiratory syndrome-related coronavirus
  REGION 1..9: note = Table A: HLA-C*04:01H HLA-C*04:03H HLA-A*02:11H HLA-A*68:02H HLA-A*02:06M HLA-A*02:07H HLA-A*02:01H HLA-B*35:02H HLA-C*08:01H HLA-C*08:02H HLA-B*35:12H HLA-B*38:02H HLA-C*05:01H HLA-B*13:01H
  source 1..9: note = Severe acute respiratory syndrome coronavirus 2
IVDEPEEHV

SEQ ID NO: 7360 - protein, 9 aa, Severe acute respiratory syndrome-related coronavirus
  REGION 1..9: note = Table A: HLA-B*44:05H
  source 1..9: note = Severe acute respiratory syndrome coronavirus 2
DEPEEHVQI

SEQ ID NO: 7361 - protein, 9 aa, Severe acute respiratory syndrome-related coronavirus
  REGION 1..9: note = Table A: HLA-B*35:01H HLA-B*35:02H
  source 1..9: note = Severe acute respiratory syndrome coronavirus 2
EPEEHVQIH

SEQ ID NO: 7362 - protein, 9 aa, Severe acute respiratory syndrome-related coronavirus
  REGION 1..9: note = Table A: HLA-B*44:02M HLA-B*44:05H HLA-B*45:01M HLA-B*44:03M HLA-B*18:01H HLA-A*68:02H HLA-B*40:02M HLA-B*40:06H HLA-B*41:02M HLA-B*49:01H
  source 1..9: note = Severe acute respiratory syndrome coronavirus 2
EEHVQIHTI

SEQ ID NO: 7363 - protein, 9 aa, Severe acute respiratory syndrome-related coronavirus
  REGION 1..9: note = Table A: HLA-A*11:303H HLA-A*25:01H HLA-A*26:01M HLA-A*26:02M HLA-A*26:03M HLA-A*02:11H HLA-A*68:02M HLA-C*15:05H HLA-C*15:02H HLA-A*02:05M HLA-A*02:06M HLA-A*02:08M HLA-A*02:01H HLA-A*02:02H HLA-A*02:03M
  REGION 1..9: note = CONT. FROM ABOVE: HLA-A*34:01H HLA-B*38:02M HLA-B*39:01H HLA- B*13:02H HLA-A*66:01M
  source 1..9: note = Severe acute respiratory syndrome coronavirus 2
HTIDGSSGV

SEQ ID NO: 7364 - protein, 9 aa, Severe acute respiratory syndrome-related coronavirus
  REGION 1..9: note = Table A: HLA-C*08:02H HLA-B*39:01H
  source 1..9: note = Severe acute respiratory syndrome coronavirus 2
TIDGSSGVV

SEQ ID NO: 7365 - protein, 9 aa, Severe acute respiratory syndrome-related coronavirus
  REGION 1..9: note = Table A: HLA-A*68:02H HLA-C*08:03H
  source 1..9: note = Severe acute respiratory syndrome coronavirus 2
GSSGVVNPV

SEQ ID NO: 7366 - protein, 9 aa, Severe acute respiratory syndrome-related coronavirus
  REGION 1..9: note = Table A: HLA-B*58:01H HLA-A*11:303H HLA-B*35:03H HLA-C*15:05M HLA-B*35:01H HLA-B*40:02H HLA-B*07:05H HLA-B*57:03H HLA-C*07:04H
  source 1..9: note = Severe acute respiratory syndrome coronavirus 2
SSGVVNPVM

SEQ ID NO: 7367 - protein, 9 aa, Severe acute respiratory syndrome-related coronavirus
  REGION 1..9: note = Table A: HLA-A*02:11H HLA-A*68:02H HLA-C*15:05H HLA-A*02:05H HLA-A*02:06H HLA-A*02:07H HLA-A*02:08H HLA-C*08:01H HLA-B*38:02H
  source 1..9: note = Severe acute respiratory syndrome coronavirus 2
VVNPVMEPI

SEQ ID NO: 7368 - protein, 9 aa, Severe acute respiratory syndrome-related coronavirus
  REGION 1..9: note = Table A: HLA-B*35:03H HLA-B*35:02M HLA-B*35:08H HLA-B*35:12H
  source 1..9: note = Severe acute respiratory syndrome coronavirus 2
EPIYDEPTT

SEQ ID NO: 7369 - protein, 9 aa, Severe acute respiratory syndrome-related coronavirus
  REGION 1..9: note = Table A: HLA-C*04:01H
  source 1..9: note = Severe acute respiratory syndrome coronavirus 2
IYDEPTTTT

SEQ ID NO: 7370 - protein, 9 aa, Severe acute respiratory syndrome-related coronavirus
  REGION 1..9: note = Table A: HLA-B*51:01H HLA-B*07:05M HLA-B*49:01H
  source 1..9: note = Severe acute respiratory syndrome coronavirus 2
DEPTTTTSV

SEQ ID NO: 7371 - protein, 9 aa, Severe acute respiratory syndrome-related coronavirus
  REGION 1..9: note = Table A: HLA-A*68:02H HLA-C*15:05H HLA-C*08:03H
  source 1..9: note = Severe acute respiratory syndrome coronavirus 2
PTTTTSVPL

SEQ ID NO: 7372 - protein, 10 aa, Severe acute respiratory syndrome-related coronavirus
  REGION 1..10: note = Table A: HLA-A*02:03H
  source 1..10: note = Severe acute respiratory syndrome coronavirus 2
FMRIFTIGTV

SEQ ID NO: 7373 - protein, 10 aa, Severe acute respiratory syndrome-related coronavirus
  REGION 1..10: note = Table A: HLA-B*48:01H HLA-B*58:02H HLA-A*74:01H HLA-A*02:11M HLA-A*68:02H HLA-C*15:05H HLA-C*15:02H HLA-A*02:04H HLA-A*02:05M HLA-A*02:08H HLA-A*02:02M HLA-A*02:03H HLA-C*08:01H HLA-C*08:03H HLA-A*32:01M HLA-B*40:02H
  REGION 1..10: note = CONT. FROM ABOVE: HLA-B*40:06H HLA-B*15:01H HLA-B*57:03M HLA- B*13:01H HLA-B*13:02H
  source 1..10: note = Severe acute respiratory syndrome coronavirus 2
RIFTIGTVTL

SEQ ID NO: 7374 - protein, 10 aa, Severe acute respiratory syndrome-related coronavirus
  REGION 1..10: note = Table A: HLA-A*34:02H
  source 1..10: note = Severe acute respiratory syndrome coronavirus 2
FTIGTVTLKQ

SEQ ID NO: 7375 - protein, 10 aa, Severe acute respiratory syndrome-related coronavirus
  REGION 1..10: note = Table A: HLA-C*08:03H
  source 1..10: note = Severe acute respiratory syndrome coronavirus 2
GTVTLKQGEI

SEQ ID NO: 7376 - protein, 10 aa, Severe acute respiratory syndrome-related coronavirus
  REGION 1..10: note = Table A: HLA-A*02:02H HLA-A*02:03H
  source 1..10: note = Severe acute respiratory syndrome coronavirus 2
TLKQGEIKDA

SEQ ID NO: 7377 - protein, 10 aa, Severe acute respiratory syndrome-related coronavirus
  REGION 1..10: note = Table A: HLA-A*25:01M HLA-A*26:01M HLA-A*26:02H HLA-A*26:03M HLA-A*34:01H
  source 1..10: note = Severe acute respiratory syndrome coronavirus 2
EIKDATPSDF

SEQ ID NO: 7378 - protein, 10 aa, Severe acute respiratory syndrome-related coronavirus
  REGION 1..10: note = Table A: HLA-A*68:02H
  source 1..10: note = Severe acute respiratory syndrome coronavirus 2
DATPSDFVRA

SEQ ID NO: 7379 - protein, 10 aa, Severe acute respiratory syndrome-related coronavirus
  REGION 1..10: note = Table A: HLA-B*42:01H HLA-B*56:01H HLA-B*55:02H HLA-A*68:02H HLA-C*15:05M HLA-B*55:01H HLA-B*39:06H HLA-B*54:01M HLA-B*07:02M HLA-B*07:04M HLA-B*07:05H HLA-B*50:01H
  source 1..10: note = Severe acute respiratory syndrome coronavirus 2
TPSDFVRATA

SEQ ID NO: 7380 - protein, 10 aa, Severe acute respiratory syndrome-related coronavirus
  REGION 1..10: note = Table A: HLA-B*56:01H HLA-B*55:02H
  source 1..10: note = Severe acute respiratory syndrome coronavirus 2
RATATIPIQA

SEQ ID NO: 7381 - protein, 10 aa, Severe acute respiratory syndrome-related coronavirus
  REGION 1..10: note = Table A: HLA-B*56:01H HLA-B*55:02M HLA-A*68:02H HLA-B*51:01H HLA-B*54:01M
  source 1..10: note = Severe acute respiratory syndrome coronavirus 2
LPFGWLIVGV

SEQ ID NO: 7382 - protein, 10 aa, Severe acute respiratory syndrome-related coronavirus
  REGION 1..10: note = Table A: HLA-B*55:02H HLA-B*54:01H
  source 1..10: note = Severe acute respiratory syndrome coronavirus 2
VALLAVFQSA

SEQ ID NO: 7383 - protein, 10 aa, Severe acute respiratory syndrome-related coronavirus
  REGION 1..10: note = Table A: HLA-A*03:01H HLA-A*03:02H
  source 1..10: note = Severe acute respiratory syndrome coronavirus 2
LLAVFQSASK

SEQ ID NO: 7384 - protein, 10 aa, Severe acute respiratory syndrome-related coronavirus
  REGION 1..10: note = Table A: HLA-A*02:02H HLA-B*38:02H HLA-B*13:01H
  source 1..10: note = Severe acute respiratory syndrome coronavirus 2
FQSASKIITL

SEQ ID NO: 7385 - protein, 10 aa, Severe acute respiratory syndrome-related coronavirus
  REGION 1..10: note = Table A: HLA-A*03:01H HLA-A*03:02H HLA-A*11:01M HLA-A*11:02H HLA-A*68:01H HLA-A*34:02H HLA-C*07:27H
  source 1..10: note = Severe acute respiratory syndrome coronavirus 2
QSASKIITLK

SEQ ID NO: 7386 - protein, 10 aa, Severe acute respiratory syndrome-related coronavirus
  REGION 1..10: note = Table A: HLA-A*03:02H HLA-A*11:01H HLA-A*11:02H HLA-A*68:01H HLA-A*34:02H
  source 1..10: note = Severe acute respiratory syndrome coronavirus 2
SASKIITLKK

SEQ ID NO: 7387 - protein, 10 aa, Severe acute respiratory syndrome-related coronavirus
  REGION 1..10: note = Table A: HLA-B*15:02H
  source 1..10: note = Severe acute respiratory syndrome coronavirus 2
NLLLLFVTVY

SEQ ID NO: 7388 - protein, 10 aa, Severe acute respiratory syndrome-related coronavirus
  REGION 1..10: note = Table A: HLA-A*02:02H
  source 1..10: note = Severe acute respiratory syndrome coronavirus 2
LLFVTVYSHL

SEQ ID NO: 7389 - protein, 10 aa, Severe acute respiratory syndrome-related coronavirus
  REGION 1..10: note = Table A: HLA-A*24:07H
  source 1..10: note = Severe acute respiratory syndrome coronavirus 2
LFVTVYSHLL

SEQ ID NO: 7390 - protein, 10 aa, Severe acute respiratory syndrome-related coronavirus
  REGION 1..10: note = Table A: HLA-C*15:02H
  source 1..10: note = Severe acute respiratory syndrome coronavirus 2
VTVYSHLLLV

SEQ ID NO: 7391 - protein, 10 aa, Severe acute respiratory syndrome-related coronavirus
  REGION 1..10: note = Table A: HLA-B*55:02H HLA-B*55:01H
  source 1..10: note = Severe acute respiratory syndrome coronavirus 2
TVYSHLLLVA

SEQ ID NO: 7392 - protein, 10 aa, Severe acute respiratory syndrome-related coronavirus
  REGION 1..10: note = Table A: HLA-B*55:02H
  source 1..10: note = Severe acute respiratory syndrome coronavirus 2
VYSHLLLVAA

SEQ ID NO: 7393 - protein, 10 aa, Severe acute respiratory syndrome-related coronavirus
  REGION 1..10: note = Table A: HLA-B*38:02H
  source 1..10: note = Severe acute respiratory syndrome coronavirus 2
SHLLLVAAGL

SEQ ID NO: 7394 - protein, 10 aa, Severe acute respiratory syndrome-related coronavirus
  REGION 1..10: note = Table A: HLA-A*36:01H HLA-A*29:02H
  source 1..10: note = Severe acute respiratory syndrome coronavirus 2
GLEAPFLYLY

SEQ ID NO: 7395 - protein, 10 aa, Severe acute respiratory syndrome-related coronavirus
  REGION 1..10: note = Table A: HLA-B*45:01H HLA-B*50:01H
  source 1..10: note = Severe acute respiratory syndrome coronavirus 2
LEAPFLYLYA

SEQ ID NO: 7396 - protein, 10 aa, Severe acute respiratory syndrome-related coronavirus
  REGION 1..10: note = Table A: HLA-A*02:11H HLA-A*02:04H
  source 1..10: note = Severe acute respiratory syndrome coronavirus 2
FLQSINFVRI

SEQ ID NO: 7397 - protein, 10 aa, Severe acute respiratory syndrome-related coronavirus
  REGION 1..10: note = Table A: HLA-A*74:01H
  source 1..10: note = Severe acute respiratory syndrome coronavirus 2
SINFVRIIMR

SEQ ID NO: 7398 - protein, 10 aa, Severe acute respiratory syndrome-related coronavirus
  REGION 1..10: note = Table A: HLA-A*36:01H HLA-A*30:02H
  source 1..10: note = Severe acute respiratory syndrome coronavirus 2
KNPLLYDANY

SEQ ID NO: 7399 - protein, 10 aa, Severe acute respiratory syndrome-related coronavirus
  REGION 1..10: note = Table A: HLA-A*68:02H
  source 1..10: note = Severe acute respiratory syndrome coronavirus 2
YDYCIPYNSV

SEQ ID NO: 7400 - protein, 10 aa, Severe acute respiratory syndrome-related coronavirus
  REGION 1..10: note = Table A: HLA-B*56:01H HLA-B*55:02H HLA-C*15:05H HLA-B*55:01H HLA-B*51:01H HLA-B*54:01H HLA-B*07:02H HLA-B*07:05M
  source 1..10: note = Severe acute respiratory syndrome coronavirus 2
IPYNSVTSSI

SEQ ID NO: 7401 - protein, 10 aa, Severe acute respiratory syndrome-related coronavirus
  REGION 1..10: note = Table A: HLA-A*68:02H
  source 1..10: note = Severe acute respiratory syndrome coronavirus 2
VTSSIVITSG

SEQ ID NO: 7402 - protein, 10 aa, Severe acute respiratory syndrome-related coronavirus
  REGION 1..10: note = Table A: HLA-A*36:01M HLA-A*01:01H HLA-A*30:02H HLA-A*68:02H
  source 1..10: note = Severe acute respiratory syndrome coronavirus 2
TTSPISEHDY

SEQ ID NO: 7403 - protein, 10 aa, Severe acute respiratory syndrome-related coronavirus
  REGION 1..10: note = Table A: HLA-B*53:01H HLA-B*35:03M HLA-C*15:05H HLA-B*35:02M HLA-B*35:12M
  source 1..10: note = Severe acute respiratory syndrome coronavirus 2
SPISEHDYQI

SEQ ID NO: 7404 - protein, 10 aa, Severe acute respiratory syndrome-related coronavirus
  REGION 1..10: note = Table A: HLA-B*44:02H HLA-B*44:05H HLA-B*44:03M HLA-B*18:01H
  source 1..10: note = Severe acute respiratory syndrome coronavirus 2
SEHDYQIGGY

SEQ ID NO: 7405 - protein, 10 aa, Severe acute respiratory syndrome-related coronavirus
  REGION 1..10: note = Table A: HLA-B*39:01H
  source 1..10: note = Severe acute respiratory syndrome coronavirus 2
EHDYQIGGYT

SEQ ID NO: 7406 - protein, 10 aa, Severe acute respiratory syndrome-related coronavirus
  REGION 1..10: note = Table A: HLA-A*33:03H
  source 1..10: note = Severe acute respiratory syndrome coronavirus 2
DYQIGGYTEK

SEQ ID NO: 7407 - protein, 10 aa, Severe acute respiratory syndrome-related coronavirus
  REGION 1..10: note = Table A: HLA-B*58:01H HLA-B*57:01H HLA-A*25:01M HLA-B*44:03H HLA-B*27:02H HLA-B*53:01M HLA-B*15:13M HLA-B*38:01H HLA-B*38:02M HLA-B*15:01H HLA-B*57:03H HLA-B*13:01H
  source 1..10: note = Severe acute respiratory syndrome coronavirus 2
YQIGGYTEKW

SEQ ID NO: 7408 - protein, 10 aa, Severe acute respiratory syndrome-related coronavirus
  REGION 1..10: note = Table A: HLA-B*38:02H
  source 1..10: note = Severe acute respiratory syndrome coronavirus 2
LHSYFTSDYY

SEQ ID NO: 7409 - protein, 10 aa, Severe acute respiratory syndrome-related coronavirus
  REGION 1..10: note = Table A: HLA-A*02:02H HLA-A*24:02H HLA-A*24:07H HLA-A*23:01H
  source 1..10: note = Severe acute respiratory syndrome coronavirus 2
SYFTSDYYQL

SEQ ID NO: 7410 - protein, 10 aa, Severe acute respiratory syndrome-related coronavirus
  REGION 1..10: note = Table A: HLA-A*29:01H HLA-A*29:02M
  source 1..10: note = Severe acute respiratory syndrome coronavirus 2
YFTSDYYQLY

SEQ ID NO: 7411 - protein, 10 aa, Severe acute respiratory syndrome-related coronavirus
  REGION 1..10: note = Table A: HLA-A*33:03H
  source 1..10: note = Severe acute respiratory syndrome coronavirus 2
DYYQLYSTQL

SEQ ID NO: 7412 - protein, 10 aa, Severe acute respiratory syndrome-related coronavirus
  REGION 1..10: note = Table A: HLA-A*68:02H
  source 1..10: note = Severe acute respiratory syndrome coronavirus 2
LSTDTGVEHV

SEQ ID NO: 7413 - protein, 10 aa, Severe acute respiratory syndrome-related coronavirus
  REGION 1..10: note = Table A: HLA-B*44:05M HLA-B*18:01H HLA-B*35:01H HLA-C*08:03H HLA-B*38:01H HLA-B*38:02H HLA-B*39:01H
  source 1..10: note = Severe acute respiratory syndrome coronavirus 2
TDTGVEHVTF

SEQ ID NO: 7414 - protein, 10 aa, Severe acute respiratory syndrome-related coronavirus
  REGION 1..10: note = Table A: HLA-A*02:11H HLA-A*02:05H HLA-A*02:06H HLA-A*02:08H HLA-A*02:02H
  source 1..10: note = Severe acute respiratory syndrome coronavirus 2
KIVDEPEEHV

SEQ ID NO: 7415 - protein, 10 aa, Severe acute respiratory syndrome-related coronavirus
  REGION 1..10: note = Table A: HLA-B*38:02H HLA-B*39:01H
  source 1..10: note = Severe acute respiratory syndrome coronavirus 2
EHVQIHTIDG

SEQ ID NO: 7416 - protein, 10 aa, Severe acute respiratory syndrome-related coronavirus
  REGION 1..10: note = Table A: HLA-A*26:01H HLA-A*68:02H HLA-A*66:01H
  source 1..10: note = Severe acute respiratory syndrome coronavirus 2
HTIDGSSGVV

SEQ ID NO: 7417 - protein, 10 aa, Severe acute respiratory syndrome-related coronavirus
  REGION 1..10: note = Table A: HLA-A*68:02H
  source 1..10: note = Severe acute respiratory syndrome coronavirus 2
DGSSGVVNPV

SEQ ID NO: 7418 - protein, 10 aa, Severe acute respiratory syndrome-related coronavirus
  REGION 1..10: note = Table A: HLA-C*15:05H HLA-C*08:03H
  source 1..10: note = Severe acute respiratory syndrome coronavirus 2
GSSGVVNPVM

SEQ ID NO: 7419 - protein, 10 aa, Severe acute respiratory syndrome-related coronavirus
  REGION 1..10: note = Table A: HLA-A*30:02H
  source 1..10: note = Severe acute respiratory syndrome coronavirus 2
VVNPVMEPIY

SEQ ID NO: 7420 - protein, 10 aa, Severe acute respiratory syndrome-related coronavirus
  REGION 1..10: note = Table A: HLA-A*68:02H HLA-B*35:03H HLA-C*15:05H
  source 1..10: note = Severe acute respiratory syndrome coronavirus 2
EPTTTTSVPL

SEQ ID NO: 7421 - protein, 11 aa, Severe acute respiratory syndrome-related coronavirus
  REGION 1..11: note = Table A: HLA-B*27:05H
  source 1..11: note = Severe acute respiratory syndrome coronavirus 2
MRIFTIGTVTL

SEQ ID NO: 7422 - protein, 11 aa, Severe acute respiratory syndrome-related coronavirus
  REGION 1..11: note = Table A: HLA-A*74:01M HLA-A*03:01M HLA-A*03:02M HLA-A*11:01H HLA-A*11:02M HLA-A*36:01H HLA-A*30:01H HLA-A*30:02H
  source 1..11: note = Severe acute respiratory syndrome coronavirus 2
RIFTIGTVTLK

SEQ ID NO: 7423 - protein, 11 aa, Severe acute respiratory syndrome-related coronavirus
  REGION 1..11: note = Table A: HLA-A*66:01H
  source 1..11: note = Severe acute respiratory syndrome coronavirus 2
FTIGTVTLKQG

SEQ ID NO: 7424 - protein, 11 aa, Severe acute respiratory syndrome-related coronavirus
  REGION 1..11: note = Table A: HLA-B*44:05M HLA-B*27:02H HLA-B*40:01H HLA-B*40:02H
  source 1..11: note = Severe acute respiratory syndrome coronavirus 2
GEIKDATPSDF

SEQ ID NO: 7425 - protein, 11 aa, Severe acute respiratory syndrome-related coronavirus
  REGION 1..11: note = Table A: HLA-A*68:02M
  source 1..11: note = Severe acute respiratory syndrome coronavirus 2
EIKDATPSDFV

SEQ ID NO: 7426 - protein, 11 aa, Severe acute respiratory syndrome-related coronavirus
  REGION 1..11: note = Table A: HLA-B*55:02H HLA-B*07:02H
  source 1..11: note = Severe acute respiratory syndrome coronavirus 2
TPSDFVRATAT

SEQ ID NO: 7427 - protein, 11 aa, Severe acute respiratory syndrome-related coronavirus
  REGION 1..11: note = Table A: HLA-B*53:01M
  source 1..11: note = Severe acute respiratory syndrome coronavirus 2
IPIQASLPFGW

SEQ ID NO: 7428 - protein, 11 aa, Severe acute respiratory syndrome-related coronavirus
  REGION 1..11: note = Table A: HLA-A*02:11H HLA-A*68:02H HLA-A*02:04H HLA-A*02:07H
  source 1..11: note = Severe acute respiratory syndrome coronavirus 2
SLPFGWLIVGV

SEQ ID NO: 7429 - protein, 11 aa, Severe acute respiratory syndrome-related coronavirus
  REGION 1..11: note = Table A: HLA-B*55:02H HLA-B*54:01H
  source 1..11: note = Severe acute respiratory syndrome coronavirus 2
LPFGWLIVGVA

SEQ ID NO: 7430 - protein, 11 aa, Severe acute respiratory syndrome-related coronavirus
  REGION 1..11: note = Table A: HLA-A*03:02H
  source 1..11: note = Severe acute respiratory syndrome coronavirus 2
ALLAVFQSASK

SEQ ID NO: 7431 - protein, 11 aa, Severe acute respiratory syndrome-related coronavirus
  REGION 1..11: note = Table A: HLA-C*14:02M HLA-C*14:03M HLA-A*24:02M HLA-A*24:07H HLA-A*23:01M
  source 1..11: note = Severe acute respiratory syndrome coronavirus 2
VFQSASKIITL

SEQ ID NO: 7432 - protein, 11 aa, Severe acute respiratory syndrome-related coronavirus
  REGION 1..11: note = Table A: HLA-A*74:01H
  source 1..11: note = Severe acute respiratory syndrome coronavirus 2
KIITLKKRWQL

SEQ ID NO: 7433 - protein, 11 aa, Severe acute respiratory syndrome-related coronavirus
  REGION 1..11: note = Table A: HLA-A*02:02H
  source 1..11: note = Severe acute respiratory syndrome coronavirus 2
LLFVTVYSHLL

SEQ ID NO: 7434 - protein, 11 aa, Severe acute respiratory syndrome-related coronavirus
  REGION 1..11: note = Table A: HLA-B*56:01H HLA-B*55:02M HLA-B*55:01H HLA-A*02:05H HLA-A*02:08H HLA-B*54:01H
  source 1..11: note = Severe acute respiratory syndrome coronavirus 2
TVYSHLLLVAA

SEQ ID NO: 7435 - protein, 11 aa, Severe acute respiratory syndrome-related coronavirus
  REGION 1..11: note = Table A: HLA-A*29:02H
  source 1..11: note = Severe acute respiratory syndrome coronavirus 2
VAAGLEAPFLY

SEQ ID NO: 7436 - protein, 11 aa, Severe acute respiratory syndrome-related coronavirus
  REGION 1..11: note = Table A: HLA-A*24:07H
  source 1..11: note = Severe acute respiratory syndrome coronavirus 2
YFLQSINFVRI

SEQ ID NO: 7437 - protein, 11 aa, Severe acute respiratory syndrome-related coronavirus
  REGION 1..11: note = Table A: HLA-A*74:01H
  source 1..11: note = Severe acute respiratory syndrome coronavirus 2
QSINFVRIIMR

SEQ ID NO: 7438 - protein, 11 aa, Severe acute respiratory syndrome-related coronavirus
  REGION 1..11: note = Table A: HLA-B*55:02H HLA-C*15:05H HLA-B*51:01H
  source 1..11: note = Severe acute respiratory syndrome coronavirus 2
IPYNSVTSSIV

SEQ ID NO: 7439 - protein, 11 aa, Severe acute respiratory syndrome-related coronavirus
  REGION 1..11: note = Table A: HLA-A*24:07H
  source 1..11: note = Severe acute respiratory syndrome coronavirus 2
PYNSVTSSIVI

SEQ ID NO: 7440 - protein, 11 aa, Severe acute respiratory syndrome-related coronavirus
  REGION 1..11: note = Table A: HLA-A*02:08H
  source 1..11: note = Severe acute respiratory syndrome coronavirus 2
IVITSGDGTTS

SEQ ID NO: 7441 - protein, 11 aa, Severe acute respiratory syndrome-related coronavirus
  REGION 1..11: note = Table A: HLA-A*36:01H HLA-A*30:02H
  source 1..11: note = Severe acute respiratory syndrome coronavirus 2
GTTSPISEHDY

SEQ ID NO: 7442 - protein, 11 aa, Severe acute respiratory syndrome-related coronavirus
  REGION 1..11: note = Table A: HLA-A*68:02H
  source 1..11: note = Severe acute respiratory syndrome coronavirus 2
TTSPISEHDYQ

SEQ ID NO: 7443 - protein, 11 aa, Severe acute respiratory syndrome-related coronavirus
  REGION 1..11: note = Table A: HLA-A*36:01H HLA-A*01:01H
  source 1..11: note = Severe acute respiratory syndrome coronavirus 2
ISEHDYQIGGY

SEQ ID NO: 7444 - protein, 11 aa, Severe acute respiratory syndrome-related coronavirus
  REGION 1..11: note = Table A: HLA-B*27:02H HLA-A*34:02H
  source 1..11: note = Severe acute respiratory syndrome coronavirus 2
HDYQIGGYTEK

SEQ ID NO: 7445 - protein, 11 aa, Severe acute respiratory syndrome-related coronavirus
  REGION 1..11: note = Table A: HLA-B*40:01H
  source 1..11: note = Severe acute respiratory syndrome coronavirus 2
WESGVKDCVVL

SEQ ID NO: 7446 - protein, 11 aa, Severe acute respiratory syndrome-related coronavirus
  REGION 1..11: note = Table A: HLA-A*30:02M
  source 1..11: note = Severe acute respiratory syndrome coronavirus 2
GVKDCVVLHSY

SEQ ID NO: 7447 - protein, 11 aa, Severe acute respiratory syndrome-related coronavirus
  REGION 1..11: note = Table A: HLA-A*30:02H
  source 1..11: note = Severe acute respiratory syndrome coronavirus 2
VLHSYFTSDYY

SEQ ID NO: 7448 - protein, 11 aa, Severe acute respiratory syndrome-related coronavirus
  REGION 1..11: note = Table A: HLA-A*29:02M
  source 1..11: note = Severe acute respiratory syndrome coronavirus 2
SYFTSDYYQLY

SEQ ID NO: 7449 - protein, 11 aa, Severe acute respiratory syndrome-related coronavirus
  REGION 1..11: note = Table A: HLA-A*02:11H HLA-A*02:02M
  source 1..11: note = Severe acute respiratory syndrome coronavirus 2
QLSTDTGVEHV

SEQ ID NO: 7450 - protein, 11 aa, Severe acute respiratory syndrome-related coronavirus
  REGION 1..11: note = Table A: HLA-B*58:01H HLA-B*44:05H HLA-B*57:01H HLA-C*04:03M HLA-C*15:05H HLA-B*35:08H HLA-C*08:01H HLA-C*08:02H HLA-B*38:01H HLA-B*38:02H HLA-B*57:03M HLA-C*05:01H
  source 1..11: note = Severe acute respiratory syndrome coronavirus 2
STDTGVEHVTF

SEQ ID NO: 7451 - protein, 11 aa, Severe acute respiratory syndrome-related coronavirus
  REGION 1..11: note = Table A: HLA-B*38:02H
  source 1..11: note = Severe acute respiratory syndrome coronavirus 2
EHVTFFIYNKI

SEQ ID NO: 7452 - protein, 11 aa, Severe acute respiratory syndrome-related coronavirus
  REGION 1..11: note = Table A: HLA-C*04:03M HLA-A*02:11M HLA-A*02:06H HLA-A*02:07H HLA-C*08:01H HLA-C*08:02M HLA-B*38:02H HLA-C*05:01M
  source 1..11: note = Severe acute respiratory syndrome coronavirus 2
IVDEPEEHVQI

SEQ ID NO: 7453 - protein, 11 aa, Severe acute respiratory syndrome-related coronavirus
  REGION 1..11: note = Table A: HLA-C*04:01H HLA-C*04:03H
  source 1..11: note = Severe acute respiratory syndrome coronavirus 2
IYDEPTTTTSV

SEQ ID NO: 7454 - protein, 11 aa, Severe acute respiratory syndrome-related coronavirus
  REGION 1..11: note = Table A: HLA-B*44:05H HLA-C*07:01H HLA-A*68:02H HLA-C*08:03H HLA-B*07:05H
  source 1..11: note = Severe acute respiratory syndrome coronavirus 2
DEPTTTTSVPL

SEQ ID NO: 7455 - protein, 8 aa, Severe acute respiratory syndrome-related coronavirus
  REGION 1..8: note = Table A: HLA-C*08:01H
  source 1..8: note = Severe acute respiratory syndrome coronavirus 2
YSFVSEET

SEQ ID NO: 7456 - protein, 8 aa, Severe acute respiratory syndrome-related coronavirus
  REGION 1..8: note = Table A: HLA-C*08:02H
  source 1..8: note = Severe acute respiratory syndrome coronavirus 2
VSEETGTL

SEQ ID NO: 7457 - protein, 8 aa, Severe acute respiratory syndrome-related coronavirus
  REGION 1..8: note = Table A: HLA-B*49:01H
  source 1..8: note = Severe acute respiratory syndrome coronavirus 2
SEETGTLI

SEQ ID NO: 7458 - protein, 8 aa, Severe acute respiratory syndrome-related coronavirus
  REGION 1..8: note = Table A: HLA-B*14:01H
  source 1..8: note = Severe acute respiratory syndrome coronavirus 2
TLIVNSVL

SEQ ID NO: 7459 - protein, 8 aa, Severe acute respiratory syndrome-related coronavirus
  REGION 1..8: note = Table A: HLA-A*02:04H
  source 1..8: note = Severe acute respiratory syndrome coronavirus 2
FLAFVVFL

SEQ ID NO: 7460 - protein, 8 aa, Severe acute respiratory syndrome-related coronavirus
  REGION 1..8: note = Table A: HLA-C*15:05H HLA-C*08:01H
  source 1..8: note = Severe acute respiratory syndrome coronavirus 2
VVFLLVTL

SEQ ID NO: 7461 - protein, 8 aa, Severe acute respiratory syndrome-related coronavirus
  REGION 1..8: note = Table A: HLA-C*15:05H HLA-A*02:04H HLA-B*14:01H HLA-B*38:02H
  source 1..8: note = Severe acute respiratory syndrome coronavirus 2
TLAILTAL

SEQ ID NO: 7462 - protein, 8 aa, Severe acute respiratory syndrome-related coronavirus
  REGION 1..8: note = Table A: HLA-A*34:01H HLA-A*66:01H
  source 1..8: note = Severe acute respiratory syndrome coronavirus 2
LAILTALR

SEQ ID NO: 7463 - protein, 8 aa, Severe acute respiratory syndrome-related coronavirus
  REGION 1..8: note = Table A: HLA-C*15:05H
  source 1..8: note = Severe acute respiratory syndrome coronavirus 2
AILTALRL

SEQ ID NO: 7464 - protein, 8 aa, Severe acute respiratory syndrome-related coronavirus
  REGION 1..8: note = Table A: HLA-B*38:02H HLA-B*15:02H
  source 1..8: note = Severe acute respiratory syndrome coronavirus 2
TALRLCAY

SEQ ID NO: 7465 - protein, 8 aa, Severe acute respiratory syndrome-related coronavirus
  REGION 1..8: note = Table A: HLA-A*03:01H HLA-A*36:01H
  source 1..8: note = Severe acute respiratory syndrome coronavirus 2
IVNVSLVK

SEQ ID NO: 7466 - protein, 8 aa, Severe acute respiratory syndrome-related coronavirus
  REGION 1..8: note = Table A: HLA-B*58:02H HLA-C*16:01M HLA-B*57:03H
  source 1..8: note = Severe acute respiratory syndrome coronavirus 2
VSLVKPSF

SEQ ID NO: 7467 - protein, 8 aa, Severe acute respiratory syndrome-related coronavirus
  REGION 1..8: note = Table A: HLA-A*02:11H
  source 1..8: note = Severe acute respiratory syndrome coronavirus 2
LVKPSFYV

SEQ ID NO: 7468 - protein, 8 aa, Severe acute respiratory syndrome-related coronavirus
  REGION 1..8: note = Table A: HLA-B*15:03H
  source 1..8: note = Severe acute respiratory syndrome coronavirus 2
VKPSFYVY

SEQ ID NO: 7469 - protein, 8 aa, Severe acute respiratory syndrome-related coronavirus
  REGION 1..8: note = Table A: HLA-B*58:02H
  source 1..8: note = Severe acute respiratory syndrome coronavirus 2
SSRVPDLL

SEQ ID NO: 7470 - protein, 8 aa, Severe acute respiratory syndrome-related coronavirus
  REGION 1..8: note = Table A: HLA-C*06:02H
  source 1..8: note = Severe acute respiratory syndrome coronavirus 2
SRVPDLLV

SEQ ID NO: 7471 - protein, 9 aa, Severe acute respiratory syndrome-related coronavirus
  REGION 1..9: note = Table A: HLA-A*11:303H HLA-A*26:03H HLA-C*03:04H HLA-B*35:03H HLA-A*02:05H HLA-A*02:02H HLA-A*02:03H HLA-A*34:01H HLA-B*35:02M HLA-C*08:01H HLA-C*08:02H HLA-B*35:12M HLA-B*38:02H HLA-B*15:02H HLA-B*39:01H
  REGION 1..9: note = CONT. FROM ABOVE: HLA-A*66:01H
  source 1..9: note = Severe acute respiratory syndrome coronavirus 2
FVSEETGTL

SEQ ID NO: 7472 - protein, 9 aa, Severe acute respiratory syndrome-related coronavirus
  REGION 1..9: note = Table A: HLA-B*58:01H HLA-C*04:03H HLA-C*08:02H HLA-C*05:01H HLA-B*49:01H
  source 1..9: note = Severe acute respiratory syndrome coronavirus 2
VSEETGTLI

SEQ ID NO: 7473 - protein, 9 aa, Severe acute respiratory syndrome-related coronavirus
  REGION 1..9: note = Table A: HLA-B*45:01M HLA-B*40:01H HLA-B*40:02H HLA-B*41:02H HLA-B*49:01H
  source 1..9: note = Severe acute respiratory syndrome coronavirus 2
SEETGTLIV

SEQ ID NO: 7474 - protein, 9 aa, Severe acute respiratory syndrome-related coronavirus
  REGION 1..9: note = Table A: HLA-C*12:05H HLA-A*68:02H HLA-C*15:05H HLA-B*51:01H HLA-B*38:02H HLA-B*39:06H HLA-B*13:02H
  source 1..9: note = Severe acute respiratory syndrome coronavirus 2
TGTLIVNSV

SEQ ID NO: 7475 - protein, 9 aa, Severe acute respiratory syndrome-related coronavirus
  REGION 1..9: note = Table A: HLA-A*02:01H HLA-A*02:02H HLA-B*38:02H
  source 1..9: note = Severe acute respiratory syndrome coronavirus 2
TLIVNSVLL

SEQ ID NO: 7476 - protein, 9 aa, Severe acute respiratory syndrome-related coronavirus
  REGION 1..9: note = Table A: HLA-B*58:01H HLA-A*02:11H HLA-A*68:02H HLA-C*15:05H HLA-C*15:02H HLA-A*02:04M HLA-A*02:07H HLA-C*08:01H HLA-B*38:02H HLA-B*13:02H HLA-C*07:04H
  source 1..9: note = Severe acute respiratory syndrome coronavirus 2
IVNSVLLFL

SEQ ID NO: 7477 - protein, 9 aa, Severe acute respiratory syndrome-related coronavirus
  REGION 1..9: note = Table A: HLA-A*68:02H HLA-A*02:04H
  source 1..9: note = Severe acute respiratory syndrome coronavirus 2
SVLLFLAFV

SEQ ID NO: 7478 - protein, 9 aa, Severe acute respiratory syndrome-related coronavirus
  REGION 1..9: note = Table A: HLA-A*02:04M HLA-A*02:02M
  source 1..9: note = Severe acute respiratory syndrome coronavirus 2
FLAFVVFLL

SEQ ID NO: 7479 - protein, 9 aa, Severe acute respiratory syndrome-related coronavirus
  REGION 1..9: note = Table A: HLA-A*68:02H HLA-C*15:02H
  source 1..9: note = Severe acute respiratory syndrome coronavirus 2
LAFVVFLLV

SEQ ID NO: 7480 - protein, 9 aa, Severe acute respiratory syndrome-related coronavirus
  REGION 1..9: note = Table A: HLA-A*02:11H HLA-A*68:02M HLA-A*02:04M HLA-A*02:05H HLA-A*02:06H HLA-C*17:01H HLA-C*08:01M HLA-B*38:02H HLA-B*40:06H
  source 1..9: note = Severe acute respiratory syndrome coronavirus 2
FVVFLLVTL

SEQ ID NO: 7481 - protein, 9 aa, Severe acute respiratory syndrome-related coronavirus
  REGION 1..9: note = Table A: HLA-C*14:03H HLA-A*24:07H
  source 1..9: note = Severe acute respiratory syndrome coronavirus 2
VFLLVTLAI

SEQ ID NO: 7482 - protein, 9 aa, Severe acute respiratory syndrome-related coronavirus
  REGION 1..9: note = Table A: HLA-A*02:04H
  source 1..9: note = Severe acute respiratory syndrome coronavirus 2
FLLVTLAIL

SEQ ID NO: 7483 - protein, 9 aa, Severe acute respiratory syndrome-related coronavirus
  REGION 1..9: note = Table A: HLA-B*54:01H
  source 1..9: note = Severe acute respiratory syndrome coronavirus 2
LVTLAILTA

SEQ ID NO: 7484 - protein, 9 aa, Severe acute respiratory syndrome-related coronavirus
  REGION 1..9: note = Table A: HLA-A*11:303H HLA-B*46:01H HLA-C*03:03H HLA-A*02:11M HLA-C*03:04H HLA-A*68:02H HLA-C*15:05M HLA-C*15:02H HLA-A*02:04M HLA-A*02:06H HLA-B*14:01H HLA-A*02:01H HLA-A*34:02H HLA-C*08:01H HLA-B*38:02H
  REGION 1..9: note = CONT. FROM ABOVE: HLA-B*07:05H HLA-B*57:03M
  source 1..9: note = Severe acute respiratory syndrome coronavirus 2
VTLAILTAL

SEQ ID NO: 7485 - protein, 9 aa, Severe acute respiratory syndrome-related coronavirus
  REGION 1..9: note = Table A: HLA-A*74:01M HLA-A*34:01H
  source 1..9: note = Severe acute respiratory syndrome coronavirus 2
TLAILTALR

SEQ ID NO: 7486 - protein, 9 aa, Severe acute respiratory syndrome-related coronavirus
  REGION 1..9: note = Table A: HLA-C*03:03H HLA-C*03:04H HLA-C*17:01H
  source 1..9: note = Severe acute respiratory syndrome coronavirus 2
LAILTALRL

SEQ ID NO: 7487 - protein, 9 aa, Severe acute respiratory syndrome-related coronavirus
  REGION 1..9: note = Table A: HLA-C*16:01M HLA-B*46:01H HLA-C*03:02H
  source 1..9: note = Severe acute respiratory syndrome coronavirus 2
LTALRLCAY

SEQ ID NO: 7488 - protein, 9 aa, Severe acute respiratory syndrome-related coronavirus
  REGION 1..9: note = Table A: HLA-A*11:303H
  source 1..9: note = Severe acute respiratory syndrome coronavirus 2
CCNIVNVSL

SEQ ID NO: 7489 - protein, 9 aa, Severe acute respiratory syndrome-related coronavirus
  REGION 1..9: note = Table A: HLA-A*34:02M HLA-A*66:01H
  source 1..9: note = Severe acute respiratory syndrome coronavirus 2
NIVNVSLVK

SEQ ID NO: 7490 - protein, 9 aa, Severe acute respiratory syndrome-related coronavirus
  REGION 1..9: note = Table A: HLA-B*35:01H HLA-B*15:02H HLA-B*07:05H
  source 1..9: note = Severe acute respiratory syndrome coronavirus 2
NVSLVKPSF

SEQ ID NO: 7491 - protein, 9 aa, Severe acute respiratory syndrome-related coronavirus
  REGION 1..9: note = Table A: HLA-B*58:01H HLA-B*58:02H HLA-C*16:01H HLA-A*36:01H HLA-A*30:02H HLA-B*57:03H
  source 1..9: note = Severe acute respiratory syndrome coronavirus 2
VSLVKPSFY

SEQ ID NO: 7492 - protein, 9 aa, Severe acute respiratory syndrome-related coronavirus
  REGION 1..9: note = Table A: HLA-A*02:11M HLA-A*68:02H HLA-A*02:04M HLA-A*02:06H HLA-A*02:01H HLA-A*02:02H HLA-B*38:02H HLA-B*13:02H
  source 1..9: note = Severe acute respiratory syndrome coronavirus 2
SLVKPSFYV

SEQ ID NO: 7493 - protein, 9 aa, Severe acute respiratory syndrome-related coronavirus
  REGION 1..9: note = Table A: HLA-B*58:02H HLA-C*16:01H HLA-B*57:01H HLA-B*46:01M HLA-A*29:01H HLA-A*29:02M HLA-C*03:02M HLA-A*30:01H HLA-A*30:02M HLA-C*12:02H HLA-B*35:07H HLA-B*38:02M HLA-B*07:04H HLA-B*15:01M HLA-B*15:02M HLA-C*02:02H
  REGION 1..9: note = CONT. FROM ABOVE: HLA-B*15:11H
  source 1..9: note = Severe acute respiratory syndrome coronavirus 2
LVKPSFYVY

SEQ ID NO: 7494 - protein, 9 aa, Severe acute respiratory syndrome-related coronavirus
  REGION 1..9: note = Table A: HLA-A*68:02H
  source 1..9: note = Severe acute respiratory syndrome coronavirus 2
PSFYVYSRV

SEQ ID NO: 7495 - protein, 9 aa, Severe acute respiratory syndrome-related coronavirus
  REGION 1..9: note = Table A: HLA-A*30:01H
  source 1..9: note = Severe acute respiratory syndrome coronavirus 2
SFYVYSRVK

SEQ ID NO: 7496 - protein, 9 aa, Severe acute respiratory syndrome-related coronavirus
  REGION 1..9: note = Table A: HLA-B*08:01M HLA-C*03:03H HLA-A*02:11M HLA-C*03:04H HLA-A*68:02H HLA-B*14:02H HLA-C*12:03H HLA-C*15:02H HLA-A*02:04H HLA-A*02:05H HLA-A*02:02M HLA-A*02:03M HLA-A*34:01H HLA-A*34:02H HLA-C*17:01M HLA-B*38:02H
  REGION 1..9: note = CONT. FROM ABOVE: HLA-B*07:04M HLA-A*66:01H
  source 1..9: note = Severe acute respiratory syndrome coronavirus 2
YVYSRVKNL

SEQ ID NO: 7497 - protein, 9 aa, Severe acute respiratory syndrome-related coronavirus
  REGION 1..9: note = Table A: HLA-A*74:01H HLA-A*33:03H HLA-A*30:02H HLA-A*31:01M
  source 1..9: note = Severe acute respiratory syndrome coronavirus 2
RVKNLNSSR

SEQ ID NO: 7498 - protein, 9 aa, Severe acute respiratory syndrome-related coronavirus
  REGION 1..9: note = Table A: HLA-A*68:02H
  source 1..9: note = Severe acute respiratory syndrome coronavirus 2
NSSRVPDLL

SEQ ID NO: 7499 - protein, 9 aa, Severe acute respiratory syndrome-related coronavirus
  REGION 1..9: note = Table A: HLA-B*58:02H HLA-A*30:01H HLA-A*68:02H HLA-C*15:05M HLA-C*15:02M HLA-B*52:01H HLA-C*08:01H HLA-B*38:02H HLA-B*07:04H HLA-B*57:03H HLA-B*13:02M HLA-B*49:01H
  source 1..9: note = Severe acute respiratory syndrome coronavirus 2
SSRVPDLLV

SEQ ID NO: 7500 - protein, 10 aa, Severe acute respiratory syndrome-related coronavirus
  REGION 1..10: note = Table A: HLA-A*68:02H HLA-A*02:05M HLA-A*02:06H HLA-A*02:02H HLA-B*38:02H
  source 1..10: note = Severe acute respiratory syndrome coronavirus 2
FVSEETGTLI

SEQ ID NO: 7501 - protein, 10 aa, Severe acute respiratory syndrome-related coronavirus
  REGION 1..10: note = Table A: HLA-A*68:02H
  source 1..10: note = Severe acute respiratory syndrome coronavirus 2
ETGTLIVNSV

SEQ ID NO: 7502 - protein, 10 aa, Severe acute respiratory syndrome-related coronavirus
  REGION 1..10: note = Table A: HLA-A*74:01H
  source 1..10: note = Severe acute respiratory syndrome coronavirus 2
VTLAILTALR

SEQ ID NO: 7503 - protein, 10 aa, Severe acute respiratory syndrome-related coronavirus
  REGION 1..10: note = Table A: HLA-A*02:02H
  source 1..10: note = Severe acute respiratory syndrome coronavirus 2
TLAILTALRL

SEQ ID NO: 7504 - protein, 10 aa, Severe acute respiratory syndrome-related coronavirus
  REGION 1..10: note = Table A: HLA-A*29:02H HLA-A*30:02H HLA-B*38:02H HLA-B*15:02H
  source 1..10: note = Severe acute respiratory syndrome coronavirus 2
SLVKPSFYVY

SEQ ID NO: 7505 - protein, 10 aa, Severe acute respiratory syndrome-related coronavirus
  REGION 1..10: note = Table A: HLA-B*27:05H
  source 1..10: note = Severe acute respiratory syndrome coronavirus 2
SRVKNLNSSR

SEQ ID NO: 7506 - protein, 10 aa, Severe acute respiratory syndrome-related coronavirus
  REGION 1..10: note = Table A: HLA-B*07:04H
  source 1..10: note = Severe acute respiratory syndrome coronavirus 2
RVKNLNSSRV

SEQ ID NO: 7507 - protein, 10 aa, Severe acute respiratory syndrome-related coronavirus
  REGION 1..10: note = Table A: HLA-A*68:02M HLA-C*15:05H HLA-C*15:02M HLA-B*13:02H
  source 1..10: note = Severe acute respiratory syndrome coronavirus 2
NSSRVPDLLV

SEQ ID NO: 7508 - protein, 11 aa, Severe acute respiratory syndrome-related coronavirus
  REGION 1..11: note = Table A: HLA-B*57:03H
  source 1..11: note = Severe acute respiratory syndrome coronavirus 2
GTLIVNSVLLF

SEQ ID NO: 7509 - protein, 11 aa, Severe acute respiratory syndrome-related coronavirus
  REGION 1..11: note = Table A: HLA-A*02:04H
  source 1..11: note = Severe acute respiratory syndrome coronavirus 2
TLIVNSVLLFL

SEQ ID NO: 7510 - protein, 11 aa, Severe acute respiratory syndrome-related coronavirus
  REGION 1..11: note = Table A: HLA-A*02:04H
  source 1..11: note = Severe acute respiratory syndrome coronavirus 2
LLVTLAILTAL

SEQ ID NO: 7511 - protein, 11 aa, Severe acute respiratory syndrome-related coronavirus
  REGION 1..11: note = Table A: HLA-B*57:03H
  source 1..11: note = Severe acute respiratory syndrome coronavirus 2
VTLAILTALRL

SEQ ID NO: 7512 - protein, 11 aa, Severe acute respiratory syndrome-related coronavirus
  REGION 1..11: note = Table A: HLA-B*57:03H
  source 1..11: note = Severe acute respiratory syndrome coronavirus 2
IVNVSLVKPSF

SEQ ID NO: 7513 - protein, 11 aa, Severe acute respiratory syndrome-related coronavirus
  REGION 1..11: note = Table A: HLA-A*74:01H
  source 1..11: note = Severe acute respiratory syndrome coronavirus 2
LVKPSFYVYSR

SEQ ID NO: 7514 - protein, 8 aa, Severe acute respiratory syndrome-related coronavirus
  REGION 1..8: note = Table A: HLA-B*51:01H
  source 1..8: note = Severe acute respiratory syndrome coronavirus 2
DSNGTITV

SEQ ID NO: 7515 - protein, 8 aa, Severe acute respiratory syndrome-related coronavirus
  REGION 1..8: note = Table A: HLA-A*11:303H HLA-C*15:05H HLA-A*02:05H HLA-C*08:03H HLA-B*40:02H HLA-B*39:01H
  source 1..8: note = Severe acute respiratory syndrome coronavirus 2
GTITVEEL

SEQ ID NO: 7516 - protein, 8 aa, Severe acute respiratory syndrome-related coronavirus
  REGION 1..8: note = Table A: HLA-A*02:11M HLA-A*02:04M HLA-A*02:02H
  source 1..8: note = Severe acute respiratory syndrome coronavirus 2
KLLEQWNL

SEQ ID NO: 7517 - protein, 8 aa, Severe acute respiratory syndrome-related coronavirus
  REGION 1..8: note = Table A: HLA-A*33:03H HLA-A*34:01H HLA-A*66:01H
  source 1..8: note = Severe acute respiratory syndrome coronavirus 2
FAYANRNR

SEQ ID NO: 7518 - protein, 8 aa, Severe acute respiratory syndrome-related coronavirus
  REGION 1..8: note = Table A: HLA-B*58:02M HLA-C*16:01H HLA-C*03:04H HLA-C*12:03H
  source 1..8: note = Severe acute respiratory syndrome coronavirus 2
YANRNRFL

SEQ ID NO: 7519 - protein, 8 aa, Severe acute respiratory syndrome-related coronavirus
  REGION 1..8: note = Table A: HLA-B*52:01H
  source 1..8: note = Severe acute respiratory syndrome coronavirus 2
FLYIIKLI

SEQ ID NO: 7520 - protein, 8 aa, Severe acute respiratory syndrome-related coronavirus
  REGION 1..8: note = Table A: HLA-C*17:01H
  source 1..8: note = Severe acute respiratory syndrome coronavirus 2
YIIKLIFL

SEQ ID NO: 7521 - protein, 8 aa, Severe acute respiratory syndrome-related coronavirus
  REGION 1..8: note = Table A: HLA-A*02:04H
  source 1..8: note = Severe acute respiratory syndrome coronavirus 2
WLLWPVTL

SEQ ID NO: 7522 - protein, 8 aa, Severe acute respiratory syndrome-related coronavirus
  REGION 1..8: note = Table A: HLA-A*02:11H HLA-A*02:01H
  source 1..8: note = Severe acute respiratory syndrome coronavirus 2
LLWPVTLA

SEQ ID NO: 7523 - protein, 8 aa, Severe acute respiratory syndrome-related coronavirus
  REGION 1..8: note = Table A: HLA-C*15:05H
  source 1..8: note = Severe acute respiratory syndrome coronavirus 2
WPVTLACF

SEQ ID NO: 7524 - protein, 8 aa, Severe acute respiratory syndrome-related coronavirus
  REGION 1..8: note = Table A: HLA-C*14:03H HLA-B*15:02H HLA-B*07:05H
  source 1..8: note = Severe acute respiratory syndrome coronavirus 2
CFVLAAVY

SEQ ID NO: 7525 - protein, 8 aa, Severe acute respiratory syndrome-related coronavirus
  REGION 1..8: note = Table A: HLA-A*66:01H
  source 1..8: note = Severe acute respiratory syndrome coronavirus 2
FVLAAVYR

SEQ ID NO: 7526 - protein, 8 aa, Severe acute respiratory syndrome-related coronavirus
  REGION 1..8: note = Table A: HLA-B*35:03H HLA-C*15:05H HLA-B*35:01H HLA-B*07:05H HLA-C*07:04H
  source 1..8: note = Severe acute respiratory syndrome coronavirus 2
TGGIAIAM

SEQ ID NO: 7527 - protein, 8 aa, Severe acute respiratory syndrome-related coronavirus
  REGION 1..8: note = Table A: HLA-B*39:06H
  source 1..8: note = Severe acute respiratory syndrome coronavirus 2
GGIAIAMA

SEQ ID NO: 7528 - protein, 8 aa, Severe acute respiratory syndrome-related coronavirus
  REGION 1..8: note = Table A: HLA-C*15:05H HLA-B*51:01H
  source 1..8: note = Severe acute respiratory syndrome coronavirus 2
IAIAMACL

SEQ ID NO: 7529 - protein, 8 aa, Severe acute respiratory syndrome-related coronavirus
  REGION 1..8: note = Table A: HLA-A*02:11H
  source 1..8: note = Severe acute respiratory syndrome coronavirus 2
LMWLSYFI

SEQ ID NO: 7530 - protein, 8 aa, Severe acute respiratory syndrome-related coronavirus
  REGION 1..8: note = Table A: HLA-A*33:03H
  source 1..8: note = Severe acute respiratory syndrome coronavirus 2
SYFIASFR

SEQ ID NO: 7531 - protein, 8 aa, Severe acute respiratory syndrome-related coronavirus
  REGION 1..8: note = Table A: HLA-A*24:07H
  source 1..8: note = Severe acute respiratory syndrome coronavirus 2
YFIASFRL

SEQ ID NO: 7532 - protein, 8 aa, Severe acute respiratory syndrome-related coronavirus
  REGION 1..8: note = Table A: HLA-C*03:02H
  source 1..8: note = Severe acute respiratory syndrome coronavirus 2
FIASFRLF

SEQ ID NO: 7533 - protein, 8 aa, Severe acute respiratory syndrome-related coronavirus
  REGION 1..8: note = Table A: HLA-A*74:01H HLA-A*11:02H HLA-A*31:01H
  source 1..8: note = Severe acute respiratory syndrome coronavirus 2
ASFRLFAR

SEQ ID NO: 7534 - protein, 8 aa, Severe acute respiratory syndrome-related coronavirus
  REGION 1..8: note = Table A: HLA-B*58:02H HLA-B*57:03H
  source 1..8: note = Severe acute respiratory syndrome coronavirus 2
RTRSMWSF

SEQ ID NO: 7535 - protein, 8 aa, Severe acute respiratory syndrome-related coronavirus
  REGION 1..8: note = Table A: HLA-B*42:01H HLA-B*35:03H HLA-C*15:05M HLA-B*07:02H HLA-B*07:04H HLA-B*07:05H
  source 1..8: note = Severe acute respiratory syndrome coronavirus 2
VPLHGTIL

SEQ ID NO: 7536 - protein, 8 aa, Severe acute respiratory syndrome-related coronavirus
  REGION 1..8: note = Table A: HLA-B*08:01H
  source 1..8: note = Severe acute respiratory syndrome coronavirus 2
TILTRPLL

SEQ ID NO: 7537 - protein, 8 aa, Severe acute respiratory syndrome-related coronavirus
  REGION 1..8: note = Table A: HLA-C*15:05M HLA-B*07:05H
  source 1..8: note = Severe acute respiratory syndrome coronavirus 2
RPLLESEL

SEQ ID NO: 7538 - protein, 8 aa, Severe acute respiratory syndrome-related coronavirus
  REGION 1..8: note = Table A: HLA-B*40:02H HLA-B*07:05H HLA-B*41:02H HLA-B*49:01M
  source 1..8: note = Severe acute respiratory syndrome coronavirus 2
SELVIGAV

SEQ ID NO: 7539 - protein, 8 aa, Severe acute respiratory syndrome-related coronavirus
  REGION 1..8: note = Table A: HLA-A*74:01H
  source 1..8: note = Severe acute respiratory syndrome coronavirus 2
VIGAVILR

SEQ ID NO: 7540 - protein, 8 aa, Severe acute respiratory syndrome-related coronavirus
  REGION 1..8: note = Table A: HLA-A*74:01H
  source 1..8: note = Severe acute respiratory syndrome coronavirus 2
VILRGHLR

SEQ ID NO: 7541 - protein, 8 aa, Severe acute respiratory syndrome-related coronavirus
  REGION 1..8: note = Table A: HLA-A*36:01H
  source 1..8: note = Severe acute respiratory syndrome coronavirus 2
IAGHHLGR

SEQ ID NO: 7542 - protein, 8 aa, Severe acute respiratory syndrome-related coronavirus
  REGION 1..8: note = Table A: HLA-B*51:01H
  source 1..8: note = Severe acute respiratory syndrome coronavirus 2
DLPKEITV

SEQ ID NO: 7543 - protein, 8 aa, Severe acute respiratory syndrome-related coronavirus
  REGION 1..8: note = Table A: HLA-B*56:01H HLA-B*55:02H HLA-B*55:01M HLA-B*39:06H HLA-B*54:01M
  source 1..8: note = Severe acute respiratory syndrome coronavirus 2
LPKEITVA

SEQ ID NO: 7544 - protein, 8 aa, Severe acute respiratory syndrome-related coronavirus
  REGION 1..8: note = Table A: HLA-A*33:03H HLA-A*26:03H HLA-A*68:01H HLA-A*34:01H HLA-A*66:01H
  source 1..8: note = Severe acute respiratory syndrome coronavirus 2
EITVATSR

SEQ ID NO: 7545 - protein, 8 aa, Severe acute respiratory syndrome-related coronavirus
  REGION 1..8: note = Table A: HLA-B*58:02H HLA-C*03:04H HLA-C*15:05H HLA-B*14:01H HLA-B*38:02H HLA-B*15:02H
  source 1..8: note = Severe acute respiratory syndrome coronavirus 2
TVATSRTL

SEQ ID NO: 7546 - protein, 8 aa, Severe acute respiratory syndrome-related coronavirus
  REGION 1..8: note = Table A: HLA-B*58:01H HLA-A*36:01M HLA-A*30:02H
  source 1..8: note = Severe acute respiratory syndrome coronavirus 2
ATSRTLSY

SEQ ID NO: 7547 - protein, 8 aa, Severe acute respiratory syndrome-related coronavirus
  REGION 1..8: note = Table A: HLA-B*46:01H
  source 1..8: note = Severe acute respiratory syndrome coronavirus 2
TSRTLSYY

SEQ ID NO: 7548 - protein, 8 aa, Severe acute respiratory syndrome-related coronavirus
  REGION 1..8: note = Table A: HLA-B*58:02H HLA-B*57:03H
  source 1..8: note = Severe acute respiratory syndrome coronavirus 2
RTLSYYKL

SEQ ID NO: 7549 - protein, 8 aa, Severe acute respiratory syndrome-related coronavirus
  REGION 1..8: note = Table A: HLA-A*02:02H
  source 1..8: note = Severe acute respiratory syndrome coronavirus 2
KLGASQRV

SEQ ID NO: 7550 - protein, 8 aa, Severe acute respiratory syndrome-related coronavirus
  REGION 1..8: note = Table A: HLA-B*07:05H
  source 1..8: note = Severe acute respiratory syndrome coronavirus 2
GDSGFAAY

SEQ ID NO: 7551 - protein, 8 aa, Severe acute respiratory syndrome-related coronavirus
  REGION 1..8: note = Table A: HLA-A*34:01H HLA-A*66:01H
  source 1..8: note = Severe acute respiratory syndrome coronavirus 2
FAAYSRYR

SEQ ID NO: 7552 - protein, 8 aa, Severe acute respiratory syndrome-related coronavirus
  REGION 1..8: note = Table A: HLA-C*07:02H HLA-B*38:02H
  source 1..8: note = Severe acute respiratory syndrome coronavirus 2
YRIGNYKL

SEQ ID NO: 7553 - protein, 8 aa, Severe acute respiratory syndrome-related coronavirus
  REGION 1..8: note = Table A: HLA-C*04:03M HLA-C*08:02H HLA-C*05:01H
  source 1..8: note = Severe acute respiratory syndrome coronavirus 2
SSDNIALL

SEQ ID NO: 7554 - protein, 9 aa, Severe acute respiratory syndrome-related coronavirus
  REGION 1..9: note = Table A: HLA-B*37:01H HLA-B*41:02H HLA-B*49:01H
  source 1..9: note = Severe acute respiratory syndrome coronavirus 2
ADSNGTITV

SEQ ID NO: 7555 - protein, 9 aa, Severe acute respiratory syndrome-related coronavirus
  REGION 1..9: note = Table A: HLA-B*35:03H HLA-B*39:01H
  source 1..9: note = Severe acute respiratory syndrome coronavirus 2
NGTITVEEL

SEQ ID NO: 7556 - protein, 9 aa, Severe acute respiratory syndrome-related coronavirus
  REGION 1..9: note = Table A: HLA-A*11:303H HLA-A*03:02H HLA-A*11:01M HLA-A*11:02M HLA-A*36:01H HLA-B*57:01H HLA-B*27:02H HLA-A*30:02H HLA-A*68:01H HLA-A*68:02H HLA-A*34:02H HLA-C*07:27M
  source 1..9: note = Severe acute respiratory syndrome coronavirus 2
GTITVEELK

SEQ ID NO: 7557 - protein, 9 aa, Severe acute respiratory syndrome-related coronavirus
  REGION 1..9: note = Table A: HLA-A*02:05H
  source 1..9: note = Severe acute respiratory syndrome coronavirus 2
ITVEELKKL

SEQ ID NO: 7558 - protein, 9 aa, Severe acute respiratory syndrome-related coronavirus
  REGION 1..9: note = Table A: HLA-A*25:01H HLA-B*38:02H HLA-B*57:03H
  source 1..9: note = Severe acute respiratory syndrome coronavirus 2
ELKKLLEQW

SEQ ID NO: 7559 - protein, 9 aa, Severe acute respiratory syndrome-related coronavirus
  REGION 1..9: note = Table A: HLA-B*48:01H
  source 1..9: note = Severe acute respiratory syndrome coronavirus 2
KKLLEQWNL

SEQ ID NO: 7560 - protein, 9 aa, Severe acute respiratory syndrome-related coronavirus
  REGION 1..9: note = Table A: HLA-A*02:11H HLA-A*02:04H HLA-A*02:07H HLA-A*02:01H HLA-A*02:02H HLA-B*13:02H
  source 1..9: note = Severe acute respiratory syndrome coronavirus 2
KLLEQWNLV

SEQ ID NO: 7561 - protein, 9 aa, Severe acute respiratory syndrome-related coronavirus
  REGION 1..9: note = Table A: HLA-A*74:01M
  source 1..9: note = Severe acute respiratory syndrome coronavirus 2
LLQFAYANR

SEQ ID NO: 7562 - protein, 9 aa, Severe acute respiratory syndrome-related coronavirus
  REGION 1..9: note = Table A: HLA-A*33:03H
  source 1..9: note = Severe acute respiratory syndrome coronavirus 2
QFAYANRNR

SEQ ID NO: 7563 - protein, 9 aa, Severe acute respiratory syndrome-related coronavirus
  REGION 1..9: note = Table A: HLA-C*03:02H HLA-C*12:02H HLA-B*35:07H HLA-C*02:02H
  source 1..9: note = Severe acute respiratory syndrome coronavirus 2
FAYANRNRF

SEQ ID NO: 7564 - protein, 9 aa, Severe acute respiratory syndrome-related coronavirus
  REGION 1..9: note = Table A: HLA-C*14:02H
  source 1..9: note = Severe acute respiratory syndrome coronavirus 2
AYANRNRFL

SEQ ID NO: 7565 - protein, 9 aa, Severe acute respiratory syndrome-related coronavirus
  REGION 1..9: note = Table A: HLA-B*58:01H HLA-C*16:01H HLA-A*36:01H HLA-A*29:02M HLA-B*53:01H HLA-A*30:02H HLA-B*35:07M HLA-B*57:03H HLA-C*02:02H
  source 1..9: note = Severe acute respiratory syndrome coronavirus 2
YANRNRFLY

SEQ ID NO: 7566 - protein, 9 aa, Severe acute respiratory syndrome-related coronavirus
  REGION 1..9: note = Table A: HLA-C*15:02H
  source 1..9: note = Severe acute respiratory syndrome coronavirus 2
ANRNRFLYI

SEQ ID NO: 7567 - protein, 9 aa, Severe acute respiratory syndrome-related coronavirus
  REGION 1..9: note = Table A: HLA-C*06:02M HLA-B*27:05H HLA-C*07:01H HLA-C*07:02H HLA-B*14:02M
  source 1..9: note = Severe acute respiratory syndrome coronavirus 2
NRFLYIIKL

SEQ ID NO: 7568 - protein, 9 aa, Severe acute respiratory syndrome-related coronavirus
  REGION 1..9: note = Table A: HLA-B*58:02H HLA-A*24:07H
  source 1..9: note = Severe acute respiratory syndrome coronavirus 2
RFLYIIKLI

SEQ ID NO: 7569 - protein, 9 aa, Severe acute respiratory syndrome-related coronavirus
  REGION 1..9: note = Table A: HLA-A*24:02H HLA-A*24:07H
  source 1..9: note = Severe acute respiratory syndrome coronavirus 2
LYIIKLIFL

SEQ ID NO: 7570 - protein, 9 aa, Severe acute respiratory syndrome-related coronavirus
  REGION 1..9: note = Table A: HLA-B*58:01H HLA-A*24:07H HLA-B*57:03M
  source 1..9: note = Severe acute respiratory syndrome coronavirus 2
YIIKLIFLW

SEQ ID NO: 7571 - protein, 9 aa, Severe acute respiratory syndrome-related coronavirus
  REGION 1..9: note = Table A: HLA-C*04:03H HLA-A*02:04H HLA-A*24:02H HLA-A*24:07H HLA-A*23:01H
  source 1..9: note = Severe acute respiratory syndrome coronavirus 2
LWLLWPVTL

SEQ ID NO: 7572 - protein, 9 aa, Severe acute respiratory syndrome-related coronavirus
  REGION 1..9: note = Table A: HLA-A*02:11M HLA-A*02:01H
  source 1..9: note = Severe acute respiratory syndrome coronavirus 2
LLWPVTLAC

SEQ ID NO: 7573 - protein, 9 aa, Severe acute respiratory syndrome-related coronavirus
  REGION 1..9: note = Table A: HLA-A*24:02H HLA-A*24:07H
  source 1..9: note = Severe acute respiratory syndrome coronavirus 2
LWPVTLACF

SEQ ID NO: 7574 - protein, 9 aa, Severe acute respiratory syndrome-related coronavirus
  REGION 1..9: note = Table A: HLA-B*46:01H HLA-B*38:02H HLA-B*15:02H HLA-B*15:03H
  source 1..9: note = Severe acute respiratory syndrome coronavirus 2
ACFVLAAVY

SEQ ID NO: 7575 - protein, 9 aa, Severe acute respiratory syndrome-related coronavirus
  REGION 1..9: note = Table A: HLA-A*02:11M HLA-A*68:02H HLA-A*02:04M HLA-A*02:06M HLA-A*02:01H HLA-C*08:01H HLA-B*38:02H HLA-B*13:02H
  source 1..9: note = Severe acute respiratory syndrome coronavirus 2
FVLAAVYRI

SEQ ID NO: 7576 - protein, 9 aa, Severe acute respiratory syndrome-related coronavirus
  REGION 1..9: note = Table A: HLA-B*58:01H HLA-B*57:01H HLA-B*53:01H HLA-B*57:03M
  source 1..9: note = Severe acute respiratory syndrome coronavirus 2
LAAVYRINW

SEQ ID NO: 7577 - protein, 9 aa, Severe acute respiratory syndrome-related coronavirus
  REGION 1..9: note = Table A: HLA-C*12:03H HLA-C*17:01H
  source 1..9: note = Severe acute respiratory syndrome coronavirus 2
AAVYRINWI

SEQ ID NO: 7578 - protein, 9 aa, Severe acute respiratory syndrome-related coronavirus
  REGION 1..9: note = Table A: HLA-A*02:11H
  source 1..9: note = Severe acute respiratory syndrome coronavirus 2
AVYRINWIT

SEQ ID NO: 7579 - protein, 9 aa, Severe acute respiratory syndrome-related coronavirus
  REGION 1..9: note = Table A: HLA-A*02:11H HLA-C*15:02H HLA-B*13:02H
  source 1..9: note = Severe acute respiratory syndrome coronavirus 2
RINWITGGI

SEQ ID NO: 7580 - protein, 9 aa, Severe acute respiratory syndrome-related coronavirus
  REGION 1..9: note = Table A: HLA-C*14:02H HLA-C*14:03H HLA-C*08:01H
  source 1..9: note = Severe acute respiratory syndrome coronavirus 2
NWITGGIAI

SEQ ID NO: 7581 - protein, 9 aa, Severe acute respiratory syndrome-related coronavirus
  REGION 1..9: note = Table A: HLA-A*68:02H HLA-C*15:05M HLA-B*35:01H HLA-B*07:05H HLA-B*57:03H HLA-C*07:04H
  source 1..9: note = Severe acute respiratory syndrome coronavirus 2
ITGGIAIAM

SEQ ID NO: 7582 - protein, 9 aa, Severe acute respiratory syndrome-related coronavirus
  REGION 1..9: note = Table A: HLA-B*51:01H
  source 1..9: note = Severe acute respiratory syndrome coronavirus 2
IAIAMACLV

SEQ ID NO: 7583 - protein, 9 aa, Severe acute respiratory syndrome-related coronavirus
  REGION 1..9: note = Table A: HLA-C*15:05H
  source 1..9: note = Severe acute respiratory syndrome coronavirus 2
IAMACLVGL

SEQ ID NO: 7584 - protein, 9 aa, Severe acute respiratory syndrome-related coronavirus
  REGION 1..9: note = Table A: HLA-B*53:01H
  source 1..9: note = Severe acute respiratory syndrome coronavirus 2
MACLVGLMW

SEQ ID NO: 7585 - protein, 9 aa, Severe acute respiratory syndrome-related coronavirus
  REGION 1..9: note = Table A: HLA-A*29:02H
  source 1..9: note = Severe acute respiratory syndrome coronavirus 2
LVGLMWLSY

SEQ ID NO: 7586 - protein, 9 aa, Severe acute respiratory syndrome-related coronavirus
  REGION 1..9: note = Table A: HLA-A*02:04H
  source 1..9: note = Severe acute respiratory syndrome coronavirus 2
WLSYFIASF

SEQ ID NO: 7587 - protein, 9 aa, Severe acute respiratory syndrome-related coronavirus
  REGION 1..9: note = Table A: HLA-A*74:01H HLA-A*34:01H HLA-A*34:02H HLA-A*66:01M
  source 1..9: note = Severe acute respiratory syndrome coronavirus 2
LSYFIASFR

SEQ ID NO: 7588 - protein, 9 aa, Severe acute respiratory syndrome-related coronavirus
  REGION 1..9: note = Table A: HLA-C*14:03H HLA-A*24:02H HLA-A*24:07M HLA-C*08:01H HLA-A*23:01H
  source 1..9: note = Severe acute respiratory syndrome coronavirus 2
SYFIASFRL

SEQ ID NO: 7589 - protein, 9 aa, Severe acute respiratory syndrome-related coronavirus
  REGION 1..9: note = Table A: HLA-C*14:02M HLA-C*14:03M HLA-C*16:01H HLA-A*29:02M HLA-C*03:02H HLA-A*24:02M HLA-A*24:07H HLA-A*23:01M
  source 1..9: note = Severe acute respiratory syndrome coronavirus 2
YFIASFRLF

SEQ ID NO: 7590 - protein, 9 aa, Severe acute respiratory syndrome-related coronavirus
  REGION 1..9: note = Table A: HLA-A*74:01H HLA-A*34:01H
  source 1..9: note = Severe acute respiratory syndrome coronavirus 2
IASFRLFAR

SEQ ID NO: 7591 - protein, 9 aa, Severe acute respiratory syndrome-related coronavirus
  REGION 1..9: note = Table A: HLA-A*02:11H
  source 1..9: note = Severe acute respiratory syndrome coronavirus 2
ASFRLFART

SEQ ID NO: 7592 - protein, 9 aa, Severe acute respiratory syndrome-related coronavirus
  REGION 1..9: note = Table A: HLA-A*74:01H HLA-A*33:03H
  source 1..9: note = Severe acute respiratory syndrome coronavirus 2
SFRLFARTR

SEQ ID NO: 7593 - protein, 9 aa, Severe acute respiratory syndrome-related coronavirus
  REGION 1..9: note = Table A: HLA-A*74:01H HLA-B*07:04H
  source 1..9: note = Severe acute respiratory syndrome coronavirus 2
RLFARTRSM

SEQ ID NO: 7594 - protein, 9 aa, Severe acute respiratory syndrome-related coronavirus
  REGION 1..9: note = Table A: HLA-A*24:07H
  source 1..9: note = Severe acute respiratory syndrome coronavirus 2
LFARTRSMW

SEQ ID NO: 7595 - protein, 9 aa, Severe acute respiratory syndrome-related coronavirus
  REGION 1..9: note = Table A: HLA-B*27:05M
  source 1..9: note = Severe acute respiratory syndrome coronavirus 2
ARTRSMWSF

SEQ ID NO: 7596 - protein, 9 aa, Severe acute respiratory syndrome-related coronavirus
  REGION 1..9: note = Table A: HLA-A*02:11H HLA-A*02:01H
  source 1..9: note = Severe acute respiratory syndrome coronavirus 2
SMWSFNPET

SEQ ID NO: 7597 - protein, 9 aa, Severe acute respiratory syndrome-related coronavirus
  REGION 1..9: note = Table A: HLA-C*14:02M HLA-C*14:03M HLA-B*39:01H
  source 1..9: note = Severe acute respiratory syndrome coronavirus 2
SFNPETNIL

SEQ ID NO: 7598 - protein, 9 aa, Severe acute respiratory syndrome-related coronavirus
  REGION 1..9: note = Table A: HLA-A*68:02H
  source 1..9: note = Severe acute respiratory syndrome coronavirus 2
PETNILLNV

SEQ ID NO: 7599 - protein, 9 aa, Severe acute respiratory syndrome-related coronavirus
  REGION 1..9: note = Table A: HLA-A*02:11H
  source 1..9: note = Severe acute respiratory syndrome coronavirus 2
ILLNVPLHG

SEQ ID NO: 7600 - protein, 9 aa, Severe acute respiratory syndrome-related coronavirus
  REGION 1..9: note = Table A: HLA-A*02:11H HLA-A*02:04H HLA-A*02:02H
  source 1..9: note = Severe acute respiratory syndrome coronavirus 2
LLNVPLHGT

SEQ ID NO: 7601 - protein, 9 aa, Severe acute respiratory syndrome-related coronavirus
  REGION 1..9: note = Table A: HLA-C*15:05H HLA-C*01:02H HLA-A*34:01H HLA-C*07:04H
  source 1..9: note = Severe acute respiratory syndrome coronavirus 2
NVPLHGTIL

SEQ ID NO: 7602 - protein, 9 aa, Severe acute respiratory syndrome-related coronavirus
  REGION 1..9: note = Table A: HLA-B*55:02H HLA-C*15:05H HLA-B*54:01H
  source 1..9: note = Severe acute respiratory syndrome coronavirus 2
VPLHGTILT

SEQ ID NO: 7603 - protein, 9 aa, Severe acute respiratory syndrome-related coronavirus
  REGION 1..9: note = Table A: HLA-A*74:01H HLA-A*26:03H HLA-A*34:01H
  source 1..9: note = Severe acute respiratory syndrome coronavirus 2
PLHGTILTR

SEQ ID NO: 7604 - protein, 9 aa, Severe acute respiratory syndrome-related coronavirus
  REGION 1..9: note = Table A: HLA-B*58:01H HLA-B*58:02H HLA-A*30:01H HLA-B*57:03M
  source 1..9: note = Severe acute respiratory syndrome coronavirus 2
GTILTRPLL

SEQ ID NO: 7605 - protein, 9 aa, Severe acute respiratory syndrome-related coronavirus
  REGION 1..9: note = Table A: HLA-C*06:02H HLA-B*39:01H
  source 1..9: note = Severe acute respiratory syndrome coronavirus 2
TRPLLESEL

SEQ ID NO: 7606 - protein, 9 aa, Severe acute respiratory syndrome-related coronavirus
  REGION 1..9: note = Table A: HLA-C*15:05H
  source 1..9: note = Severe acute respiratory syndrome coronavirus 2
RPLLESELV

SEQ ID NO: 7607 - protein, 9 aa, Severe acute respiratory syndrome-related coronavirus
  REGION 1..9: note = Table A: HLA-B*45:01M HLA-B*40:06H HLA-B*50:01H
  source 1..9: note = Severe acute respiratory syndrome coronavirus 2
LESELVIGA

SEQ ID NO: 7608 - protein, 9 aa, Severe acute respiratory syndrome-related coronavirus
  REGION 1..9: note = Table A: HLA-B*44:05M HLA-B*45:01H HLA-B*44:03H HLA-B*40:01H HLA-B*40:02H HLA-B*41:02H HLA-B*49:01H
  source 1..9: note = Severe acute respiratory syndrome coronavirus 2
SELVIGAVI

SEQ ID NO: 7609 - protein, 9 aa, Severe acute respiratory syndrome-related coronavirus
  REGION 1..9: note = Table A: HLA-A*74:01M HLA-A*11:02H HLA-A*33:03H HLA-A*26:03H HLA-A*68:01M HLA-A*34:01M HLA-A*34:02H HLA-A*66:01H
  source 1..9: note = Severe acute respiratory syndrome coronavirus 2
LVIGAVILR

SEQ ID NO: 7610 - protein, 9 aa, Severe acute respiratory syndrome-related coronavirus
  REGION 1..9: note = Table A: HLA-A*74:01M HLA-A*34:01H HLA-A*66:01H
  source 1..9: note = Severe acute respiratory syndrome coronavirus 2
AVILRGHLR

SEQ ID NO: 7611 - protein, 9 aa, Severe acute respiratory syndrome-related coronavirus
  REGION 1..9: note = Table A: HLA-B*38:02H HLA-B*07:04H
  source 1..9: note = Severe acute respiratory syndrome coronavirus 2
HLRIAGHHL

SEQ ID NO: 7612 - protein, 9 aa, Severe acute respiratory syndrome-related coronavirus
  REGION 1..9: note = Table A: HLA-A*74:01H HLA-A*34:01H
  source 1..9: note = Severe acute respiratory syndrome coronavirus 2
RIAGHHLGR

SEQ ID NO: 7613 - protein, 9 aa, Severe acute respiratory syndrome-related coronavirus
  REGION 1..9: note = Table A: HLA-B*38:02H
  source 1..9: note = Severe acute respiratory syndrome coronavirus 2
GHHLGRCDI

SEQ ID NO: 7614 - protein, 9 aa, Severe acute respiratory syndrome-related coronavirus
  REGION 1..9: note = Table A: HLA-B*08:01H HLA-A*68:02H
  source 1..9: note = Severe acute respiratory syndrome coronavirus 2
DIKDLPKEI

SEQ ID NO: 7615 - protein, 9 aa, Severe acute respiratory syndrome-related coronavirus
  REGION 1..9: note = Table A: HLA-A*02:11H HLA-A*02:06H HLA-A*02:01H HLA-B*37:01M HLA-B*40:02M HLA-B*40:06H HLA-B*41:02M HLA-B*13:02H HLA-B*49:01H HLA-C*07:04M
  source 1..9: note = Severe acute respiratory syndrome coronavirus 2
KDLPKEITV

SEQ ID NO: 7616 - protein, 9 aa, Severe acute respiratory syndrome-related coronavirus
  REGION 1..9: note = Table A: HLA-B*42:01H HLA-B*56:01M HLA-B*08:01H HLA-B*55:02M HLA-C*15:05H HLA-B*55:01M HLA-B*35:07H HLA-B*39:06H HLA-B*54:01M HLA-B*07:04H
  source 1..9: note = Severe acute respiratory syndrome coronavirus 2
LPKEITVAT

SEQ ID NO: 7617 - protein, 9 aa, Severe acute respiratory syndrome-related coronavirus
  REGION 1..9: note = Table A: HLA-B*50:01H
  source 1..9: note = Severe acute respiratory syndrome coronavirus 2
KEITVATSR

SEQ ID NO: 7618 - protein, 9 aa, Severe acute respiratory syndrome-related coronavirus
  REGION 1..9: note = Table A: HLA-B*58:02H HLA-A*11:303H HLA-C*16:01H HLA-B*57:01H HLA-C*03:03H HLA-C*03:04M HLA-C*15:05H HLA-C*15:02H HLA-B*57:03H
  source 1..9: note = Severe acute respiratory syndrome coronavirus 2
ITVATSRTL

SEQ ID NO: 7619 - protein, 9 aa, Severe acute respiratory syndrome-related coronavirus
  REGION 1..9: note = Table A: HLA-B*58:01H HLA-C*16:01H HLA-A*03:01H HLA-B*46:01H HLA-A*29:02H HLA-C*03:02M HLA-C*15:05H HLA-C*12:02H HLA-C*12:03H HLA-C*07:27H HLA-B*35:07H HLA-B*38:02H HLA-B*15:01H HLA-B*07:05H HLA-C*02:02H
  source 1..9: note = Severe acute respiratory syndrome coronavirus 2
VATSRTLSY

SEQ ID NO: 7620 - protein, 9 aa, Severe acute respiratory syndrome-related coronavirus
  REGION 1..9: note = Table A: HLA-B*58:01H HLA-A*03:01H HLA-A*11:01H HLA-A*36:01H HLA-A*26:01H HLA-A*29:02H HLA-A*01:01H HLA-A*30:02H HLA-A*34:02H HLA-B*15:01H HLA-B*57:03H
  source 1..9: note = Severe acute respiratory syndrome coronavirus 2
ATSRTLSYY

SEQ ID NO: 7621 - protein, 9 aa, Severe acute respiratory syndrome-related coronavirus
  REGION 1..9: note = Table A: HLA-A*34:02H
  source 1..9: note = Severe acute respiratory syndrome coronavirus 2
TSRTLSYYK

SEQ ID NO: 7622 - protein, 9 aa, Severe acute respiratory syndrome-related coronavirus
  REGION 1..9: note = Table A: HLA-B*27:05H
  source 1..9: note = Severe acute respiratory syndrome coronavirus 2
SRTLSYYKL

SEQ ID NO: 7623 - protein, 9 aa, Severe acute respiratory syndrome-related coronavirus
  REGION 1..9: note = Table A: HLA-A*74:01H
  source 1..9: note = Severe acute respiratory syndrome coronavirus 2
RTLSYYKLG

SEQ ID NO: 7624 - protein, 9 aa, Severe acute respiratory syndrome-related coronavirus
  REGION 1..9: note = Table A: HLA-A*33:01M HLA-A*33:03H HLA-A*26:03H HLA-A*34:01H HLA-A*31:01H HLA-A*66:01H
  source 1..9: note = Severe acute respiratory syndrome coronavirus 2
YYKLGASQR

SEQ ID NO: 7625 - protein, 9 aa, Severe acute respiratory syndrome-related coronavirus
  REGION 1..9: note = Table A: HLA-B*27:05H HLA-B*27:02M HLA-B*38:01M HLA-B*38:02M HLA-B*39:01H
  source 1..9: note = Severe acute respiratory syndrome coronavirus 2
QRVAGDSGF

SEQ ID NO: 7626 - protein, 9 aa, Severe acute respiratory syndrome-related coronavirus
  REGION 1..9: note = Table A: HLA-A*02:08H
  source 1..9: note = Severe acute respiratory syndrome coronavirus 2
RVAGDSGFA

SEQ ID NO: 7627 - protein, 9 aa, Severe acute respiratory syndrome-related coronavirus
  REGION 1..9: note = Table A: HLA-B*55:02H HLA-B*54:01H
  source 1..9: note = Severe acute respiratory syndrome coronavirus 2
VAGDSGFAA

SEQ ID NO: 7628 - protein, 9 aa, Severe acute respiratory syndrome-related coronavirus
  REGION 1..9: note = Table A: HLA-A*11:303H HLA-A*36:01H HLA-B*46:01M HLA-A*01:01M HLA-A*30:02M HLA-C*07:27H HLA-B*35:01H HLA-B*35:08H HLA-B*38:02H HLA-B*15:01H HLA-B*15:03H HLA-B*39:01M HLA-B*07:05H
  source 1..9: note = Severe acute respiratory syndrome coronavirus 2
AGDSGFAAY

SEQ ID NO: 7629 - protein, 9 aa, Severe acute respiratory syndrome-related coronavirus
  REGION 1..9: note = Table A: HLA-A*33:01M HLA-A*33:03H HLA-A*68:01M HLA-A*34:01H HLA-A*66:01H
  source 1..9: note = Severe acute respiratory syndrome coronavirus 2
DSGFAAYSR

SEQ ID NO: 7630 - protein, 9 aa, Severe acute respiratory syndrome-related coronavirus
  REGION 1..9: note = Table A: HLA-B*46:01H HLA-A*29:02H HLA-A*30:02M HLA-C*12:02H HLA-B*35:01H HLA-B*35:07H HLA-B*38:02H HLA-B*15:01H HLA-B*15:03H HLA-B*07:05H
  source 1..9: note = Severe acute respiratory syndrome coronavirus 2
SGFAAYSRY

SEQ ID NO: 7631 - protein, 9 aa, Severe acute respiratory syndrome-related coronavirus
  REGION 1..9: note = Table A: HLA-A*26:01H HLA-A*30:02H
  source 1..9: note = Severe acute respiratory syndrome coronavirus 2
YSRYRIGNY

SEQ ID NO: 7632 - protein, 9 aa, Severe acute respiratory syndrome-related coronavirus
  REGION 1..9: note = Table A: HLA-B*27:05H
  source 1..9: note = Severe acute respiratory syndrome coronavirus 2
SRYRIGNYK

SEQ ID NO: 7633 - protein, 9 aa, Severe acute respiratory syndrome-related coronavirus
  REGION 1..9: note = Table A: HLA-A*30:01H HLA-A*30:02H HLA-A*24:02H HLA-A*24:07M HLA-A*23:01H
  source 1..9: note = Severe acute respiratory syndrome coronavirus 2
RYRIGNYKL

SEQ ID NO: 7634 - protein, 9 aa, Severe acute respiratory syndrome-related coronavirus
  REGION 1..9: note = Table A: HLA-B*38:01M HLA-B*38:02M HLA-B*39:01M
  source 1..9: note = Severe acute respiratory syndrome coronavirus 2
DHSSSSDNI

SEQ ID NO: 7635 - protein, 9 aa, Severe acute respiratory syndrome-related coronavirus
  REGION 1..9: note = Table A: HLA-C*15:05H HLA-B*35:12H
  source 1..9: note = Severe acute respiratory syndrome coronavirus 2
SSSSDNIAL

SEQ ID NO: 7636 - protein, 9 aa, Severe acute respiratory syndrome-related coronavirus
  REGION 1..9: note = Table A: HLA-A*68:02M HLA-C*15:05H HLA-C*15:02H HLA-A*02:05H HLA-A*02:02H HLA-C*17:01H HLA-B*38:02H
  source 1..9: note = Severe acute respiratory syndrome coronavirus 2
SSSDNIALL

SEQ ID NO: 7637 - protein, 9 aa, Severe acute respiratory syndrome-related coronavirus
  REGION 1..9: note = Table A: HLA-A*36:01H HLA-A*68:02H HLA-C*15:05H HLA-C*15:02M HLA-A*02:07H HLA-B*13:02M
  source 1..9: note = Severe acute respiratory syndrome coronavirus 2
SSDNIALLV

SEQ ID NO: 7638 - protein, 10 aa, Severe acute respiratory syndrome-related coronavirus
  REGION 1..10: note = Table A: HLA-B*35:03H HLA-B*35:02H HLA-B*38:02H
  source 1..10: note = Severe acute respiratory syndrome coronavirus 2
MADSNGTITV

SEQ ID NO: 7639 - protein, 10 aa, Severe acute respiratory syndrome-related coronavirus
  REGION 1..10: note = Table A: HLA-A*11:303H HLA-A*11:01M HLA-A*11:02M HLA-A*36:01H HLA-A*34:02H HLA-C*07:27H
  source 1..10: note = Severe acute respiratory syndrome coronavirus 2
GTITVEELKK

SEQ ID NO: 7640 - protein, 10 aa, Severe acute respiratory syndrome-related coronavirus
  REGION 1..10: note = Table A: HLA-B*44:02M HLA-B*44:05H HLA-B*44:03H
  source 1..10: note = Severe acute respiratory syndrome coronavirus 2
EELKKLLEQW

SEQ ID NO: 7641 - protein, 10 aa, Severe acute respiratory syndrome-related coronavirus
  REGION 1..10: note = Table A: HLA-A*02:04H
  source 1..10: note = Severe acute respiratory syndrome coronavirus 2
KLLEQWNLVI

SEQ ID NO: 7642 - protein, 10 aa, Severe acute respiratory syndrome-related coronavirus
  REGION 1..10: note = Table A: HLA-A*24:07H
  source 1..10: note = Severe acute respiratory syndrome coronavirus 2
QWNLVIGFLF

SEQ ID NO: 7643 - protein, 10 aa, Severe acute respiratory syndrome-related coronavirus
  REGION 1..10: note = Table A: HLA-A*02:04H
  source 1..10: note = Severe acute respiratory syndrome coronavirus 2
FLFLTWICLL

SEQ ID NO: 7644 - protein, 10 aa, Severe acute respiratory syndrome-related coronavirus
  REGION 1..10: note = Table A: HLA-A*74:01H
  source 1..10: note = Severe acute respiratory syndrome coronavirus 2
CLLQFAYANR

SEQ ID NO: 7645 - protein, 10 aa, Severe acute respiratory syndrome-related coronavirus
  REGION 1..10: note = Table A: HLA-A*24:07H
  source 1..10: note = Severe acute respiratory syndrome coronavirus 2
QFAYANRNRF

SEQ ID NO: 7646 - protein, 10 aa, Severe acute respiratory syndrome-related coronavirus
  REGION 1..10: note = Table A: HLA-C*03:04H
  source 1..10: note = Severe acute respiratory syndrome coronavirus 2
FAYANRNRFL

SEQ ID NO: 7647 - protein, 10 aa, Severe acute respiratory syndrome-related coronavirus
  REGION 1..10: note = Table A: HLA-A*29:02H HLA-A*30:02H
  source 1..10: note = Severe acute respiratory syndrome coronavirus 2
AYANRNRFLY

SEQ ID NO: 7648 - protein, 10 aa, Severe acute respiratory syndrome-related coronavirus
  REGION 1..10: note = Table A: HLA-A*24:07M HLA-A*23:01H
  source 1..10: note = Severe acute respiratory syndrome coronavirus 2
RFLYIIKLIF

SEQ ID NO: 7649 - protein, 10 aa, Severe acute respiratory syndrome-related coronavirus
  REGION 1..10: note = Table A: HLA-A*02:11M HLA-A*02:04M HLA-A*02:02M HLA-A*02:03H
  source 1..10: note = Severe acute respiratory syndrome coronavirus 2
FLYIIKLIFL

SEQ ID NO: 7650 - protein, 10 aa, Severe acute respiratory syndrome-related coronavirus
  REGION 1..10: note = Table A: HLA-A*24:07H
  source 1..10: note = Severe acute respiratory syndrome coronavirus 2
LYIIKLIFLW

SEQ ID NO: 7651 - protein, 10 aa, Severe acute respiratory syndrome-related coronavirus
  REGION 1..10: note = Table A: HLA-A*02:11M HLA-A*02:04M
  source 1..10: note = Severe acute respiratory syndrome coronavirus 2
FLWLLWPVTL

SEQ ID NO: 7652 - protein, 10 aa, Severe acute respiratory syndrome-related coronavirus
  REGION 1..10: note = Table A: HLA-A*32:01H
  source 1..10: note = Severe acute respiratory syndrome coronavirus 2
VLAAVYRINW

SEQ ID NO: 7653 - protein, 10 aa, Severe acute respiratory syndrome-related coronavirus
  REGION 1..10: note = Table A: HLA-B*40:06H
  source 1..10: note = Severe acute respiratory syndrome coronavirus 2
AVYRINWITG

SEQ ID NO: 7654 - protein, 10 aa, Severe acute respiratory syndrome-related coronavirus
  REGION 1..10: note = Table A: HLA-A*02:08H
  source 1..10: note = Severe acute respiratory syndrome coronavirus 2
ITGGIAIAMA

SEQ ID NO: 7655 - protein, 10 aa, Severe acute respiratory syndrome-related coronavirus
  REGION 1..10: note = Table A: HLA-A*23:01H
  source 1..10: note = Severe acute respiratory syndrome coronavirus 2
MWLSYFIASF

SEQ ID NO: 7656 - protein, 10 aa, Severe acute respiratory syndrome-related coronavirus
  REGION 1..10: note = Table A: HLA-C*14:03H HLA-A*24:02H HLA-A*24:07M HLA-A*23:01H
  source 1..10: note = Severe acute respiratory syndrome coronavirus 2
SYFIASFRLF

SEQ ID NO: 7657 - protein, 10 aa, Severe acute respiratory syndrome-related coronavirus
  REGION 1..10: note = Table A: HLA-C*14:03H
  source 1..10: note = Severe acute respiratory syndrome coronavirus 2
YFIASFRLFA

SEQ ID NO: 7658 - protein, 10 aa, Severe acute respiratory syndrome-related coronavirus
  REGION 1..10: note = Table A: HLA-A*74:01H HLA-A*66:01H
  source 1..10: note = Severe acute respiratory syndrome coronavirus 2
FIASFRLFAR

SEQ ID NO: 7659 - protein, 10 aa, Severe acute respiratory syndrome-related coronavirus
  REGION 1..10: note = Table A: HLA-A*74:01H
  source 1..10: note = Severe acute respiratory syndrome coronavirus 2
ASFRLFARTR

SEQ ID NO: 7660 - protein, 10 aa, Severe acute respiratory syndrome-related coronavirus
  REGION 1..10: note = Table A: HLA-A*32:01M HLA-B*57:03H
  source 1..10: note = Severe acute respiratory syndrome coronavirus 2
RLFARTRSMW

SEQ ID NO: 7661 - protein, 10 aa, Severe acute respiratory syndrome-related coronavirus
  REGION 1..10: note = Table A: HLA-A*02:11H HLA-A*02:04H HLA-A*02:01H
  source 1..10: note = Severe acute respiratory syndrome coronavirus 2
ILLNVPLHGT

SEQ ID NO: 7662 - protein, 10 aa, Severe acute respiratory syndrome-related coronavirus
  REGION 1..10: note = Table A: HLA-A*34:01H HLA-A*34:02H
  source 1..10: note = Severe acute respiratory syndrome coronavirus 2
VPLHGTILTR

SEQ ID NO: 7663 - protein, 10 aa, Severe acute respiratory syndrome-related coronavirus
  REGION 1..10: note = Table A: HLA-B*57:03H
  source 1..10: note = Severe acute respiratory syndrome coronavirus 2
LTRPLLESEL

SEQ ID NO: 7664 - protein, 10 aa, Severe acute respiratory syndrome-related coronavirus
  REGION 1..10: note = Table A: HLA-C*15:05H
  source 1..10: note = Severe acute respiratory syndrome coronavirus 2
RPLLESELVI

SEQ ID NO: 7665 - protein, 10 aa, Severe acute respiratory syndrome-related coronavirus
  REGION 1..10: note = Table A: HLA-B*44:05M HLA-B*40:01M HLA-B*40:02M HLA-B*41:02H
  source 1..10: note = Severe acute respiratory syndrome coronavirus 2
SELVIGAVIL

SEQ ID NO: 7666 - protein, 10 aa, Severe acute respiratory syndrome-related coronavirus
  REGION 1..10: note = Table A: HLA-A*26:03M HLA-A*68:01H HLA-A*34:01M HLA-A*66:01H
  source 1..10: note = Severe acute respiratory syndrome coronavirus 2
ELVIGAVILR

SEQ ID NO: 7667 - protein, 10 aa, Severe acute respiratory syndrome-related coronavirus
  REGION 1..10: note = Table A: HLA-B*38:01H HLA-B*38:02M HLA-B*15:10H
  source 1..10: note = Severe acute respiratory syndrome coronavirus 2
GHLRIAGHHL

SEQ ID NO: 7668 - protein, 10 aa, Severe acute respiratory syndrome-related coronavirus
  REGION 1..10: note = Table A: HLA-B*27:05H
  source 1..10: note = Severe acute respiratory syndrome coronavirus 2
GRCDIKDLPK

SEQ ID NO: 7669 - protein, 10 aa, Severe acute respiratory syndrome-related coronavirus
  REGION 1..10: note = Table A: HLA-A*36:01H HLA-A*25:01H HLA-A*26:01H HLA-A*34:02H HLA-B*35:01H HLA-B*38:02H HLA-B*15:01H HLA-B*15:02M
  source 1..10: note = Severe acute respiratory syndrome coronavirus 2
TVATSRTLSY

SEQ ID NO: 7670 - protein, 10 aa, Severe acute respiratory syndrome-related coronavirus
  REGION 1..10: note = Table A: HLA-C*16:01H HLA-A*30:02H
  source 1..10: note = Severe acute respiratory syndrome coronavirus 2
VATSRTLSYY

SEQ ID NO: 7671 - protein, 10 aa, Severe acute respiratory syndrome-related coronavirus
  REGION 1..10: note = Table A: HLA-A*11:303H HLA-A*03:02H HLA-A*11:01M HLA-A*11:02M HLA-A*34:02H HLA-C*07:27H
  source 1..10: note = Severe acute respiratory syndrome coronavirus 2
ATSRTLSYYK

SEQ ID NO: 7672 - protein, 10 aa, Severe acute respiratory syndrome-related coronavirus
  REGION 1..10: note = Table A: HLA-A*74:01M HLA-A*03:01H HLA-A*11:01H HLA-A*33:01M HLA-A*33:03H HLA-A*26:03H HLA-A*68:01H HLA-A*34:01H HLA-A*34:02H HLA-A*31:01M HLA-A*66:01H
  source 1..10: note = Severe acute respiratory syndrome coronavirus 2
SYYKLGASQR

SEQ ID NO: 7673 - protein, 10 aa, Severe acute respiratory syndrome-related coronavirus
  REGION 1..10: note = Table A: HLA-B*38:02M HLA-B*15:01H HLA-B*15:02H HLA-B*15:03M
  source 1..10: note = Severe acute respiratory syndrome coronavirus 2
SQRVAGDSGF

SEQ ID NO: 7674 - protein, 10 aa, Severe acute respiratory syndrome-related coronavirus
  REGION 1..10: note = Table A: HLA-B*55:02H HLA-A*02:08M
  source 1..10: note = Severe acute respiratory syndrome coronavirus 2
RVAGDSGFAA

SEQ ID NO: 7675 - protein, 10 aa, Severe acute respiratory syndrome-related coronavirus
  REGION 1..10: note = Table A: HLA-A*11:303H HLA-C*16:04H HLA-A*36:01H HLA-B*46:01M HLA-A*26:03H HLA-A*29:02H HLA-C*03:02H HLA-A*30:02H HLA-C*12:02H HLA-A*34:01H HLA-A*34:02H HLA-B*35:01M HLA-B*35:08H HLA-B*35:07H HLA-B*38:02H
  REGION 1..10: note = CONT. FROM ABOVE: HLA-B*15:01H HLA-B*39:01H HLA-B*15:11H
  source 1..10: note = Severe acute respiratory syndrome coronavirus 2
VAGDSGFAAY

SEQ ID NO: 7676 - protein, 10 aa, Severe acute respiratory syndrome-related coronavirus
  REGION 1..10: note = Table A: HLA-B*27:02H
  source 1..10: note = Severe acute respiratory syndrome coronavirus 2
GDSGFAAYSR

SEQ ID NO: 7677 - protein, 10 aa, Severe acute respiratory syndrome-related coronavirus
  REGION 1..10: note = Table A: HLA-A*36:01H HLA-A*26:01H
  source 1..10: note = Severe acute respiratory syndrome coronavirus 2
DSGFAAYSRY

SEQ ID NO: 7678 - protein, 10 aa, Severe acute respiratory syndrome-related coronavirus
  REGION 1..10: note = Table A: HLA-A*30:02H
  source 1..10: note = Severe acute respiratory syndrome coronavirus 2
AYSRYRIGNY

SEQ ID NO: 7679 - protein, 10 aa, Severe acute respiratory syndrome-related coronavirus
  REGION 1..10: note = Table A: HLA-B*27:05M HLA-B*14:02H HLA-B*38:02H
  source 1..10: note = Severe acute respiratory syndrome coronavirus 2
SRYRIGNYKL

SEQ ID NO: 7680 - protein, 10 aa, Severe acute respiratory syndrome-related coronavirus
  REGION 1..10: note = Table A: HLA-A*68:02H HLA-C*15:02H HLA-B*13:02H
  source 1..10: note = Severe acute respiratory syndrome coronavirus 2
SSSDNIALLV

SEQ ID NO: 7681 - protein, 11 aa, Severe acute respiratory syndrome-related coronavirus
  REGION 1..11: note = Table A: HLA-A*02:05H HLA-A*02:08H
  source 1..11: note = Severe acute respiratory syndrome coronavirus 2
GTITVEELKKL

SEQ ID NO: 7682 - protein, 11 aa, Severe acute respiratory syndrome-related coronavirus
  REGION 1..11: note = Table A: HLA-A*74:01H
  source 1..11: note = Severe acute respiratory syndrome coronavirus 2
LLQFAYANRNR

SEQ ID NO: 7683 - protein, 11 aa, Severe acute respiratory syndrome-related coronavirus
  REGION 1..11: note = Table A: HLA-A*29:02H
  source 1..11: note = Severe acute respiratory syndrome coronavirus 2
FAYANRNRFLY

SEQ ID NO: 7684 - protein, 11 aa, Severe acute respiratory syndrome-related coronavirus
  REGION 1..11: note = Table A: HLA-A*24:07M
  source 1..11: note = Severe acute respiratory syndrome coronavirus 2
AYANRNRFLYI

SEQ ID NO: 7685 - protein, 11 aa, Severe acute respiratory syndrome-related coronavirus
  REGION 1..11: note = Table A: HLA-A*24:07H
  source 1..11: note = Severe acute respiratory syndrome coronavirus 2
IFLWLLWPVTL

SEQ ID NO: 7686 - protein, 11 aa, Severe acute respiratory syndrome-related coronavirus
  REGION 1..11: note = Table A: HLA-B*58:02H
  source 1..11: note = Severe acute respiratory syndrome coronavirus 2
RINWITGGIAI

SEQ ID NO: 7687 - protein, 11 aa, Severe acute respiratory syndrome-related coronavirus
  REGION 1..11: note = Table A: HLA-B*58:02H
  source 1..11: note = Severe acute respiratory syndrome coronavirus 2
LSYFIASFRLF

SEQ ID NO: 7688 - protein, 11 aa, Severe acute respiratory syndrome-related coronavirus
  REGION 1..11: note = Table A: HLA-A*02:11M
  source 1..11: note = Severe acute respiratory syndrome coronavirus 2
SMWSFNPETNI

SEQ ID NO: 7689 - protein, 11 aa, Severe acute respiratory syndrome-related coronavirus
  REGION 1..11: note = Table A: HLA-A*68:02H
  source 1..11: note = Severe acute respiratory syndrome coronavirus 2
WSFNPETNILL

SEQ ID NO: 7690 - protein, 11 aa, Severe acute respiratory syndrome-related coronavirus
  REGION 1..11: note = Table A: HLA-A*33:03H HLA-A*26:03H HLA-A*68:01H HLA-A*34:01M HLA-A*34:02H HLA-A*66:01H
  source 1..11: note = Severe acute respiratory syndrome coronavirus 2
NVPLHGTILTR

SEQ ID NO: 7691 - protein, 11 aa, Severe acute respiratory syndrome-related coronavirus
  REGION 1..11: note = Table A: HLA-A*74:01H
  source 1..11: note = Severe acute respiratory syndrome coronavirus 2
HLRIAGHHLGR

SEQ ID NO: 7692 - protein, 11 aa, Severe acute respiratory syndrome-related coronavirus
  REGION 1..11: note = Table A: HLA-B*08:01H HLA-A*68:02H HLA-B*38:02H
  source 1..11: note = Severe acute respiratory syndrome coronavirus 2
DIKDLPKEITV

SEQ ID NO: 7693 - protein, 11 aa, Severe acute respiratory syndrome-related coronavirus
  REGION 1..11: note = Table A: HLA-A*33:01H HLA-A*33:03M HLA-B*56:01H HLA-B*55:02H HLA-A*68:01H HLA-A*34:01H HLA-B*54:01H HLA-A*66:01H
  source 1..11: note = Severe acute respiratory syndrome coronavirus 2
LPKEITVATSR

SEQ ID NO: 7694 - protein, 11 aa, Severe acute respiratory syndrome-related coronavirus
  REGION 1..11: note = Table A: HLA-B*44:05H HLA-B*40:01H HLA-B*40:02H HLA-B*41:02H
  source 1..11: note = Severe acute respiratory syndrome coronavirus 2
KEITVATSRTL

SEQ ID NO: 7695 - protein, 11 aa, Severe acute respiratory syndrome-related coronavirus
  REGION 1..11: note = Table A: HLA-A*03:01H HLA-A*26:01M HLA-A*26:02H HLA-A*30:02M HLA-A*34:01H HLA-A*34:02H HLA-B*38:02M HLA-B*15:01H HLA-B*15:02H
  source 1..11: note = Severe acute respiratory syndrome coronavirus 2
TVATSRTLSYY

SEQ ID NO: 7696 - protein, 11 aa, Severe acute respiratory syndrome-related coronavirus
  REGION 1..11: note = Table A: HLA-B*57:03H
  source 1..11: note = Severe acute respiratory syndrome coronavirus 2
ATSRTLSYYKL

SEQ ID NO: 7697 - protein, 11 aa, Severe acute respiratory syndrome-related coronavirus
  REGION 1..11: note = Table A: HLA-A*74:01H
  source 1..11: note = Severe acute respiratory syndrome coronavirus 2
LSYYKLGASQR

SEQ ID NO: 7698 - protein, 11 aa, Severe acute respiratory syndrome-related coronavirus
  REGION 1..11: note = Table A: HLA-B*57:03H
  source 1..11: note = Severe acute respiratory syndrome coronavirus 2
ASQRVAGDSGF

SEQ ID NO: 7699 - protein, 11 aa, Severe acute respiratory syndrome-related coronavirus
  REGION 1..11: note = Table A: HLA-B*39:06H
  source 1..11: note = Severe acute respiratory syndrome coronavirus 2
QRVAGDSGFAA

SEQ ID NO: 7700 - protein, 11 aa, Severe acute respiratory syndrome-related coronavirus
  REGION 1..11: note = Table A: HLA-B*58:01H HLA-A*03:02M HLA-A*36:01M HLA-A*25:01H HLA-B*46:01H HLA-A*26:01H HLA-A*26:03H HLA-A*29:01H HLA-A*29:02H HLA-A*30:02H HLA-A*02:08H HLA-B*35:01H HLA-B*35:08H HLA-B*38:02H HLA-A*32:01H HLA-B*15:01H
  REGION 1..11: note = CONT. FROM ABOVE: HLA-B*07:05H HLA-B*57:03H HLA-B*13:01H
  source 1..11: note = Severe acute respiratory syndrome coronavirus 2
RVAGDSGFAAY

SEQ ID NO: 7701 - protein, 11 aa, Severe acute respiratory syndrome-related coronavirus
  REGION 1..11: note = Table A: HLA-A*36:01H HLA-A*29:02H HLA-B*27:02H HLA-A*30:02H
  source 1..11: note = Severe acute respiratory syndrome coronavirus 2
GDSGFAAYSRY

SEQ ID NO: 7702 - protein, 11 aa, Severe acute respiratory syndrome-related coronavirus
  REGION 1..11: note = Table A: HLA-A*33:01H
  source 1..11: note = Severe acute respiratory syndrome coronavirus 2
DSGFAAYSRYR

SEQ ID NO: 7703 - protein, 11 aa, Severe acute respiratory syndrome-related coronavirus
  REGION 1..11: note = Table A: HLA-A*30:02H
  source 1..11: note = Severe acute respiratory syndrome coronavirus 2
AAYSRYRIGNY

SEQ ID NO: 7704 - protein, 11 aa, Severe acute respiratory syndrome-related coronavirus
  REGION 1..11: note = Table A: HLA-B*38:01M HLA-B*38:02M HLA-B*39:01M HLA-B*15:10H
  source 1..11: note = Severe acute respiratory syndrome coronavirus 2
DHSSSSDNIAL

SEQ ID NO: 7705 - protein, 8 aa, Severe acute respiratory syndrome-related coronavirus
  REGION 1..8: note = Table A: HLA-B*38:02H HLA-B*39:06H
  source 1..8: note = Severe acute respiratory syndrome coronavirus 2
FHLVDFQV

SEQ ID NO: 7706 - protein, 8 aa, Severe acute respiratory syndrome-related coronavirus
  REGION 1..8: note = Table A: HLA-C*04:03H
  source 1..8: note = Severe acute respiratory syndrome coronavirus 2
LVDFQVTI

SEQ ID NO: 7707 - protein, 8 aa, Severe acute respiratory syndrome-related coronavirus
  REGION 1..8: note = Table A: HLA-B*52:01H HLA-B*38:02H HLA-B*13:02M HLA-B*49:01H
  source 1..8: note = Severe acute respiratory syndrome coronavirus 2
FQVTIAEI

SEQ ID NO: 7708 - protein, 8 aa, Severe acute respiratory syndrome-related coronavirus
  REGION 1..8: note = Table A: HLA-B*40:02H HLA-B*07:05H HLA-B*41:02H
  source 1..8: note = Severe acute respiratory syndrome coronavirus 2
AEILLIIM

SEQ ID NO: 7709 - protein, 8 aa, Severe acute respiratory syndrome-related coronavirus
  REGION 1..8: note = Table A: HLA-A*02:11H
  source 1..8: note = Severe acute respiratory syndrome coronavirus 2
IIMRTFKV

SEQ ID NO: 7710 - protein, 8 aa, Severe acute respiratory syndrome-related coronavirus
  REGION 1..8: note = Table A: HLA-B*58:01M HLA-B*58:02H HLA-B*57:01H HLA-A*32:01H HLA-B*57:03M
  source 1..8: note = Severe acute respiratory syndrome coronavirus 2
RTFKVSIW

SEQ ID NO: 7711 - protein, 8 aa, Severe acute respiratory syndrome-related coronavirus
  REGION 1..8: note = Table A: HLA-C*04:03H
  source 1..8: note = Severe acute respiratory syndrome coronavirus 2
NLDYIINL

SEQ ID NO: 7712 - protein, 8 aa, Severe acute respiratory syndrome-related coronavirus
  REGION 1..8: note = Table A: HLA-B*58:01H HLA-B*58:02H HLA-B*57:03H
  source 1..8: note = Severe acute respiratory syndrome coronavirus 2
KSLTENKY

SEQ ID NO: 7713 - protein, 8 aa, Severe acute respiratory syndrome-related coronavirus
  REGION 1..8: note = Table A: HLA-B*44:05H HLA-B*18:01H HLA-B*37:01H HLA-B*40:02H HLA-B*07:05H HLA-B*41:02H
  source 1..8: note = Severe acute respiratory syndrome coronavirus 2
TENKYSQL

SEQ ID NO: 7714 - protein, 9 aa, Severe acute respiratory syndrome-related coronavirus
  REGION 1..9: note = Table A: HLA-B*38:02H
  source 1..9: note = Severe acute respiratory syndrome coronavirus 2
FHLVDFQVT

SEQ ID NO: 7715 - protein, 9 aa, Severe acute respiratory syndrome-related coronavirus
  REGION 1..9: note = Table A: HLA-B*48:01H HLA-B*58:01H HLA-A*11:303H HLA-A*02:11H HLA-B*53:01H HLA-A*68:02M HLA-B*35:03H HLA-C*15:05H HLA-C*15:02H HLA-A*02:04H HLA-A*02:05M HLA-A*02:06M HLA-A*02:07M HLA-B*14:01H HLA-A*02:01M
  REGION 1..9: note = CONT. FROM ABOVE: HLA-A*02:02H HLA-A*02:03M HLA-B*51:01H HLA- B*52:01M HLA-C*08:01M HLA-B*15:13H HLA-B*38:01M HLA-B*38:02H HLA-B*40:02H HLA-B*40:06M HLA-B*15:02H HLA-B*57:03M HLA-B*13 :01M HLA-B*13:02H HLA-B*49:01H
  source 1..9: note = Severe acute respiratory syndrome coronavirus 2
HLVDFQVTI

SEQ ID NO: 7716 - protein, 9 aa, Severe acute respiratory syndrome-related coronavirus
  REGION 1..9: note = Table A: HLA-A*02:05H HLA-B*38:02H
  source 1..9: note = Severe acute respiratory syndrome coronavirus 2
FQVTIAEIL

SEQ ID NO: 7717 - protein, 9 aa, Severe acute respiratory syndrome-related coronavirus
  REGION 1..9: note = Table A: HLA-C*15:02M HLA-B*57:03H HLA-B*13:02H
  source 1..9: note = Severe acute respiratory syndrome coronavirus 2
VTIAEILLI

SEQ ID NO: 7718 - protein, 9 aa, Severe acute respiratory syndrome-related coronavirus
  REGION 1..9: note = Table A: HLA-A*68:02H HLA-C*15:05H HLA-C*15:02H HLA-A*02:04H HLA-B*38:02H HLA-B*13:02H
  source 1..9: note = Severe acute respiratory syndrome coronavirus 2
TIAEILLII

SEQ ID NO: 7719 - protein, 9 aa, Severe acute respiratory syndrome-related coronavirus
  REGION 1..9: note = Table A: HLA-C*04:03H
  source 1..9: note = Severe acute respiratory syndrome coronavirus 2
IAEILLIIM

SEQ ID NO: 7720 - protein, 9 aa, Severe acute respiratory syndrome-related coronavirus
  REGION 1..9: note = Table A: HLA-A*02:11H
  source 1..9: note = Severe acute respiratory syndrome coronavirus 2
LIIMRTFKV

SEQ ID NO: 7721 - protein, 9 aa, Severe acute respiratory syndrome-related coronavirus
  REGION 1..9: note = Table A: HLA-B*52:01H
  source 1..9: note = Severe acute respiratory syndrome coronavirus 2
IMRTFKVSI

SEQ ID NO: 7722 - protein, 9 aa, Severe acute respiratory syndrome-related coronavirus
  REGION 1..9: note = Table A: HLA-A*24:07H
  source 1..9: note = Severe acute respiratory syndrome coronavirus 2
TFKVSIWNL

SEQ ID NO: 7723 - protein, 9 aa, Severe acute respiratory syndrome-related coronavirus
  REGION 1..9: note = Table A: HLA-A*36:01H HLA-A*29:01H HLA-A*29:02H HLA-A*30:02M
  source 1..9: note = Severe acute respiratory syndrome coronavirus 2
KVSIWNLDY

SEQ ID NO: 7724 - protein, 9 aa, Severe acute respiratory syndrome-related coronavirus
  REGION 1..9: note = Table A: HLA-C*08:01H
  source 1..9: note = Severe acute respiratory syndrome coronavirus 2
VSIWNLDYI

SEQ ID NO: 7725 - protein, 9 aa, Severe acute respiratory syndrome-related coronavirus
  REGION 1..9: note = Table A: HLA-A*02:04M
  source 1..9: note = Severe acute respiratory syndrome coronavirus 2
WNLDYIINL

SEQ ID NO: 7726 - protein, 9 aa, Severe acute respiratory syndrome-related coronavirus
  REGION 1..9: note = Table A: HLA-C*04:03H HLA-A*02:11H HLA-A*02:07M HLA-B*38:02H
  source 1..9: note = Severe acute respiratory syndrome coronavirus 2
NLDYIINLI

SEQ ID NO: 7727 - protein, 9 aa, Severe acute respiratory syndrome-related coronavirus
  REGION 1..9: note = Table A: HLA-A*02:11M HLA-C*15:02H HLA-A*02:04M HLA-A*02:02H HLA-B*07:04H
  source 1..9: note = Severe acute respiratory syndrome coronavirus 2
IINLIIKNL

SEQ ID NO: 7728 - protein, 9 aa, Severe acute respiratory syndrome-related coronavirus
  REGION 1..9: note = Table A: HLA-A*34:02H
  source 1..9: note = Severe acute respiratory syndrome coronavirus 2
NLIIKNLSK

SEQ ID NO: 7729 - protein, 9 aa, Severe acute respiratory syndrome-related coronavirus
  REGION 1..9: note = Table A: HLA-B*08:01H HLA-B*07:02H HLA-B*07:04M
  source 1..9: note = Severe acute respiratory syndrome coronavirus 2
IIKNLSKSL

SEQ ID NO: 7730 - protein, 9 aa, Severe acute respiratory syndrome-related coronavirus
  REGION 1..9: note = Table A: HLA-B*38:02H HLA-B*15:03M
  source 1..9: note = Severe acute respiratory syndrome coronavirus 2
SKSLTENKY

SEQ ID NO: 7731 - protein, 9 aa, Severe acute respiratory syndrome-related coronavirus
  REGION 1..9: note = Table A: HLA-C*04:03H
  source 1..9: note = Severe acute respiratory syndrome coronavirus 2
LTENKYSQL

SEQ ID NO: 7732 - protein, 9 aa, Severe acute respiratory syndrome-related coronavirus
  REGION 1..9: note = Table A: HLA-B*35:02H HLA-B*38:02H HLA-B*39:01H
  source 1..9: note = Severe acute respiratory syndrome coronavirus 2
SQLDEEQPM

SEQ ID NO: 7733 - protein, 10 aa, Severe acute respiratory syndrome-related coronavirus
  REGION 1..10: note = Table A: HLA-B*38:01H HLA-B*38:02H
  source 1..10: note = Severe acute respiratory syndrome coronavirus 2
FHLVDFQVTI

SEQ ID NO: 7734 - protein, 10 aa, Severe acute respiratory syndrome-related coronavirus
  REGION 1..10: note = Table A: HLA-A*02:05H HLA-A*02:08H HLA-A*02:02H HLA-A*02:03M HLA-B*38:02H
  source 1..10: note = Severe acute respiratory syndrome coronavirus 2
HLVDFQVTIA

SEQ ID NO: 7735 - protein, 10 aa, Severe acute respiratory syndrome-related coronavirus
  REGION 1..10: note = Table A: HLA-B*40:06H
  source 1..10: note = Severe acute respiratory syndrome coronavirus 2
AEILLIIMRT

SEQ ID NO: 7736 - protein, 10 aa, Severe acute respiratory syndrome-related coronavirus
  REGION 1..10: note = Table A: HLA-B*58:02H HLA-A*74:01H HLA-A*02:11H HLA-A*02:08H HLA-A*32:01H HLA-B*57:03M
  source 1..10: note = Severe acute respiratory syndrome coronavirus 2
RTFKVSIWNL

SEQ ID NO: 7737 - protein, 10 aa, Severe acute respiratory syndrome-related coronavirus
  REGION 1..10: note = Table A: HLA-A*02:11H HLA-A*68:02H HLA-A*02:04H HLA-A*02:02H HLA-A*02:03H
  source 1..10: note = Severe acute respiratory syndrome coronavirus 2
YIINLIIKNL

SEQ ID NO: 7738 - protein, 10 aa, Severe acute respiratory syndrome-related coronavirus
  REGION 1..10: note = Table A: HLA-A*30:02M
  source 1..10: note = Severe acute respiratory syndrome coronavirus 2
LSKSLTENKY

SEQ ID NO: 7739 - protein, 10 aa, Severe acute respiratory syndrome-related coronavirus
  REGION 1..10: note = Table A: HLA-C*01:02H HLA-A*02:02H HLA-A*02:03H HLA-B*38:02H
  source 1..10: note = Severe acute respiratory syndrome coronavirus 2
SLTENKYSQL

SEQ ID NO: 7740 - protein, 10 aa, Severe acute respiratory syndrome-related coronavirus
  REGION 1..10: note = Table A: HLA-B*38:02H
  source 1..10: note = Severe acute respiratory syndrome coronavirus 2
QLDEEQPMEI

SEQ ID NO: 7741 - protein, 11 aa, Severe acute respiratory syndrome-related coronavirus
  REGION 1..11: note = Table A: HLA-B*13:02H
  source 1..11: note = Severe acute respiratory syndrome coronavirus 2
FQVTIAEILLI

SEQ ID NO: 7742 - protein, 11 aa, Severe acute respiratory syndrome-related coronavirus
  REGION 1..11: note = Table A: HLA-B*44:02H HLA-B*44:03H
  source 1..11: note = Severe acute respiratory syndrome coronavirus 2
AEILLIIMRTF

SEQ ID NO: 7743 - protein, 11 aa, Severe acute respiratory syndrome-related coronavirus
  REGION 1..11: note = Table A: HLA-A*02:11H HLA-A*02:04H
  source 1..11: note = Severe acute respiratory syndrome coronavirus 2
SIWNLDYIINL

SEQ ID NO: 7744 - protein, 11 aa, Severe acute respiratory syndrome-related coronavirus
  REGION 1..11: note = Table A: HLA-B*58:02H HLA-B*57:03M
  source 1..11: note = Severe acute respiratory syndrome coronavirus 2
KSLTENKYSQL

SEQ ID NO: 7745 - protein, 11 aa, Severe acute respiratory syndrome-related coronavirus
  REGION 1..11: note = Table A: HLA-A*02:06H HLA-A*02:01H HLA-B*38:02H HLA-B*13:02H
  source 1..11: note = Severe acute respiratory syndrome coronavirus 2
SQLDEEQPMEI

SEQ ID NO: 7746 - protein, 8 aa, Severe acute respiratory syndrome-related coronavirus
  REGION 1..8: note = Table A: HLA-A*02:01H HLA-A*02:03H
  source 1..8: note = Severe acute respiratory syndrome coronavirus 2
ALITLATC

SEQ ID NO: 7747 - protein, 8 aa, Severe acute respiratory syndrome-related coronavirus
  REGION 1..8: note = Table A: HLA-C*06:02H
  source 1..8: note = Severe acute respiratory syndrome coronavirus 2
VRGTTVLL

SEQ ID NO: 7748 - protein, 8 aa, Severe acute respiratory syndrome-related coronavirus
  REGION 1..8: note = Table A: HLA-B*53:01H HLA-B*35:02H
  source 1..8: note = Severe acute respiratory syndrome coronavirus 2
HPLADNKF

SEQ ID NO: 7749 - protein, 8 aa, Severe acute respiratory syndrome-related coronavirus
  REGION 1..8: note = Table A: HLA-C*07:01H HLA-A*30:02H HLA-B*35:01H HLA-B*35:07H
  source 1..8: note = Severe acute respiratory syndrome coronavirus 2
PDGVKHVY

SEQ ID NO: 7750 - protein, 8 aa, Severe acute respiratory syndrome-related coronavirus
  REGION 1..8: note = Table A: HLA-A*34:01H
  source 1..8: note = Severe acute respiratory syndrome coronavirus 2
HVYQLRAR

SEQ ID NO: 7751 - protein, 8 aa, Severe acute respiratory syndrome-related coronavirus
  REGION 1..8: note = Table A: HLA-B*52:01M HLA-B*13:02H
  source 1..8: note = Severe acute respiratory syndrome coronavirus 2
YQLRARSV

SEQ ID NO: 7752 - protein, 8 aa, Severe acute respiratory syndrome-related coronavirus
  REGION 1..8: note = Table A: HLA-B*14:01H HLA-B*39:01H
  source 1..8: note = Severe acute respiratory syndrome coronavirus 2
ARSVSPKL

SEQ ID NO: 7753 - protein, 8 aa, Severe acute respiratory syndrome-related coronavirus
  REGION 1..8: note = Table A: HLA-B*58:02M HLA-B*57:03H
  source 1..8: note = Severe acute respiratory syndrome coronavirus 2
RSVSPKLF

SEQ ID NO: 7754 - protein, 8 aa, Severe acute respiratory syndrome-related coronavirus
  REGION 1..8: note = Table A: HLA-C*15:05H HLA-C*15:02H
  source 1..8: note = Severe acute respiratory syndrome coronavirus 2
SVSPKLFI

SEQ ID NO: 7755 - protein, 8 aa, Severe acute respiratory syndrome-related coronavirus
  REGION 1..8: note = Table A: HLA-B*18:01H
  source 1..8: note = Severe acute respiratory syndrome coronavirus 2
QEEVQELY

SEQ ID NO: 7756 - protein, 8 aa, Severe acute respiratory syndrome-related coronavirus
  REGION 1..8: note = Table A: HLA-B*18:01H HLA-B*07:05H
  source 1..8: note = Severe acute respiratory syndrome coronavirus 2
QELYSPIF

SEQ ID NO: 7757 - protein, 8 aa, Severe acute respiratory syndrome-related coronavirus
  REGION 1..8: note = Table A: HLA-A*24:07H
  source 1..8: note = Severe acute respiratory syndrome coronavirus 2
LYSPIFLI

SEQ ID NO: 7758 - protein, 8 aa, Severe acute respiratory syndrome-related coronavirus
  REGION 1..8: note = Table A: HLA-B*51:01H
  source 1..8: note = Severe acute respiratory syndrome coronavirus 2
YSPIFLIV

SEQ ID NO: 7759 - protein, 8 aa, Severe acute respiratory syndrome-related coronavirus
  REGION 1..8: note = Table A: HLA-B*56:01M HLA-B*55:02M HLA-B*55:01M HLA-B*39:06H HLA-B*54:01M
  source 1..8: note = Severe acute respiratory syndrome coronavirus 2
SPIFLIVA

SEQ ID NO: 7760 - protein, 8 aa, Severe acute respiratory syndrome-related coronavirus
  REGION 1..8: note = Table A: HLA-B*54:01H
  source 1..8: note = Severe acute respiratory syndrome coronavirus 2
PIFLIVAA

SEQ ID NO: 7761 - protein, 8 aa, Severe acute respiratory syndrome-related coronavirus
  REGION 1..8: note = Table A: HLA-C*03:02H HLA-C*15:05H HLA-C*17:01H HLA-C*08:01H
  source 1..8: note = Severe acute respiratory syndrome coronavirus 2
AAIVFITL

SEQ ID NO: 7762 - protein, 9 aa, Severe acute respiratory syndrome-related coronavirus
  REGION 1..9: note = Table A: HLA-B*58:02H HLA-C*15:02H HLA-B*57:03H
  source 1..9: note = Severe acute respiratory syndrome coronavirus 2
KIILFLALI

SEQ ID NO: 7763 - protein, 9 aa, Severe acute respiratory syndrome-related coronavirus
  REGION 1..9: note = Table A: HLA-A*02:11H HLA-A*02:04M HLA-A*02:01H HLA-A*02:02H
  source 1..9: note = Severe acute respiratory syndrome coronavirus 2
ILFLALITL

SEQ ID NO: 7764 - protein, 9 aa, Severe acute respiratory syndrome-related coronavirus
  REGION 1..9: note = Table A: HLA-B*58:01H HLA-A*29:02H
  source 1..9: note = Severe acute respiratory syndrome coronavirus 2
ITLATCELY

SEQ ID NO: 7765 - protein, 9 aa, Severe acute respiratory syndrome-related coronavirus
  REGION 1..9: note = Table A: HLA-A*02:11H HLA-A*68:02M HLA-A*02:01H HLA-A*02:02M HLA-B*38:02M HLA-B*13:02H
  source 1..9: note = Severe acute respiratory syndrome coronavirus 2
ELYHYQECV

SEQ ID NO: 7766 - protein, 9 aa, Severe acute respiratory syndrome-related coronavirus
  REGION 1..9: note = Table A: HLA-B*45:01H HLA-B*37:01H HLA-B*41:02H HLA-B*49:01M HLA-B*50:01H
  source 1..9: note = Severe acute respiratory syndrome coronavirus 2
QECVRGTTV

SEQ ID NO: 7767 - protein, 9 aa, Severe acute respiratory syndrome-related coronavirus
  REGION 1..9: note = Table A: HLA-A*34:01H
  source 1..9: note = Severe acute respiratory syndrome coronavirus 2
ECVRGTTVL

SEQ ID NO: 7768 - protein, 9 aa, Severe acute respiratory syndrome-related coronavirus
  REGION 1..9: note = Table A: HLA-A*68:02H
  source 1..9: note = Severe acute respiratory syndrome coronavirus 2
TTVLLKEPC

SEQ ID NO: 7769 - protein, 9 aa, Severe acute respiratory syndrome-related coronavirus
  REGION 1..9: note = Table A: HLA-A*03:01H HLA-B*46:01H HLA-A*26:01H HLA-A*26:03H HLA-C*15:05H HLA-C*12:02H HLA-A*34:02H HLA-C*08:03H HLA-B*38:02H HLA-B*15:01H HLA-B*15:02H HLA-B*07:05H HLA-A*66:01H
  source 1..9: note = Severe acute respiratory syndrome coronavirus 2
GTYEGNSPF

SEQ ID NO: 7770 - protein, 9 aa, Severe acute respiratory syndrome-related coronavirus
  REGION 1..9: note = Table A: HLA-B*45:01H HLA-B*40:06H HLA-B*50:01H
  source 1..9: note = Severe acute respiratory syndrome coronavirus 2
YEGNSPFHP

SEQ ID NO: 7771 - protein, 9 aa, Severe acute respiratory syndrome-related coronavirus
  REGION 1..9: note = Table A: HLA-A*68:02H
  source 1..9: note = Severe acute respiratory syndrome coronavirus 2
EGNSPFHPL

SEQ ID NO: 7772 - protein, 9 aa, Severe acute respiratory syndrome-related coronavirus
  REGION 1..9: note = Table A: HLA-B*38:01H HLA-B*38:02M
  source 1..9: note = Severe acute respiratory syndrome coronavirus 2
FHPLADNKF

SEQ ID NO: 7773 - protein, 9 aa, Severe acute respiratory syndrome-related coronavirus
  REGION 1..9: note = Table A: HLA-A*02:04H HLA-A*02:02H
  source 1..9: note = Severe acute respiratory syndrome coronavirus 2
PLADNKFAL

SEQ ID NO: 7774 - protein, 9 aa, Severe acute respiratory syndrome-related coronavirus
  REGION 1..9: note = Table A: HLA-B*45:01H HLA-B*50:01H
  source 1..9: note = Severe acute respiratory syndrome coronavirus 2
ADNKFALTC

SEQ ID NO: 7775 - protein, 9 aa, Severe acute respiratory syndrome-related coronavirus
  REGION 1..9: note = Table A: HLA-B*15:02H
  source 1..9: note = Severe acute respiratory syndrome coronavirus 2
ALTCFSTQF

SEQ ID NO: 7776 - protein, 9 aa, Severe acute respiratory syndrome-related coronavirus
  REGION 1..9: note = Table A: HLA-B*38:02H
  source 1..9: note = Severe acute respiratory syndrome coronavirus 2
TCFSTQFAF

SEQ ID NO: 7777 - protein, 9 aa, Severe acute respiratory syndrome-related coronavirus
  REGION 1..9: note = Table A: HLA-A*02:11H HLA-A*68:02H HLA-A*02:03H HLA-B*38:02H
  source 1..9: note = Severe acute respiratory syndrome coronavirus 2
FAFACPDGV

SEQ ID NO: 7778 - protein, 9 aa, Severe acute respiratory syndrome-related coronavirus
  REGION 1..9: note = Table A: HLA-A*36:01H HLA-B*53:01M HLA-A*30:02M HLA-B*35:01H HLA-B*35:02H HLA-B*35:08H HLA-B*35:07H HLA-B*35:12H HLA-B*38:02H HLA-B*15:02H HLA-B*07:05H
  source 1..9: note = Severe acute respiratory syndrome coronavirus 2
CPDGVKHVY

SEQ ID NO: 7779 - protein, 9 aa, Severe acute respiratory syndrome-related coronavirus
  REGION 1..9: note = Table A: HLA-A*74:01M HLA-A*33:01H HLA-A*33:03H HLA-A*34:01H HLA-A*31:01M HLA-A*66:01H
  source 1..9: note = Severe acute respiratory syndrome coronavirus 2
GVKHVYQLR

SEQ ID NO: 7780 - protein, 9 aa, Severe acute respiratory syndrome-related coronavirus
  REGION 1..9: note = Table A: HLA-C*14:02H HLA-C*14:03H
  source 1..9: note = Severe acute respiratory syndrome coronavirus 2
VYQLRARSV

SEQ ID NO: 7781 - protein, 9 aa, Severe acute respiratory syndrome-related coronavirus
  REGION 1..9: note = Table A: HLA-B*58:02M HLA-A*30:01H HLA-B*07:04M HLA-B*57:03M
  source 1..9: note = Severe acute respiratory syndrome coronavirus 2
RARSVSPKL

SEQ ID NO: 7782 - protein, 9 aa, Severe acute respiratory syndrome-related coronavirus
  REGION 1..9: note = Table A: HLA-B*27:05H
  source 1..9: note = Severe acute respiratory syndrome coronavirus 2
ARSVSPKLF

SEQ ID NO: 7783 - protein, 9 aa, Severe acute respiratory syndrome-related coronavirus
  REGION 1..9: note = Table A: HLA-B*58:01H HLA-B*58:02H HLA-C*15:02M HLA-B*57:03M HLA-B*13:02M
  source 1..9: note = Severe acute respiratory syndrome coronavirus 2
RSVSPKLFI

SEQ ID NO: 7784 - protein, 9 aa, Severe acute respiratory syndrome-related coronavirus
  REGION 1..9: note = Table A: HLA-A*11:303H HLA-A*74:01H HLA-A*03:01H HLA-A*03:02H HLA-A*11:01M HLA-A*11:02H HLA-A*36:01H HLA-A*33:01H HLA-A*33:03M HLA-A*30:02H HLA-A*68:01M HLA-A*68:02H HLA-A*02:04H HLA-A*34:01M HLA-A*34:02H
  REGION 1..9: note = CONT. FROM ABOVE: HLA-C*07:27H HLA-A*31:01M HLA-A*66:01H
  source 1..9: note = Severe acute respiratory syndrome coronavirus 2
SVSPKLFIR

SEQ ID NO: 7785 - protein, 9 aa, Severe acute respiratory syndrome-related coronavirus
  REGION 1..9: note = Table A: HLA-A*02:11M HLA-A*02:02M HLA-B*13:02H
  source 1..9: note = Severe acute respiratory syndrome coronavirus 2
KLFIRQEEV

SEQ ID NO: 7786 - protein, 9 aa, Severe acute respiratory syndrome-related coronavirus
  REGION 1..9: note = Table A: HLA-C*06:02H HLA-C*07:02H HLA-B*14:02H HLA-B*14:01M HLA-B*38:01H HLA-B*38:02M HLA-B*39:01M HLA-C*07:04H
  source 1..9: note = Severe acute respiratory syndrome coronavirus 2
IRQEEVQEL

SEQ ID NO: 7787 - protein, 9 aa, Severe acute respiratory syndrome-related coronavirus
  REGION 1..9: note = Table A: HLA-A*36:01H HLA-A*30:02H HLA-B*15:01M HLA-B*15:03M HLA-B*13:01H
  source 1..9: note = Severe acute respiratory syndrome coronavirus 2
RQEEVQELY

SEQ ID NO: 7788 - protein, 9 aa, Severe acute respiratory syndrome-related coronavirus
  REGION 1..9: note = Table A: HLA-B*45:01H
  source 1..9: note = Severe acute respiratory syndrome coronavirus 2
EEVQELYSP

SEQ ID NO: 7789 - protein, 9 aa, Severe acute respiratory syndrome-related coronavirus
  REGION 1..9: note = Table A: HLA-A*26:03H HLA-A*68:02H
  source 1..9: note = Severe acute respiratory syndrome coronavirus 2
EVQELYSPI

SEQ ID NO: 7790 - protein, 9 aa, Severe acute respiratory syndrome-related coronavirus
  REGION 1..9: note = Table A: HLA-B*40:01H
  source 1..9: note = Severe acute respiratory syndrome coronavirus 2
QELYSPIFL

SEQ ID NO: 7791 - protein, 9 aa, Severe acute respiratory syndrome-related coronavirus
  REGION 1..9: note = Table A: HLA-A*68:02H
  source 1..9: note = Severe acute respiratory syndrome coronavirus 2
ELYSPIFLI

SEQ ID NO: 7792 - protein, 9 aa, Severe acute respiratory syndrome-related coronavirus
  REGION 1..9: note = Table A: HLA-C*06:02H HLA-A*29:02H HLA-A*68:02H HLA-C*15:02H HLA-A*24:02H HLA-A*24:07H HLA-C*08:01H
  source 1..9: note = Severe acute respiratory syndrome coronavirus 2
LYSPIFLIV

SEQ ID NO: 7793 - protein, 9 aa, Severe acute respiratory syndrome-related coronavirus
  REGION 1..9: note = Table A: HLA-B*56:01H HLA-B*55:02H HLA-C*15:05H HLA-B*55:01H HLA-B*39:06M HLA-B*54:01H HLA-B*07:05H
  source 1..9: note = Severe acute respiratory syndrome coronavirus 2
SPIFLIVAA

SEQ ID NO: 7794 - protein, 9 aa, Severe acute respiratory syndrome-related coronavirus
  REGION 1..9: note = Table A: HLA-A*68:02H
  source 1..9: note = Severe acute respiratory syndrome coronavirus 2
IVAAIVFIT

SEQ ID NO: 7795 - protein, 9 aa, Severe acute respiratory syndrome-related coronavirus
  REGION 1..9: note = Table A: HLA-B*58:01H HLA-B*58:02H HLA-A*11:303H HLA-C*16:01H HLA-C*16:04M HLA-B*57:01H HLA-C*03:03M HLA-C*12:05M HLA-C*03:02H HLA-C*03:04M HLA-A*68:02H HLA-B*35:03H HLA-C*15:05M HLA-C*12:02H HLA-C*12:03H
  REGION 1..9: note = CONT. FROM ABOVE: HLA-C*15:02H HLA-A*02:05H HLA-A*02:06H HLA- B*35:01H HLA-C*17:01M HLA-C*08:01M HLA-B*38:02H HLA-B*57:03M HLA-C*07:04H
  source 1..9: note = Severe acute respiratory syndrome coronavirus 2
VAAIVFITL

SEQ ID NO: 7796 - protein, 9 aa, Severe acute respiratory syndrome-related coronavirus
  REGION 1..9: note = Table A: HLA-C*14:03H HLA-A*24:02H HLA-A*24:07M HLA-A*23:01H
  source 1..9: note = Severe acute respiratory syndrome coronavirus 2
VFITLCFTL

SEQ ID NO: 7797 - protein, 9 aa, Severe acute respiratory syndrome-related coronavirus
  REGION 1..9: note = Table A: HLA-A*34:02H
  source 1..9: note = Severe acute respiratory syndrome coronavirus 2
FITLCFTLK

SEQ ID NO: 7798 - protein, 9 aa, Severe acute respiratory syndrome-related coronavirus
  REGION 1..9: note = Table A: HLA-A*34:02H
  source 1..9: note = Severe acute respiratory syndrome coronavirus 2
ITLCFTLKR

SEQ ID NO: 7799 - protein, 10 aa, Severe acute respiratory syndrome-related coronavirus
  REGION 1..10: note = Table A: HLA-A*02:04H
  source 1..10: note = Severe acute respiratory syndrome coronavirus 2
IILFLALITL

SEQ ID NO: 7800 - protein, 10 aa, Severe acute respiratory syndrome-related coronavirus
  REGION 1..10: note = Table A: HLA-A*02:03H
  source 1..10: note = Severe acute respiratory syndrome coronavirus 2
FLALITLATC

SEQ ID NO: 7801 - protein, 10 aa, Severe acute respiratory syndrome-related coronavirus
  REGION 1..10: note = Table A: HLA-C*01:02H HLA-A*02:02H HLA-A*02:03H HLA-B*38:02H
  source 1..10: note = Severe acute respiratory syndrome coronavirus 2
ALITLATCEL

SEQ ID NO: 7802 - protein, 10 aa, Severe acute respiratory syndrome-related coronavirus
  REGION 1..10: note = Table A: HLA-A*33:03H HLA-A*34:01H
  source 1..10: note = Severe acute respiratory syndrome coronavirus 2
ELYHYQECVR

SEQ ID NO: 7803 - protein, 10 aa, Severe acute respiratory syndrome-related coronavirus
  REGION 1..10: note = Table A: HLA-A*03:01H
  source 1..10: note = Severe acute respiratory syndrome coronavirus 2
CVRGTTVLLK

SEQ ID NO: 7804 - protein, 10 aa, Severe acute respiratory syndrome-related coronavirus
  REGION 1..10: note = Table A: HLA-A*11:303M HLA-A*74:01H HLA-A*03:01H HLA-A*03:02M HLA-A*11:01H HLA-A*11:02M HLA-A*36:01H HLA-A*30:02H HLA-A*34:02M HLA-C*07:27M HLA-C*08:03H
  source 1..10: note = Severe acute respiratory syndrome coronavirus 2
GTYEGNSPFH

SEQ ID NO: 7805 - protein, 10 aa, Severe acute respiratory syndrome-related coronavirus
  REGION 1..10: note = Table A: HLA-B*40:01H HLA-B*40:02H
  source 1..10: note = Severe acute respiratory syndrome coronavirus 2
YEGNSPFHPL

SEQ ID NO: 7806 - protein, 10 aa, Severe acute respiratory syndrome-related coronavirus
  REGION 1..10: note = Table A: HLA-A*24:07H HLA-A*23:01H
  source 1..10: note = Severe acute respiratory syndrome coronavirus 2
PFHPLADNKF

SEQ ID NO: 7807 - protein, 10 aa, Severe acute respiratory syndrome-related coronavirus
  REGION 1..10: note = Table A: HLA-B*42:01H HLA-B*53:01H HLA-B*35:03M HLA-C*15:05H HLA-B*35:01H HLA-B*35:02H HLA-B*35:07M HLA-B*35:12H HLA-B*07:04H
  source 1..10: note = Severe acute respiratory syndrome coronavirus 2
HPLADNKFAL

SEQ ID NO: 7808 - protein, 10 aa, Severe acute respiratory syndrome-related coronavirus
  REGION 1..10: note = Table A: HLA-A*02:06H
  source 1..10: note = Severe acute respiratory syndrome coronavirus 2
FACPDGVKHV

SEQ ID NO: 7809 - protein, 10 aa, Severe acute respiratory syndrome-related coronavirus
  REGION 1..10: note = Table A: HLA-B*46:01H HLA-A*30:02M HLA-C*12:02H HLA-B*15:01H HLA-B*15:02H
  source 1..10: note = Severe acute respiratory syndrome coronavirus 2
ACPDGVKHVY

SEQ ID NO: 7810 - protein, 10 aa, Severe acute respiratory syndrome-related coronavirus
  REGION 1..10: note = Table A: HLA-B*07:04M HLA-B*57:03H
  source 1..10: note = Severe acute respiratory syndrome coronavirus 2
RARSVSPKLF

SEQ ID NO: 7811 - protein, 10 aa, Severe acute respiratory syndrome-related coronavirus
  REGION 1..10: note = Table A: HLA-A*74:01M
  source 1..10: note = Severe acute respiratory syndrome coronavirus 2
RSVSPKLFIR

SEQ ID NO: 7812 - protein, 10 aa, Severe acute respiratory syndrome-related coronavirus
  REGION 1..10: note = Table A: HLA-B*38:02H
  source 1..10: note = Severe acute respiratory syndrome coronavirus 2
FIRQEEVQEL

SEQ ID NO: 7813 - protein, 10 aa, Severe acute respiratory syndrome-related coronavirus
  REGION 1..10: note = Table A: HLA-B*27:02H
  source 1..10: note = Severe acute respiratory syndrome coronavirus 2
IRQEEVQELY

SEQ ID NO: 7814 - protein, 10 aa, Severe acute respiratory syndrome-related coronavirus
  REGION 1..10: note = Table A: HLA-A*25:01H
  source 1..10: note = Severe acute respiratory syndrome coronavirus 2
EVQELYSPIF

SEQ ID NO: 7815 - protein, 10 aa, Severe acute respiratory syndrome-related coronavirus
  REGION 1..10: note = Table A: HLA-C*15:05H
  source 1..10: note = Severe acute respiratory syndrome coronavirus 2
SPIFLIVAAI

SEQ ID NO: 7816 - protein, 10 aa, Severe acute respiratory syndrome-related coronavirus
  REGION 1..10: note = Table A: HLA-A*68:02M HLA-C*15:05H
  source 1..10: note = Severe acute respiratory syndrome coronavirus 2
IVAAIVFITL

SEQ ID NO: 7817 - protein, 11 aa, Severe acute respiratory syndrome-related coronavirus
  REGION 1..11: note = Table A: HLA-A*34:02H
  source 1..11: note = Severe acute respiratory syndrome coronavirus 2
ECVRGTTVLLK

SEQ ID NO: 7818 - protein, 11 aa, Severe acute respiratory syndrome-related coronavirus
  REGION 1..11: note = Table A: HLA-A*30:02H HLA-B*15:01H
  source 1..11: note = Severe acute respiratory syndrome coronavirus 2
LLKEPCSSGTY

SEQ ID NO: 7819 - protein, 11 aa, Severe acute respiratory syndrome-related coronavirus
  REGION 1..11: note = Table A: HLA-C*08:01H
  source 1..11: note = Severe acute respiratory syndrome coronavirus 2
TYEGNSPFHPL

SEQ ID NO: 7820 - protein, 11 aa, Severe acute respiratory syndrome-related coronavirus
  REGION 1..11: note = Table A: HLA-B*42:01H HLA-B*56:01H HLA-B*53:01H HLA-B*55:02H HLA-B*35:03M HLA-C*15:05M HLA-B*35:01M HLA-B*35:02H HLA-B*35:08H HLA-B*35:07H HLA-B*35:12H HLA-B*38:02H HLA-B*54:01H HLA-B*07:02H HLA-B*07:04H HLA-B*07:05M
  REGION 1..11: note = CONT. FROM ABOVE: HLA-B*57:03H
  source 1..11: note = Severe acute respiratory syndrome coronavirus 2
SPFHPLADNKF

SEQ ID NO: 7821 - protein, 11 aa, Severe acute respiratory syndrome-related coronavirus
  REGION 1..11: note = Table A: HLA-B*13:02H
  source 1..11: note = Severe acute respiratory syndrome coronavirus 2
TQFAFACPDGV

SEQ ID NO: 7822 - protein, 11 aa, Severe acute respiratory syndrome-related coronavirus
  REGION 1..11: note = Table A: HLA-B*58:01H HLA-B*53:01H HLA-A*30:02H HLA-B*35:01M HLA-B*35:08H HLA-B*35:07H
  source 1..11: note = Severe acute respiratory syndrome coronavirus 2
FACPDGVKHVY

SEQ ID NO: 7823 - protein, 11 aa, Severe acute respiratory syndrome-related coronavirus
  REGION 1..11: note = Table A: HLA-B*42:01H HLA-C*15:05H HLA-B*07:02H HLA-B*07:04H
  source 1..11: note = Severe acute respiratory syndrome coronavirus 2
CPDGVKHVYQL

SEQ ID NO: 7824 - protein, 11 aa, Severe acute respiratory syndrome-related coronavirus
  REGION 1..11: note = Table A: HLA-B*58:02H
  source 1..11: note = Severe acute respiratory syndrome coronavirus 2
RARSVSPKLFI

SEQ ID NO: 7825 - protein, 11 aa, Severe acute respiratory syndrome-related coronavirus
  REGION 1..11: note = Table A: HLA-B*42:01H HLA-B*08:01H HLA-B*55:02H HLA-B*07:04H
  source 1..11: note = Severe acute respiratory syndrome coronavirus 2
SPKLFIRQEEV

SEQ ID NO: 7826 - protein, 11 aa, Severe acute respiratory syndrome-related coronavirus
  REGION 1..11: note = Table A: HLA-B*38:02H
  source 1..11: note = Severe acute respiratory syndrome coronavirus 2
FIRQEEVQELY

SEQ ID NO: 7827 - protein, 11 aa, Severe acute respiratory syndrome-related coronavirus
  REGION 1..11: note = Table A: HLA-A*68:02H
  source 1..11: note = Severe acute respiratory syndrome coronavirus 2
EVQELYSPIFL

SEQ ID NO: 7828 - protein, 8 aa, Severe acute respiratory syndrome-related coronavirus
  REGION 1..8: note = Table A: HLA-B*07:05H
  source 1..8: note = Severe acute respiratory syndrome coronavirus 2
IELSLIDF

SEQ ID NO: 7829 - protein, 8 aa, Severe acute respiratory syndrome-related coronavirus
  REGION 1..8: note = Table A: HLA-C*14:03H
  source 1..8: note = Severe acute respiratory syndrome coronavirus 2
IFWFSLEL

SEQ ID NO: 7830 - protein, 8 aa, Severe acute respiratory syndrome-related coronavirus
  REGION 1..8: note = Table A: HLA-B*39:06M
  source 1..8: note = Severe acute respiratory syndrome coronavirus 2
DHNETCHA

SEQ ID NO: 7831 - protein, 9 aa, Severe acute respiratory syndrome-related coronavirus
  REGION 1..9: note = Table A: HLA-A*36:01H HLA-B*44:03H HLA-B*18:01H HLA-A*30:02H HLA-B*07:05H
  source 1..9: note = Severe acute respiratory syndrome coronavirus 2
IELSLIDFY

SEQ ID NO: 7832 - protein, 9 aa, Severe acute respiratory syndrome-related coronavirus
  REGION 1..9: note = Table A: HLA-A*68:02M HLA-A*02:04H HLA-A*02:02H
  source 1..9: note = Severe acute respiratory syndrome coronavirus 2
ELSLIDFYL

SEQ ID NO: 7833 - protein, 9 aa, Severe acute respiratory syndrome-related coronavirus
  REGION 1..9: note = Table A: HLA-A*26:01H HLA-A*29:02H HLA-C*03:02H HLA-A*02:04H HLA-B*38:02H HLA-B*15:02H
  source 1..9: note = Severe acute respiratory syndrome coronavirus 2
SLIDFYLCF

SEQ ID NO: 7834 - protein, 9 aa, Severe acute respiratory syndrome-related coronavirus
  REGION 1..9: note = Table A: HLA-C*04:03H
  source 1..9: note = Severe acute respiratory syndrome coronavirus 2
LIDFYLCFL

SEQ ID NO: 7835 - protein, 9 aa, Severe acute respiratory syndrome-related coronavirus
  REGION 1..9: note = Table A: HLA-A*02:04H
  source 1..9: note = Severe acute respiratory syndrome coronavirus 2
FLAFLLFLV

SEQ ID NO: 7836 - protein, 9 aa, Severe acute respiratory syndrome-related coronavirus
  REGION 1..9: note = Table A: HLA-A*02:11H HLA-A*02:04H
  source 1..9: note = Severe acute respiratory syndrome coronavirus 2
LLFLVLIML

SEQ ID NO: 7837 - protein, 9 aa, Severe acute respiratory syndrome-related coronavirus
  REGION 1..9: note = Table A: HLA-C*15:02M HLA-C*08:01H
  source 1..9: note = Severe acute respiratory syndrome coronavirus 2
IIFWFSLEL

SEQ ID NO: 7838 - protein, 9 aa, Severe acute respiratory syndrome-related coronavirus
  REGION 1..9: note = Table A: HLA-B*38:02H
  source 1..9: note = Severe acute respiratory syndrome coronavirus 2
ELQDHNETC

SEQ ID NO: 7839 - protein, 9 aa, Severe acute respiratory syndrome-related coronavirus
  REGION 1..9: note = Table A: HLA-B*38:02H
  source 1..9: note = Severe acute respiratory syndrome coronavirus 2
QDHNETCHA

SEQ ID NO: 7840 - protein, 10 aa, Severe acute respiratory syndrome-related coronavirus
  REGION 1..10: note = Table A: HLA-A*36:01H
  source 1..10: note = Severe acute respiratory syndrome coronavirus 2
MIELSLIDFY

SEQ ID NO: 7841 - protein, 10 aa, Severe acute respiratory syndrome-related coronavirus
  REGION 1..10: note = Table A: HLA-A*02:11H HLA-A*02:04H HLA-A*02:01H HLA-A*02:02M HLA-A*02:03H
  source 1..10: note = Severe acute respiratory syndrome coronavirus 2
SLIDFYLCFL

SEQ ID NO: 7842 - protein, 10 aa, Severe acute respiratory syndrome-related coronavirus
  REGION 1..10: note = Table A: HLA-B*38:02H
  source 1..10: note = Severe acute respiratory syndrome coronavirus 2
LQDHNETCHA

SEQ ID NO: 7843 - protein, 8 aa, Severe acute respiratory syndrome-related coronavirus
  REGION 1..8: note = Table A: HLA-A*02:11M HLA-A*68:02H HLA-A*02:04H HLA-A*02:05H HLA-A*02:06H HLA-A*02:07H HLA-B*14:01H HLA-A*02:01H HLA-A*02:02M HLA-A*02:03H HLA-B*38:02M HLA-B*13:02H HLA-B*49:01H
  source 1..8: note = Severe acute respiratory syndrome coronavirus 2
FLGIITTV

SEQ ID NO: 7844 - protein, 8 aa, Severe acute respiratory syndrome-related coronavirus
  REGION 1..8: note = Table A: HLA-B*39:06H
  source 1..8: note = Severe acute respiratory syndrome coronavirus 2
LGIITTVA

SEQ ID NO: 7845 - protein, 8 aa, Severe acute respiratory syndrome-related coronavirus
  REGION 1..8: note = Table A: HLA-B*39:06H
  source 1..8: note = Severe acute respiratory syndrome coronavirus 2
GIITTVAA

SEQ ID NO: 7846 - protein, 8 aa, Severe acute respiratory syndrome-related coronavirus
  REGION 1..8: note = Table A: HLA-B*46:01H HLA-C*15:05H HLA-B*15:01H HLA-B*07:05H
  source 1..8: note = Severe acute respiratory syndrome coronavirus 2
IITTVAAF

SEQ ID NO: 7847 - protein, 8 aa, Severe acute respiratory syndrome-related coronavirus
  REGION 1..8: note = Table A: HLA-C*16:01H HLA-C*12:03H
  source 1..8: note = Severe acute respiratory syndrome coronavirus 2
VAAFHQEC

SEQ ID NO: 7848 - protein, 8 aa, Severe acute respiratory syndrome-related coronavirus
  REGION 1..8: note = Table A: HLA-B*52:01M HLA-B*38:02H HLA-B*39:06M HLA-B*39:01H HLA-B*13:02M
  source 1..8: note = Severe acute respiratory syndrome coronavirus 2
TQHQPYVV

SEQ ID NO: 7849 - protein, 8 aa, Severe acute respiratory syndrome-related coronavirus
  REGION 1..8: note = Table A: HLA-B*35:01H
  source 1..8: note = Severe acute respiratory syndrome coronavirus 2
DPCPIHFY

SEQ ID NO: 7850 - protein, 8 aa, Severe acute respiratory syndrome-related coronavirus
  REGION 1..8: note = Table A: HLA-A*33:03H
  source 1..8: note = Severe acute respiratory syndrome coronavirus 2
WYIRVGAR

SEQ ID NO: 7851 - protein, 8 aa, Severe acute respiratory syndrome-related coronavirus
  REGION 1..8: note = Table A: HLA-B*58:01H HLA-B*58:02H HLA-C*16:01H HLA-C*03:02H HLA-C*03:04H HLA-C*15:05M HLA-C*15:02H HLA-C*17:01H HLA-C*08:01H HLA-B*57:03M HLA-C*07:04H
  source 1..8: note = Severe acute respiratory syndrome coronavirus 2
KSAPLIEL

SEQ ID NO: 7852 - protein, 8 aa, Severe acute respiratory syndrome-related coronavirus
  REGION 1..8: note = Table A: HLA-C*15:05H
  source 1..8: note = Severe acute respiratory syndrome coronavirus 2
SPIQYIDI

SEQ ID NO: 7853 - protein, 8 aa, Severe acute respiratory syndrome-related coronavirus
  REGION 1..8: note = Table A: HLA-A*30:02H HLA-B*39:01H
  source 1..8: note = Severe acute respiratory syndrome coronavirus 2
QYIDIGNY

SEQ ID NO: 7854 - protein, 8 aa, Severe acute respiratory syndrome-related coronavirus
  REGION 1..8: note = Table A: HLA-B*38:02H HLA-B*40:02H HLA-B*41:02H
  source 1..8: note = Severe acute respiratory syndrome coronavirus 2
IDIGNYTV

SEQ ID NO: 7855 - protein, 8 aa, Severe acute respiratory syndrome-related coronavirus
  REGION 1..8: note = Table A: HLA-B*58:02H
  source 1..8: note = Severe acute respiratory syndrome coronavirus 2
VSCLPFTI

SEQ ID NO: 7856 - protein, 8 aa, Severe acute respiratory syndrome-related coronavirus
  REGION 1..8: note = Table A: HLA-A*74:01H
  source 1..8: note = Severe acute respiratory syndrome coronavirus 2
KLGSLVVR

SEQ ID NO: 7857 - protein, 8 aa, Severe acute respiratory syndrome-related coronavirus
  REGION 1..8: note = Table A: HLA-C*14:02H HLA-C*14:03H HLA-A*36:01H HLA-A*29:02H
  source 1..8: note = Severe acute respiratory syndrome coronavirus 2
FYEDFLEY

SEQ ID NO: 7858 - protein, 8 aa, Severe acute respiratory syndrome-related coronavirus
  REGION 1..8: note = Table A: HLA-B*49:01H
  source 1..8: note = Severe acute respiratory syndrome coronavirus 2
LEYHDVRV

SEQ ID NO: 7859 - protein, 8 aa, Severe acute respiratory syndrome-related coronavirus
  REGION 1..8: note = Table A: HLA-B*38:01H HLA-B*38:02M HLA-B*39:01H HLA-B*15:10M
  source 1..8: note = Severe acute respiratory syndrome coronavirus 2
YHDVRVVL

SEQ ID NO: 7860 - protein, 8 aa, Severe acute respiratory syndrome-related coronavirus
  REGION 1..8: note = Table A: HLA-B*15:02M
  source 1..8: note = Severe acute respiratory syndrome coronavirus 2
DVRVVLDF

SEQ ID NO: 7861 - protein, 8 aa, Severe acute respiratory syndrome-related coronavirus
  REGION 1..8: note = Table A: HLA-C*06:02H HLA-B*38:02H
  source 1..8: note = Severe acute respiratory syndrome coronavirus 2
VRVVLDFI

SEQ ID NO: 7862 - protein, 9 aa, Severe acute respiratory syndrome-related coronavirus
  REGION 1..9: note = Table A: HLA-C*14:02H HLA-C*14:03M HLA-A*29:02H HLA-C*04:01H HLA-C*04:03H HLA-A*02:11M HLA-C*15:05H HLA-A*02:04H HLA-A*02:07H HLA-A*02:01H HLA-A*02:03H HLA-A*24:02H HLA-B*51:01H HLA-A*24:07H HLA-B*52:01H HLA-C*08:01H
  REGION 1..9: note = CONT. FROM ABOVE: HLA-A*23:01M HLA-B*38:02M HLA-B*07:05H HLA- B*13:02H HLA-B*49:01H
  source 1..9: note = Severe acute respiratory syndrome coronavirus 2
VFLGIITTV

SEQ ID NO: 7863 - protein, 9 aa, Severe acute respiratory syndrome-related coronavirus
  REGION 1..9: note = Table A: HLA-A*02:02H HLA-A*02:03H
  source 1..9: note = Severe acute respiratory syndrome coronavirus 2
FLGIITTVA

SEQ ID NO: 7864 - protein, 9 aa, Severe acute respiratory syndrome-related coronavirus
  REGION 1..9: note = Table A: HLA-B*54:01H
  source 1..9: note = Severe acute respiratory syndrome coronavirus 2
LGIITTVAA

SEQ ID NO: 7865 - protein, 9 aa, Severe acute respiratory syndrome-related coronavirus
  REGION 1..9: note = Table A: HLA-A*11:303M HLA-A*25:01M HLA-B*46:01H HLA-A*26:01M HLA-A*26:02M HLA-A*26:03M HLA-C*03:02H HLA-C*15:05H HLA-C*12:02H HLA-A*02:03H HLA-B*35:01H HLA-B*38:02M HLA-B*15:01H HLA-B*15:02M HLA-B*15:03H
  REGION 1..9: note = CONT. FROM ABOVE: HLA-B*07:05H
  source 1..9: note = Severe acute respiratory syndrome coronavirus 2
GIITTVAAF

SEQ ID NO: 7866 - protein, 9 aa, Severe acute respiratory syndrome-related coronavirus
  REGION 1..9: note = Table A: HLA-A*68:02M HLA-A*02:05H HLA-A*02:08H HLA-B*38:02H
  source 1..9: note = Severe acute respiratory syndrome coronavirus 2
TVAAFHQEC

SEQ ID NO: 7867 - protein, 9 aa, Severe acute respiratory syndrome-related coronavirus
  REGION 1..9: note = Table A: HLA-B*48:01H HLA-A*11:303M HLA-B*46:01H HLA-C*03:03H HLA-C*12:05H HLA-C*03:02H HLA-C*03:04M HLA-B*35:03H HLA-C*15:05H HLA-C*12:02H HLA-C*12:03H HLA-A*02:05H HLA-A*02:02H HLA-C*07:27H HLA-B*35:02H
  REGION 1..9: note = CONT. FROM ABOVE: HLA-C*17:01H HLA-C*08:01M HLA-B*35:12H HLA- B*38:02M HLA-B*39:01H
  source 1..9: note = Severe acute respiratory syndrome coronavirus 2
AAFHQECSL

SEQ ID NO: 7868 - protein, 9 aa, Severe acute respiratory syndrome-related coronavirus
  REGION 1..9: note = Table A: HLA-A*02:11H HLA-A*68:02H
  source 1..9: note = Severe acute respiratory syndrome coronavirus 2
CTQHQPYVV

SEQ ID NO: 7869 - protein, 9 aa, Severe acute respiratory syndrome-related coronavirus
  REGION 1..9: note = Table A: HLA-B*35:02H HLA-B*35:12H
  source 1..9: note = Severe acute respiratory syndrome coronavirus 2
QPYVVDDPC

SEQ ID NO: 7870 - protein, 9 aa, Severe acute respiratory syndrome-related coronavirus
  REGION 1..9: note = Table A: HLA-A*68:02H HLA-A*02:06H HLA-B*35:02H HLA-C*08:01H HLA-B*35:12H HLA-B*38:02H
  source 1..9: note = Severe acute respiratory syndrome coronavirus 2
YVVDDPCPI

SEQ ID NO: 7871 - protein, 9 aa, Severe acute respiratory syndrome-related coronavirus
  REGION 1..9: note = Table A: HLA-C*04:03M
  source 1..9: note = Severe acute respiratory syndrome coronavirus 2
VDDPCPIHF

SEQ ID NO: 7872 - protein, 9 aa, Severe acute respiratory syndrome-related coronavirus
  REGION 1..9: note = Table A: HLA-B*53:01M
  source 1..9: note = Severe acute respiratory syndrome coronavirus 2
CPIHFYSKW

SEQ ID NO: 7873 - protein, 9 aa, Severe acute respiratory syndrome-related coronavirus
  REGION 1..9: note = Table A: HLA-B*38:02M
  source 1..9: note = Severe acute respiratory syndrome coronavirus 2
IHFYSKWYI

SEQ ID NO: 7874 - protein, 9 aa, Severe acute respiratory syndrome-related coronavirus
  REGION 1..9: note = Table A: HLA-B*39:06H
  source 1..9: note = Severe acute respiratory syndrome coronavirus 2
SKWYIRVGA

SEQ ID NO: 7875 - protein, 9 aa, Severe acute respiratory syndrome-related coronavirus
  REGION 1..9: note = Table A: HLA-B*57:03H
  source 1..9: note = Severe acute respiratory syndrome coronavirus 2
GARKSAPLI

SEQ ID NO: 7876 - protein, 9 aa, Severe acute respiratory syndrome-related coronavirus
  REGION 1..9: note = Table A: HLA-B*48:01M HLA-B*15:03M
  source 1..9: note = Severe acute respiratory syndrome coronavirus 2
RKSAPLIEL

SEQ ID NO: 7877 - protein, 9 aa, Severe acute respiratory syndrome-related coronavirus
  REGION 1..9: note = Table A: HLA-A*68:02H HLA-A*02:05H HLA-A*02:08M HLA-B*57:03H
  source 1..9: note = Severe acute respiratory syndrome coronavirus 2
KSAPLIELC

SEQ ID NO: 7878 - protein, 9 aa, Severe acute respiratory syndrome-related coronavirus
  REGION 1..9: note = Table A: HLA-C*15:05H HLA-B*51:01H HLA-B*13:02H
  source 1..9: note = Severe acute respiratory syndrome coronavirus 2
SAPLIELCV

SEQ ID NO: 7879 - protein, 9 aa, Severe acute respiratory syndrome-related coronavirus
  REGION 1..9: note = Table A: HLA-B*58:02M HLA-B*57:01H HLA-A*30:01H HLA-B*57:03H HLA-B*13:02H
  source 1..9: note = Severe acute respiratory syndrome coronavirus 2
GSKSPIQYI

SEQ ID NO: 7880 - protein, 9 aa, Severe acute respiratory syndrome-related coronavirus
  REGION 1..9: note = Table A: HLA-B*57:03H
  source 1..9: note = Severe acute respiratory syndrome coronavirus 2
KSPIQYIDI

SEQ ID NO: 7881 - protein, 9 aa, Severe acute respiratory syndrome-related coronavirus
  REGION 1..9: note = Table A: HLA-A*30:02M HLA-B*38:02H HLA-B*15:01M HLA-B*15:02H HLA-B*15:03M
  source 1..9: note = Severe acute respiratory syndrome coronavirus 2
IQYIDIGNY

SEQ ID NO: 7882 - protein, 9 aa, Severe acute respiratory syndrome-related coronavirus
  REGION 1..9: note = Table A: HLA-C*04:03M HLA-A*02:11M HLA-A*02:04H HLA-A*02:05H HLA-A*02:06M HLA-A*02:07M HLA-A*02:01M HLA-A*02:02H HLA-B*35:02H HLA-C*08:01H HLA-C*08:02M HLA-B*38:02H HLA-C*05:01H
  source 1..9: note = Severe acute respiratory syndrome coronavirus 2
YIDIGNYTV

SEQ ID NO: 7883 - protein, 9 aa, Severe acute respiratory syndrome-related coronavirus
  REGION 1..9: note = Table A: HLA-A*68:02H HLA-B*13:02H
  source 1..9: note = Severe acute respiratory syndrome coronavirus 2
TVSCLPFTI

SEQ ID NO: 7884 - protein, 9 aa, Severe acute respiratory syndrome-related coronavirus
  REGION 1..9: note = Table A: HLA-A*34:02H HLA-A*66:01H
  source 1..9: note = Severe acute respiratory syndrome coronavirus 2
FTINCQEPK

SEQ ID NO: 7885 - protein, 9 aa, Severe acute respiratory syndrome-related coronavirus
  REGION 1..9: note = Table A: HLA-B*49:01M
  source 1..9: note = Severe acute respiratory syndrome coronavirus 2
QEPKLGSLV

SEQ ID NO: 7886 - protein, 9 aa, Severe acute respiratory syndrome-related coronavirus
  REGION 1..9: note = Table A: HLA-B*55:01H HLA-B*51:01H
  source 1..9: note = Severe acute respiratory syndrome coronavirus 2
EPKLGSLVV

SEQ ID NO: 7887 - protein, 9 aa, Severe acute respiratory syndrome-related coronavirus
  REGION 1..9: note = Table A: HLA-A*02:11H HLA-A*02:02H
  source 1..9: note = Severe acute respiratory syndrome coronavirus 2
KLGSLVVRC

SEQ ID NO: 7888 - protein, 9 aa, Severe acute respiratory syndrome-related coronavirus
  REGION 1..9: note = Table A: HLA-B*57:03H
  source 1..9: note = Severe acute respiratory syndrome coronavirus 2
GSLVVRCSF

SEQ ID NO: 7889 - protein, 9 aa, Severe acute respiratory syndrome-related coronavirus
  REGION 1..9: note = Table A: HLA-C*14:02H HLA-C*14:03H HLA-A*36:01H HLA-B*46:01H HLA-A*29:01H HLA-A*29:02H HLA-C*03:02M HLA-A*30:02H HLA-C*15:05H HLA-A*34:02H HLA-B*35:01H HLA-B*35:07H HLA-B*38:02M HLA-B*15:02M HLA-B*15:03H HLA-B*07:05H
  source 1..9: note = Severe acute respiratory syndrome coronavirus 2
SFYEDFLEY

SEQ ID NO: 7890 - protein, 9 aa, Severe acute respiratory syndrome-related coronavirus
  REGION 1..9: note = Table A: HLA-A*68:02H
  source 1..9: note = Severe acute respiratory syndrome coronavirus 2
EDFLEYHDV

SEQ ID NO: 7891 - protein, 9 aa, Severe acute respiratory syndrome-related coronavirus
  REGION 1..9: note = Table A: HLA-A*33:01H HLA-A*33:03H
  source 1..9: note = Severe acute respiratory syndrome coronavirus 2
DFLEYHDVR

SEQ ID NO: 7892 - protein, 9 aa, Severe acute respiratory syndrome-related coronavirus
  REGION 1..9: note = Table A: HLA-C*04:03H HLA-A*02:11H HLA-A*02:04H HLA-A*02:06H HLA-A*02:07H HLA-A*02:02M HLA-B*38:02H
  source 1..9: note = Severe acute respiratory syndrome coronavirus 2
FLEYHDVRV

SEQ ID NO: 7893 - protein, 9 aa, Severe acute respiratory syndrome-related coronavirus
  REGION 1..9: note = Table A: HLA-B*45:01H HLA-B*40:02M HLA-B*40:06M HLA-B*41:02M HLA-B*49:01H HLA-B*50:01M
  source 1..9: note = Severe acute respiratory syndrome coronavirus 2
LEYHDVRVV

SEQ ID NO: 7894 - protein, 9 aa, Severe acute respiratory syndrome-related coronavirus
  REGION 1..9: note = Table A: HLA-A*33:03H HLA-A*24:02H HLA-A*24:07M HLA-C*08:01H HLA-A*23:01H
  source 1..9: note = Severe acute respiratory syndrome coronavirus 2
EYHDVRVVL

SEQ ID NO: 7895 - protein, 9 aa, Severe acute respiratory syndrome-related coronavirus
  REGION 1..9: note = Table A: HLA-B*40:02H
  source 1..9: note = Severe acute respiratory syndrome coronavirus 2
HDVRVVLDF

SEQ ID NO: 7896 - protein, 9 aa, Severe acute respiratory syndrome-related coronavirus
  REGION 1..9: note = Table A: HLA-A*33:01H HLA-A*68:02H HLA-C*15:05H HLA-B*51:01M HLA-C*08:01H HLA-B*38:02M HLA-B*13:02H
  source 1..9: note = Severe acute respiratory syndrome coronavirus 2
DVRVVLDFI

SEQ ID NO: 7897 - protein, 10 aa, Severe acute respiratory syndrome-related coronavirus
  REGION 1..10: note = Table A: HLA-A*02:11H HLA-B*55:02H HLA-A*68:02M HLA-A*02:04H HLA-A*02:05M HLA-A*02:06H HLA-A*02:08M HLA-A*02:02H HLA-A*02:03M HLA-B*38:02H HLA-B*54:01H
  source 1..10: note = Severe acute respiratory syndrome coronavirus 2
LVFLGIITTV

SEQ ID NO: 7898 - protein, 10 aa, Severe acute respiratory syndrome-related coronavirus
  REGION 1..10: note = Table A: HLA-A*68:02H
  source 1..10: note = Severe acute respiratory syndrome coronavirus 2
TTVAAFHQEC

SEQ ID NO: 7899 - protein, 10 aa, Severe acute respiratory syndrome-related coronavirus
  REGION 1..10: note = Table A: HLA-B*38:02H
  source 1..10: note = Severe acute respiratory syndrome coronavirus 2
FHQECSLQSC

SEQ ID NO: 7900 - protein, 10 aa, Severe acute respiratory syndrome-related coronavirus
  REGION 1..10: note = Table A: HLA-C*04:03H HLA-A*02:07M HLA-C*08:02H HLA-C*05:01M
  source 1..10: note = Severe acute respiratory syndrome coronavirus 2
VVDDPCPIHF

SEQ ID NO: 7901 - protein, 10 aa, Severe acute respiratory syndrome-related coronavirus
  REGION 1..10: note = Table A: HLA-A*36:01H HLA-A*01:01H
  source 1..10: note = Severe acute respiratory syndrome coronavirus 2
VDDPCPIHFY

SEQ ID NO: 7902 - protein, 10 aa, Severe acute respiratory syndrome-related coronavirus
  REGION 1..10: note = Table A: HLA-B*27:05H
  source 1..10: note = Severe acute respiratory syndrome coronavirus 2
ARKSAPLIEL

SEQ ID NO: 7903 - protein, 10 aa, Severe acute respiratory syndrome-related coronavirus
  REGION 1..10: note = Table A: HLA-C*15:02H HLA-B*13:02H
  source 1..10: note = Severe acute respiratory syndrome coronavirus 2
KSAPLIELCV

SEQ ID NO: 7904 - protein, 10 aa, Severe acute respiratory syndrome-related coronavirus
  REGION 1..10: note = Table A: HLA-A*68:02H HLA-A*02:02H HLA-A*24:02H HLA-C*08:01H HLA-A*23:01H
  source 1..10: note = Severe acute respiratory syndrome coronavirus 2
QYIDIGNYTV

SEQ ID NO: 7905 - protein, 10 aa, Severe acute respiratory syndrome-related coronavirus
  REGION 1..10: note = Table A: HLA-B*45:01H HLA-B*40:02H HLA-B*49:01H
  source 1..10: note = Severe acute respiratory syndrome coronavirus 2
QEPKLGSLVV

SEQ ID NO: 7906 - protein, 10 aa, Severe acute respiratory syndrome-related coronavirus
  REGION 1..10: note = Table A: HLA-A*33:03H HLA-A*34:01M HLA-A*66:01H
  source 1..10: note = Severe acute respiratory syndrome coronavirus 2
EPKLGSLVVR

SEQ ID NO: 7907 - protein, 10 aa, Severe acute respiratory syndrome-related coronavirus
  REGION 1..10: note = Table A: HLA-A*02:02H HLA-A*02:03H
  source 1..10: note = Severe acute respiratory syndrome coronavirus 2
FLEYHDVRVV

SEQ ID NO: 7908 - protein, 10 aa, Severe acute respiratory syndrome-related coronavirus
  REGION 1..10: note = Table A: HLA-B*40:01H HLA-B*40:02H
  source 1..10: note = Severe acute respiratory syndrome coronavirus 2
LEYHDVRVVL

SEQ ID NO: 7909 - protein, 10 aa, Severe acute respiratory syndrome-related coronavirus
  REGION 1..10: note = Table A: HLA-B*38:02H
  source 1..10: note = Severe acute respiratory syndrome coronavirus 2
YHDVRVVLDF

SEQ ID NO: 7910 - protein, 10 aa, Severe acute respiratory syndrome-related coronavirus
  REGION 1..10: note = Table A: HLA-A*68:02M HLA-C*08:01H HLA-C*08:03H HLA-B*38:02M HLA-B*40:02H HLA-B*13:02H
  source 1..10: note = Severe acute respiratory syndrome coronavirus 2
HDVRVVLDFI

SEQ ID NO: 7911 - protein, 11 aa, Severe acute respiratory syndrome-related coronavirus
  REGION 1..11: note = Table A: HLA-A*02:11M HLA-A*02:04H HLA-A*02:03H HLA-B*38:02H
  source 1..11: note = Severe acute respiratory syndrome coronavirus 2
FLVFLGIITTV

SEQ ID NO: 7912 - protein, 11 aa, Severe acute respiratory syndrome-related coronavirus
  REGION 1..11: note = Table A: HLA-B*55:02H HLA-B*54:01H
  source 1..11: note = Severe acute respiratory syndrome coronavirus 2
LVFLGIITTVA

SEQ ID NO: 7913 - protein, 11 aa, Severe acute respiratory syndrome-related coronavirus
  REGION 1..11: note = Table A: HLA-A*36:01H
  source 1..11: note = Severe acute respiratory syndrome coronavirus 2
VVDDPCPIHFY

SEQ ID NO: 7914 - protein, 11 aa, Severe acute respiratory syndrome-related coronavirus
  REGION 1..11: note = Table A: HLA-B*53:01H
  source 1..11: note = Severe acute respiratory syndrome coronavirus 2
DPCPIHFYSKW

SEQ ID NO: 7915 - protein, 11 aa, Severe acute respiratory syndrome-related coronavirus
  REGION 1..11: note = Table A: HLA-B*18:01H HLA-B*07:05H
  source 1..11: note = Severe acute respiratory syndrome coronavirus 2
DEAGSKSPIQY

SEQ ID NO: 7916 - protein, 11 aa, Severe acute respiratory syndrome-related coronavirus
  REGION 1..11: note = Table A: HLA-A*26:01H HLA-A*30:02H HLA-B*35:01M HLA-B*35:08H HLA-B*35:07H
  source 1..11: note = Severe acute respiratory syndrome coronavirus 2
SPIQYIDIGNY

SEQ ID NO: 7917 - protein, 11 aa, Severe acute respiratory syndrome-related coronavirus
  REGION 1..11: note = Table A: HLA-A*02:11H HLA-A*02:06H HLA-B*13:02H
  source 1..11: note = Severe acute respiratory syndrome coronavirus 2
IQYIDIGNYTV

SEQ ID NO: 7918 - protein, 11 aa, Severe acute respiratory syndrome-related coronavirus
  REGION 1..11: note = Table A: HLA-C*04:03H HLA-B*38:01H HLA-B*38:02H
  source 1..11: note = Severe acute respiratory syndrome coronavirus 2
YHDVRVVLDFI

SEQ ID NO: 7919 - protein, 8 aa, Severe acute respiratory syndrome-related coronavirus
  REGION 1..8: note = Table A: HLA-A*33:01H HLA-A*33:03H
  source 1..8: note = Severe acute respiratory syndrome coronavirus 2
DNGPQNQR

SEQ ID NO: 7920 - protein, 8 aa, Severe acute respiratory syndrome-related coronavirus
  REGION 1..8: note = Table A: HLA-B*52:01M
  source 1..8: note = Severe acute respiratory syndrome coronavirus 2
NQRNAPRI

SEQ ID NO: 7921 - protein, 8 aa, Severe acute respiratory syndrome-related coronavirus
  REGION 1..8: note = Table A: HLA-B*39:01H
  source 1..8: note = Severe acute respiratory syndrome coronavirus 2
FGGPSDST

SEQ ID NO: 7922 - protein, 8 aa, Severe acute respiratory syndrome-related coronavirus
  REGION 1..8: note = Table A: HLA-B*53:01M
  source 1..8: note = Severe acute respiratory syndrome coronavirus 2
LPNNTASW

SEQ ID NO: 7923 - protein, 8 aa, Severe acute respiratory syndrome-related coronavirus
  REGION 1..8: note = Table A: HLA-B*35:01H HLA-B*35:08H
  source 1..8: note = Severe acute respiratory syndrome coronavirus 2
SPDDQIGY

SEQ ID NO: 7924 - protein, 8 aa, Severe acute respiratory syndrome-related coronavirus
  REGION 1..8: note = Table A: HLA-A*36:01H
  source 1..8: note = Severe acute respiratory syndrome coronavirus 2
PDDQIGYY

SEQ ID NO: 7925 - protein, 8 aa, Severe acute respiratory syndrome-related coronavirus
  REGION 1..8: note = Table A: HLA-A*33:01H
  source 1..8: note = Severe acute respiratory syndrome coronavirus 2
DDQIGYYR

SEQ ID NO: 7926 - protein, 8 aa, Severe acute respiratory syndrome-related coronavirus
  REGION 1..8: note = Table A: HLA-A*11:303H HLA-A*02:01H HLA-A*02:03H HLA-B*38:02H HLA-B*54:01H HLA-B*39:01H
  source 1..8: note = Severe acute respiratory syndrome coronavirus 2
YLGTGPEA

SEQ ID NO: 7927 - protein, 8 aa, Severe acute respiratory syndrome-related coronavirus
  REGION 1..8: note = Table A: HLA-B*40:06H
  source 1..8: note = Severe acute respiratory syndrome coronavirus 2
KDGIIWVA

SEQ ID NO: 7928 - protein, 8 aa, Severe acute respiratory syndrome-related coronavirus
  REGION 1..8: note = Table A: HLA-C*15:05H
  source 1..8: note = Severe acute respiratory syndrome coronavirus 2
NPANNAAI

SEQ ID NO: 7929 - protein, 8 aa, Severe acute respiratory syndrome-related coronavirus
  REGION 1..8: note = Table A: HLA-C*15:05H HLA-B*51:01M HLA-C*17:01H HLA-B*07:05H
  source 1..8: note = Severe acute respiratory syndrome coronavirus 2
NAAIVLQL

SEQ ID NO: 7930 - protein, 8 aa, Severe acute respiratory syndrome-related coronavirus
  REGION 1..8: note = Table A: HLA-C*01:02H
  source 1..8: note = Severe acute respiratory syndrome coronavirus 2
QLPQGTTL

SEQ ID NO: 7931 - protein, 8 aa, Severe acute respiratory syndrome-related coronavirus
  REGION 1..8: note = Table A: HLA-A*11:01H HLA-A*11:02H
  source 1..8: note = Severe acute respiratory syndrome coronavirus 2
PQGTTLPK

SEQ ID NO: 7932 - protein, 8 aa, Severe acute respiratory syndrome-related coronavirus
  REGION 1..8: note = Table A: HLA-C*15:05H HLA-B*51:01M
  source 1..8: note = Severe acute respiratory syndrome coronavirus 2
DAALALLL

SEQ ID NO: 7933 - protein, 8 aa, Severe acute respiratory syndrome-related coronavirus
  REGION 1..8: note = Table A: HLA-C*04:03H HLA-A*02:11H HLA-A*02:02H HLA-C*08:02H
  source 1..8: note = Severe acute respiratory syndrome coronavirus 2
LLDRLNQL

SEQ ID NO: 7934 - protein, 8 aa, Severe acute respiratory syndrome-related coronavirus
  REGION 1..8: note = Table A: HLA-B*52:01H HLA-B*13:02H
  source 1..8: note = Severe acute respiratory syndrome coronavirus 2
QQQQGQTV

SEQ ID NO: 7935 - protein, 8 aa, Severe acute respiratory syndrome-related coronavirus
  REGION 1..8: note = Table A: HLA-A*11:01H
  source 1..8: note = Severe acute respiratory syndrome coronavirus 2
QQGQTVTK

SEQ ID NO: 7936 - protein, 8 aa, Severe acute respiratory syndrome-related coronavirus
  REGION 1..8: note = Table A: HLA-A*03:02H
  source 1..8: note = Severe acute respiratory syndrome coronavirus 2
QGQTVTKK

SEQ ID NO: 7937 - protein, 8 aa, Severe acute respiratory syndrome-related coronavirus
  REGION 1..8: note = Table A: HLA-B*58:01H HLA-C*15:05H HLA-B*51:01H HLA-B*13:02H
  source 1..8: note = Severe acute respiratory syndrome coronavirus 2
TATKAYNV

SEQ ID NO: 7938 - protein, 8 aa, Severe acute respiratory syndrome-related coronavirus
  REGION 1..8: note = Table A: HLA-C*14:02H HLA-C*14:03H HLA-B*46:01H HLA-C*15:05H HLA-A*24:02H HLA-A*23:01H HLA-B*37:01M HLA-B*15:01H HLA-B*39:01H
  source 1..8: note = Severe acute respiratory syndrome coronavirus 2
AYNVTQAF

SEQ ID NO: 7939 - protein, 8 aa, Severe acute respiratory syndrome-related coronavirus
  REGION 1..8: note = Table A: HLA-A*68:01H HLA-A*34:01H HLA-A*66:01H
  source 1..8: note = Severe acute respiratory syndrome coronavirus 2
NVTQAFGR

SEQ ID NO: 7940 - protein, 8 aa, Severe acute respiratory syndrome-related coronavirus
  REGION 1..8: note = Table A: HLA-B*46:01M HLA-B*38:02H HLA-B*15:02H
  source 1..8: note = Severe acute respiratory syndrome coronavirus 2
LIRQGTDY

SEQ ID NO: 7941 - protein, 8 aa, Severe acute respiratory syndrome-related coronavirus
  REGION 1..8: note = Table A: HLA-B*46:01H HLA-C*01:02H HLA-B*51:01H
  source 1..8: note = Severe acute respiratory syndrome coronavirus 2
FAPSASAF

SEQ ID NO: 7942 - protein, 8 aa, Severe acute respiratory syndrome-related coronavirus
  REGION 1..8: note = Table A: HLA-C*15:05H HLA-B*07:05H
  source 1..8: note = Severe acute respiratory syndrome coronavirus 2
APSASAFF

SEQ ID NO: 7943 - protein, 8 aa, Severe acute respiratory syndrome-related coronavirus
  REGION 1..8: note = Table A: HLA-A*11:01H HLA-A*11:02H HLA-A*33:03H HLA-A*34:01M HLA-A*34:02H HLA-A*66:01M
  source 1..8: note = Severe acute respiratory syndrome coronavirus 2
SAFFGMSR

SEQ ID NO: 7944 - protein, 8 aa, Severe acute respiratory syndrome-related coronavirus
  REGION 1..8: note = Table A: HLA-B*52:01H
  source 1..8: note = Severe acute respiratory syndrome coronavirus 2
AFFGMSRI

SEQ ID NO: 7945 - protein, 8 aa, Severe acute respiratory syndrome-related coronavirus
  REGION 1..8: note = Table A: HLA-B*08:01H
  source 1..8: note = Severe acute respiratory syndrome coronavirus 2
FGMSRIGM

SEQ ID NO: 7946 - protein, 8 aa, Severe acute respiratory syndrome-related coronavirus
  REGION 1..8: note = Table A: HLA-C*16:01H HLA-C*03:02H HLA-C*15:05H HLA-B*51:01H HLA-B*52:01H
  source 1..8: note = Severe acute respiratory syndrome coronavirus 2
MSRIGMEV

SEQ ID NO: 7947 - protein, 8 aa, Severe acute respiratory syndrome-related coronavirus
  REGION 1..8: note = Table A: HLA-A*25:01M HLA-B*15:13M
  source 1..8: note = Severe acute respiratory syndrome coronavirus 2
EVTPSGTW

SEQ ID NO: 7948 - protein, 8 aa, Severe acute respiratory syndrome-related coronavirus
  REGION 1..8: note = Table A: HLA-C*01:02H
  source 1..8: note = Severe acute respiratory syndrome coronavirus 2
VTPSGTWL

SEQ ID NO: 7949 - protein, 8 aa, Severe acute respiratory syndrome-related coronavirus
  REGION 1..8: note = Table A: HLA-A*24:07H HLA-B*39:01H
  source 1..8: note = Severe acute respiratory syndrome coronavirus 2
TYTGAIKL

SEQ ID NO: 7950 - protein, 8 aa, Severe acute respiratory syndrome-related coronavirus
  REGION 1..8: note = Table A: HLA-C*04:03H
  source 1..8: note = Severe acute respiratory syndrome coronavirus 2
FKDQVILL

SEQ ID NO: 7951 - protein, 8 aa, Severe acute respiratory syndrome-related coronavirus
  REGION 1..8: note = Table A: HLA-B*15:01H
  source 1..8: note = Severe acute respiratory syndrome coronavirus 2
LNKHIDAY

SEQ ID NO: 7952 - protein, 8 aa, Severe acute respiratory syndrome-related coronavirus
  REGION 1..8: note = Table A: HLA-B*57:03H
  source 1..8: note = Severe acute respiratory syndrome coronavirus 2
KTFPPTEP

SEQ ID NO: 7953 - protein, 8 aa, Severe acute respiratory syndrome-related coronavirus
  REGION 1..8: note = Table A: HLA-C*15:05H HLA-C*08:02M HLA-C*05:01H
  source 1..8: note = Severe acute respiratory syndrome coronavirus 2
KADETQAL

SEQ ID NO: 7954 - protein, 8 aa, Severe acute respiratory syndrome-related coronavirus
  REGION 1..8: note = Table A: HLA-A*33:01H HLA-A*33:03M HLA-A*68:01H HLA-A*34:02H
  source 1..8: note = Severe acute respiratory syndrome coronavirus 2
ETQALPQR

SEQ ID NO: 7955 - protein, 8 aa, Severe acute respiratory syndrome-related coronavirus
  REGION 1..8: note = Table A: HLA-A*11:02H
  source 1..8: note = Severe acute respiratory syndrome coronavirus 2
QALPQRQK

SEQ ID NO: 7956 - protein, 8 aa, Severe acute respiratory syndrome-related coronavirus
  REGION 1..8: note = Table A: HLA-B*52:01M HLA-B*13:02H
  source 1..8: note = Severe acute respiratory syndrome coronavirus 2
RQKKQQTV

SEQ ID NO: 7957 - protein, 8 aa, Severe acute respiratory syndrome-related coronavirus
  REGION 1..8: note = Table A: HLA-B*48:01H
  source 1..8: note = Severe acute respiratory syndrome coronavirus 2
KKQQTVTL

SEQ ID NO: 7958 - protein, 8 aa, Severe acute respiratory syndrome-related coronavirus
  REGION 1..8: note = Table A: HLA-B*48:01H HLA-B*52:01H HLA-B*15:01H
  source 1..8: note = Severe acute respiratory syndrome coronavirus 2
KQQTVTLL

SEQ ID NO: 7959 - protein, 8 aa, Severe acute respiratory syndrome-related coronavirus
  REGION 1..8: note = Table A: HLA-B*56:01H HLA-B*55:02H HLA-B*55:01M HLA-B*39:06H HLA-B*54:01M
  source 1..8: note = Severe acute respiratory syndrome coronavirus 2
TVTLLPAA

SEQ ID NO: 7960 - protein, 8 aa, Severe acute respiratory syndrome-related coronavirus
  REGION 1..8: note = Table A: HLA-C*08:02H HLA-B*40:02H HLA-B*41:02H
  source 1..8: note = Severe acute respiratory syndrome coronavirus 2
LDDFSKQL

SEQ ID NO: 7961 - protein, 9 aa, Severe acute respiratory syndrome-related coronavirus
  REGION 1..9: note = Table A: HLA-A*33:01H HLA-A*33:03H HLA-A*68:01H
  source 1..9: note = Severe acute respiratory syndrome coronavirus 2
SDNGPQNQR

SEQ ID NO: 7962 - protein, 9 aa, Severe acute respiratory syndrome-related coronavirus
  REGION 1..9: note = Table A: HLA-B*07:02H
  source 1..9: note = Severe acute respiratory syndrome coronavirus 2
GPQNQRNAP

SEQ ID NO: 7963 - protein, 9 aa, Severe acute respiratory syndrome-related coronavirus
  REGION 1..9: note = Table A: HLA-A*74:01H HLA-A*34:01H
  source 1..9: note = Severe acute respiratory syndrome coronavirus 2
PQNQRNAPR

SEQ ID NO: 7964 - protein, 9 aa, Severe acute respiratory syndrome-related coronavirus
  REGION 1..9: note = Table A: HLA-B*27:05H HLA-C*07:01H HLA-B*27:02H HLA-B*14:02H HLA-B*38:02H
  source 1..9: note = Severe acute respiratory syndrome coronavirus 2
QRNAPRITF

SEQ ID NO: 7965 - protein, 9 aa, Severe acute respiratory syndrome-related coronavirus
  REGION 1..9: note = Table A: HLA-B*55:01H HLA-B*07:02H HLA-B*50:01H
  source 1..9: note = Severe acute respiratory syndrome coronavirus 2
APRITFGGP

SEQ ID NO: 7966 - protein, 9 aa, Severe acute respiratory syndrome-related coronavirus
  REGION 1..9: note = Table A: HLA-B*56:01H HLA-B*55:02H HLA-C*15:05H
  source 1..9: note = Severe acute respiratory syndrome coronavirus 2
RPQGLPNNT

SEQ ID NO: 7967 - protein, 9 aa, Severe acute respiratory syndrome-related coronavirus
  REGION 1..9: note = Table A: HLA-B*15:13H
  source 1..9: note = Severe acute respiratory syndrome coronavirus 2
GLPNNTASW

SEQ ID NO: 7968 - protein, 9 aa, Severe acute respiratory syndrome-related coronavirus
  REGION 1..9: note = Table A: HLA-B*53:01H
  source 1..9: note = Severe acute respiratory syndrome coronavirus 2
LPNNTASWF

SEQ ID NO: 7969 - protein, 9 aa, Severe acute respiratory syndrome-related coronavirus
  REGION 1..9: note = Table A: HLA-A*25:01H HLA-C*03:03H HLA-C*03:04H HLA-A*68:02M HLA-C*15:05H HLA-A*02:04H HLA-A*34:02H HLA-C*08:01H HLA-A*66:01H
  source 1..9: note = Severe acute respiratory syndrome coronavirus 2
NTASWFTAL

SEQ ID NO: 7970 - protein, 9 aa, Severe acute respiratory syndrome-related coronavirus
  REGION 1..9: note = Table A: HLA-C*14:03H
  source 1..9: note = Severe acute respiratory syndrome coronavirus 2
SWFTALTQH

SEQ ID NO: 7971 - protein, 9 aa, Severe acute respiratory syndrome-related coronavirus
  REGION 1..9: note = Table A: HLA-A*68:01H HLA-A*34:02M HLA-A*66:01H
  source 1..9: note = Severe acute respiratory syndrome coronavirus 2
FTALTQHGK

SEQ ID NO: 7972 - protein, 9 aa, Severe acute respiratory syndrome-related coronavirus
  REGION 1..9: note = Table A: HLA-B*38:01M HLA-B*38:02H
  source 1..9: note = Severe acute respiratory syndrome coronavirus 2
QHGKEDLKF

SEQ ID NO: 7973 - protein, 9 aa, Severe acute respiratory syndrome-related coronavirus
  REGION 1..9: note = Table A: HLA-C*15:05H HLA-A*34:01H HLA-B*51:01H HLA-B*54:01H HLA-B*07:02H HLA-B*07:04H
  source 1..9: note = Severe acute respiratory syndrome coronavirus 2
FPRGQGVPI

SEQ ID NO: 7974 - protein, 9 aa, Severe acute respiratory syndrome-related coronavirus
  REGION 1..9: note = Table A: HLA-A*36:01M HLA-A*01:01H HLA-B*53:01H HLA-A*30:02H HLA-C*15:05H HLA-A*34:02H HLA-B*35:01M HLA-B*35:08M HLA-B*35:07H HLA-B*38:02H HLA-B*39:01M HLA-B*07:05H
  source 1..9: note = Severe acute respiratory syndrome coronavirus 2
SPDDQIGYY

SEQ ID NO: 7975 - protein, 9 aa, Severe acute respiratory syndrome-related coronavirus
  REGION 1..9: note = Table A: HLA-A*33:01M
  source 1..9: note = Severe acute respiratory syndrome coronavirus 2
DDQIGYYRR

SEQ ID NO: 7976 - protein, 9 aa, Severe acute respiratory syndrome-related coronavirus
  REGION 1..9: note = Table A: HLA-B*07:04M
  source 1..9: note = Severe acute respiratory syndrome coronavirus 2
RIRGGDGKM

SEQ ID NO: 7977 - protein, 9 aa, Severe acute respiratory syndrome-related coronavirus
  REGION 1..9: note = Table A: HLA-B*58:01H HLA-A*32:01M HLA-B*57:03H
  source 1..9: note = Severe acute respiratory syndrome coronavirus 2
KMKDLSPRW

SEQ ID NO: 7978 - protein, 9 aa, Severe acute respiratory syndrome-related coronavirus
  REGION 1..9: note = Table A: HLA-A*36:01H
  source 1..9: note = Severe acute respiratory syndrome coronavirus 2
LSPRWYFYY

SEQ ID NO: 7979 - protein, 9 aa, Severe acute respiratory syndrome-related coronavirus
  REGION 1..9: note = Table A: HLA-B*42:01M HLA-B*07:04M
  source 1..9: note = Severe acute respiratory syndrome coronavirus 2
SPRWYFYYL

SEQ ID NO: 7980 - protein, 9 aa, Severe acute respiratory syndrome-related coronavirus
  REGION 1..9: note = Table A: HLA-C*14:02H HLA-C*14:03H HLA-C*08:01H HLA-B*54:01H HLA-B*39:01H
  source 1..9: note = Severe acute respiratory syndrome coronavirus 2
YYLGTGPEA

SEQ ID NO: 7981 - protein, 9 aa, Severe acute respiratory syndrome-related coronavirus
  REGION 1..9: note = Table A: HLA-C*14:02H HLA-C*14:03H HLA-A*36:01H HLA-B*46:01H HLA-B*35:01H HLA-B*15:02H
  source 1..9: note = Severe acute respiratory syndrome coronavirus 2
TGPEAGLPY

SEQ ID NO: 7982 - protein, 9 aa, Severe acute respiratory syndrome-related coronavirus
  REGION 1..9: note = Table A: HLA-A*03:02H HLA-A*11:01H HLA-A*11:02H
  source 1..9: note = Severe acute respiratory syndrome coronavirus 2
AGLPYGANK

SEQ ID NO: 7983 - protein, 9 aa, Severe acute respiratory syndrome-related coronavirus
  REGION 1..9: note = Table A: HLA-B*58:01H HLA-B*53:01H HLA-B*57:03H
  source 1..9: note = Severe acute respiratory syndrome coronavirus 2
GANKDGIIW

SEQ ID NO: 7984 - protein, 9 aa, Severe acute respiratory syndrome-related coronavirus
  REGION 1..9: note = Table A: HLA-B*39:06H
  source 1..9: note = Severe acute respiratory syndrome coronavirus 2
NKDGIIWVA

SEQ ID NO: 7985 - protein, 9 aa, Severe acute respiratory syndrome-related coronavirus
  REGION 1..9: note = Table A: HLA-A*02:11H
  source 1..9: note = Severe acute respiratory syndrome coronavirus 2
IIWVATEGA

SEQ ID NO: 7986 - protein, 9 aa, Severe acute respiratory syndrome-related coronavirus
  REGION 1..9: note = Table A: HLA-A*03:02H HLA-A*11:01H
  source 1..9: note = Severe acute respiratory syndrome coronavirus 2
TEGALNTPK

SEQ ID NO: 7987 - protein, 9 aa, Severe acute respiratory syndrome-related coronavirus
  REGION 1..9: note = Table A: HLA-B*13:01H HLA-B*13:02H
  source 1..9: note = Severe acute respiratory syndrome coronavirus 2
ALNTPKDHI

SEQ ID NO: 7988 - protein, 9 aa, Severe acute respiratory syndrome-related coronavirus
  REGION 1..9: note = Table A: HLA-A*33:01H HLA-A*33:03M HLA-A*26:03M HLA-A*68:01H HLA-B*55:01H HLA-A*34:01H HLA-A*34:02H HLA-B*07:04H HLA-A*66:01M
  source 1..9: note = Severe acute respiratory syndrome coronavirus 2
TPKDHIGTR

SEQ ID NO: 7989 - protein, 9 aa, Severe acute respiratory syndrome-related coronavirus
  REGION 1..9: note = Table A: HLA-B*39:06H
  source 1..9: note = Severe acute respiratory syndrome coronavirus 2
DHIGTRNPA

SEQ ID NO: 7990 - protein, 9 aa, Severe acute respiratory syndrome-related coronavirus
  REGION 1..9: note = Table A: HLA-B*39:06M HLA-B*39:01H
  source 1..9: note = Severe acute respiratory syndrome coronavirus 2
TRNPANNAA

SEQ ID NO: 7991 - protein, 9 aa, Severe acute respiratory syndrome-related coronavirus
  REGION 1..9: note = Table A: HLA-B*35:03H HLA-C*15:05H
  source 1..9: note = Severe acute respiratory syndrome coronavirus 2
NPANNAAIV

SEQ ID NO: 7992 - protein, 9 aa, Severe acute respiratory syndrome-related coronavirus
  REGION 1..9: note = Table A: HLA-B*35:03H HLA-C*15:05H
  source 1..9: note = Severe acute respiratory syndrome coronavirus 2
PANNAAIVL

SEQ ID NO: 7993 - protein, 9 aa, Severe acute respiratory syndrome-related coronavirus
  REGION 1..9: note = Table A: HLA-A*68:02H
  source 1..9: note = Severe acute respiratory syndrome coronavirus 2
NNAAIVLQL

SEQ ID NO: 7994 - protein, 9 aa, Severe acute respiratory syndrome-related coronavirus
  REGION 1..9: note = Table A: HLA-B*48:01M HLA-A*11:303H HLA-B*14:01H HLA-B*38:02H HLA-B*15:01H HLA-B*15:03H HLA-B*39:01H HLA-B*15:10H
  source 1..9: note = Severe acute respiratory syndrome coronavirus 2
LQLPQGTTL

SEQ ID NO: 7995 - protein, 9 aa, Severe acute respiratory syndrome-related coronavirus
  REGION 1..9: note = Table A: HLA-A*03:02H HLA-A*68:01H HLA-A*34:01M HLA-A*34:02M HLA-A*66:01H
  source 1..9: note = Severe acute respiratory syndrome coronavirus 2
LPQGTTLPK

SEQ ID NO: 7996 - protein, 9 aa, Severe acute respiratory syndrome-related coronavirus
  REGION 1..9: note = Table A: HLA-A*36:01H HLA-A*30:02M
  source 1..9: note = Severe acute respiratory syndrome coronavirus 2
GTTLPKGFY

SEQ ID NO: 7997 - protein, 9 aa, Severe acute respiratory syndrome-related coronavirus
  REGION 1..9: note = Table A: HLA-A*02:11H HLA-A*34:02H
  source 1..9: note = Severe acute respiratory syndrome coronavirus 2
TTLPKGFYA

SEQ ID NO: 7998 - protein, 9 aa, Severe acute respiratory syndrome-related coronavirus
  REGION 1..9: note = Table A: HLA-B*56:01H HLA-B*55:01H HLA-B*54:01H
  source 1..9: note = Severe acute respiratory syndrome coronavirus 2
LPKGFYAEG

SEQ ID NO: 7999 - protein, 9 aa, Severe acute respiratory syndrome-related coronavirus
  REGION 1..9: note = Table A: HLA-B*39:01H
  source 1..9: note = Severe acute respiratory syndrome coronavirus 2
SRNSTPGSS

SEQ ID NO: 8000 - protein, 9 aa, Severe acute respiratory syndrome-related coronavirus
  REGION 1..9: note = Table A: HLA-A*33:03H HLA-A*34:01H HLA-A*31:01H
  source 1..9: note = Severe acute respiratory syndrome coronavirus 2
RNSTPGSSR

SEQ ID NO: 8001 - protein, 9 aa, Severe acute respiratory syndrome-related coronavirus
  REGION 1..9: note = Table A: HLA-A*11:303H HLA-B*35:03H HLA-C*15:05H HLA-B*35:02M HLA-B*35:12M HLA-B*38:02H HLA-B*39:01M
  source 1..9: note = Severe acute respiratory syndrome coronavirus 2
AGNGGDAAL

SEQ ID NO: 8002 - protein, 9 aa, Severe acute respiratory syndrome-related coronavirus
  REGION 1..9: note = Table A: HLA-B*35:03H HLA-B*39:01H
  source 1..9: note = Severe acute respiratory syndrome coronavirus 2
NGGDAALAL

SEQ ID NO: 8003 - protein, 9 aa, Severe acute respiratory syndrome-related coronavirus
  REGION 1..9: note = Table A: HLA-C*15:05H HLA-B*51:01H
  source 1..9: note = Severe acute respiratory syndrome coronavirus 2
DAALALLLL

SEQ ID NO: 8004 - protein, 9 aa, Severe acute respiratory syndrome-related coronavirus
  REGION 1..9: note = Table A: HLA-A*02:11H HLA-C*08:01H
  source 1..9: note = Severe acute respiratory syndrome coronavirus 2
LALLLLDRL

SEQ ID NO: 8005 - protein, 9 aa, Severe acute respiratory syndrome-related coronavirus
  REGION 1..9: note = Table A: HLA-A*11:303H HLA-B*08:01M HLA-A*02:11H HLA-A*02:04H HLA-A*02:05H HLA-A*02:06H HLA-A*02:07M HLA-B*14:01M HLA-A*02:01H HLA-A*02:02H HLA-A*02:03M HLA-C*08:01H HLA-B*38:02H HLA-B*40:06H
  source 1..9: note = Severe acute respiratory syndrome coronavirus 2
LLLDRLNQL

SEQ ID NO: 8006 - protein, 9 aa, Severe acute respiratory syndrome-related coronavirus
  REGION 1..9: note = Table A: HLA-A*02:11H HLA-A*30:02H HLA-A*02:02M HLA-B*38:02H HLA-B*15:01M HLA-B*13:01M HLA-B*13:02H
  source 1..9: note = Severe acute respiratory syndrome coronavirus 2
RLNQLESKM

SEQ ID NO: 8007 - protein, 9 aa, Severe acute respiratory syndrome-related coronavirus
  REGION 1..9: note = Table A: HLA-A*03:01H HLA-A*03:02H
  source 1..9: note = Severe acute respiratory syndrome coronavirus 2
QLESKMSGK

SEQ ID NO: 8008 - protein, 9 aa, Severe acute respiratory syndrome-related coronavirus
  REGION 1..9: note = Table A: HLA-B*48:01H HLA-B*52:01M HLA-B*38:02H HLA-B*15:01M HLA-B*39:01H HLA-B*13:02H
  source 1..9: note = Severe acute respiratory syndrome coronavirus 2
GQQQQGQTV

SEQ ID NO: 8009 - protein, 9 aa, Severe acute respiratory syndrome-related coronavirus
  REGION 1..9: note = Table A: HLA-B*39:01H
  source 1..9: note = Severe acute respiratory syndrome coronavirus 2
QQQQGQTVT

SEQ ID NO: 8010 - protein, 9 aa, Severe acute respiratory syndrome-related coronavirus
  REGION 1..9: note = Table A: HLA-A*11:303H HLA-A*03:02M HLA-A*11:01M HLA-A*11:02M HLA-A*30:02H HLA-C*07:27H HLA-B*15:01H HLA-B*13:02H
  source 1..9: note = Severe acute respiratory syndrome coronavirus 2
QQQGQTVTK

SEQ ID NO: 8011 - protein, 9 aa, Severe acute respiratory syndrome-related coronavirus
  REGION 1..9: note = Table A: HLA-A*03:01H HLA-A*03:02H HLA-A*11:01H
  source 1..9: note = Severe acute respiratory syndrome coronavirus 2
QQGQTVTKK

SEQ ID NO: 8012 - protein, 9 aa, Severe acute respiratory syndrome-related coronavirus
  REGION 1..9: note = Table A: HLA-B*39:06M HLA-B*15:01H HLA-B*13:02H HLA-B*50:01H
  source 1..9: note = Severe acute respiratory syndrome coronavirus 2
GQTVTKKSA

SEQ ID NO: 8013 - protein, 9 aa, Severe acute respiratory syndrome-related coronavirus
  REGION 1..9: note = Table A: HLA-A*02:08H HLA-A*02:03H
  source 1..9: note = Severe acute respiratory syndrome coronavirus 2
VTKKSAAEA

SEQ ID NO: 8014 - protein, 9 aa, Severe acute respiratory syndrome-related coronavirus
  REGION 1..9: note = Table A: HLA-A*34:01H HLA-A*34:02M
  source 1..9: note = Severe acute respiratory syndrome coronavirus 2
EASKKPRQK

SEQ ID NO: 8015 - protein, 9 aa, Severe acute respiratory syndrome-related coronavirus
  REGION 1..9: note = Table A: HLA-B*07:04H
  source 1..9: note = Severe acute respiratory syndrome coronavirus 2
KPRQKRTAT

SEQ ID NO: 8016 - protein, 9 aa, Severe acute respiratory syndrome-related coronavirus
  REGION 1..9: note = Table A: HLA-B*15:03M
  source 1..9: note = Severe acute respiratory syndrome coronavirus 2
QKRTATKAY

SEQ ID NO: 8017 - protein, 9 aa, Severe acute respiratory syndrome-related coronavirus
  REGION 1..9: note = Table A: HLA-B*58:02H HLA-A*02:11H HLA-A*68:02H HLA-C*15:02H HLA-A*02:05M HLA-A*02:08M HLA-A*02:02M HLA-B*57:03M HLA-B*13:02H
  source 1..9: note = Severe acute respiratory syndrome coronavirus 2
RTATKAYNV

SEQ ID NO: 8018 - protein, 9 aa, Severe acute respiratory syndrome-related coronavirus
  REGION 1..9: note = Table A: HLA-B*57:03H
  source 1..9: note = Severe acute respiratory syndrome coronavirus 2
ATKAYNVTQ

SEQ ID NO: 8019 - protein, 9 aa, Severe acute respiratory syndrome-related coronavirus
  REGION 1..9: note = Table A: HLA-B*39:06H
  source 1..9: note = Severe acute respiratory syndrome coronavirus 2
TKAYNVTQA

SEQ ID NO: 8020 - protein, 9 aa, Severe acute respiratory syndrome-related coronavirus
  REGION 1..9: note = Table A: HLA-B*48:01H HLA-B*58:01H HLA-B*58:02H HLA-C*14:02H HLA-C*14:03H HLA-A*11:303M HLA-B*44:05H HLA-C*16:01H HLA-C*16:04M HLA-B*57:01M HLA-A*25:01H HLA-B*46:01H HLA-C*03:03M HLA-C*07:01H HLA-A*02:11H HLA-B*53:01H
  REGION 1..9: note = CONT. FROM ABOVE: HLA-C*03:02H HLA-C*03:04M HLA-A*30:02H HLA- A*68:02H HLA-C*15:05M HLA-C*12:02H HLA-C*12:03M HLA-C*15:02H HLA-A*02:08H HLA-A*34:01H HLA-C*07:27H HLA-A*24:02H HLA-B*35 :01M HLA-A*24:07H HLA-B*35:07M HLA-C*08:01M HLA-A*23:01H
  REGION 1..9: note = CONT. FROM ABOVE: HLA-B*37:01H HLA-B*38:02M HLA-A*32:01M HLA- B*07:02H HLA-B*07:04H HLA-B*15:01H HLA-B*15:02M HLA-B*15:03H HLA-B*07:05M HLA-B*57:03H HLA-C*02:02M HLA-B*13:01H HLA-B*13 :02H HLA-A*66:01H
  source 1..9: note = Severe acute respiratory syndrome coronavirus 2
KAYNVTQAF

SEQ ID NO: 8021 - protein, 9 aa, Severe acute respiratory syndrome-related coronavirus
  REGION 1..9: note = Table A: HLA-A*33:01H HLA-A*33:03H HLA-A*68:01H HLA-A*66:01H
  source 1..9: note = Severe acute respiratory syndrome coronavirus 2
YNVTQAFGR

SEQ ID NO: 8022 - protein, 9 aa, Severe acute respiratory syndrome-related coronavirus
  REGION 1..9: note = Table A: HLA-A*26:03H HLA-A*68:01H HLA-A*34:01M HLA-A*34:02M HLA-A*66:01M
  source 1..9: note = Severe acute respiratory syndrome coronavirus 2
NVTQAFGRR

SEQ ID NO: 8023 - protein, 9 aa, Severe acute respiratory syndrome-related coronavirus
  REGION 1..9: note = Table A: HLA-C*15:05H HLA-B*07:05H
  source 1..9: note = Severe acute respiratory syndrome coronavirus 2
GPEQTQGNF

SEQ ID NO: 8024 - protein, 9 aa, Severe acute respiratory syndrome-related coronavirus
  REGION 1..9: note = Table A: HLA-B*35:03H HLA-B*35:02H HLA-B*35:12H HLA-B*39:01H
  source 1..9: note = Severe acute respiratory syndrome coronavirus 2
QGNFGDQEL

SEQ ID NO: 8025 - protein, 9 aa, Severe acute respiratory syndrome-related coronavirus
  REGION 1..9: note = Table A: HLA-A*25:01H HLA-A*26:01M HLA-A*26:02M HLA-A*26:03H HLA-A*34:01H HLA-B*15:13H HLA-B*38:02M HLA-B*15:01M HLA-B*15:02H HLA-B*39:01H
  source 1..9: note = Severe acute respiratory syndrome coronavirus 2
ELIRQGTDY

SEQ ID NO: 8026 - protein, 9 aa, Severe acute respiratory syndrome-related coronavirus
  REGION 1..9: note = Table A: HLA-A*34:02H
  source 1..9: note = Severe acute respiratory syndrome coronavirus 2
LIRQGTDYK

SEQ ID NO: 8027 - protein, 9 aa, Severe acute respiratory syndrome-related coronavirus
  REGION 1..9: note = Table A: HLA-B*13:01M
  source 1..9: note = Severe acute respiratory syndrome coronavirus 2
RQGTDYKHW

SEQ ID NO: 8028 - protein, 9 aa, Severe acute respiratory syndrome-related coronavirus
  REGION 1..9: note = Table A: HLA-A*02:11H HLA-B*37:01H HLA-B*40:02H HLA-B*40:06H HLA-B*49:01H
  source 1..9: note = Severe acute respiratory syndrome coronavirus 2
TDYKHWPQI

SEQ ID NO: 8029 - protein, 9 aa, Severe acute respiratory syndrome-related coronavirus
  REGION 1..9: note = Table A: HLA-B*48:01H HLA-B*58:01H HLA-B*58:02H HLA-B*27:05H HLA-A*02:11H HLA-A*24:07H HLA-A*23:01H HLA-B*38:01H HLA-B*38:02M HLA-A*32:01H HLA-B*39:06H HLA-B*15:01H HLA-B*15:03H HLA-B*39:01H HLA-B*57:03M HLA-B*15:10H
  source 1..9: note = Severe acute respiratory syndrome coronavirus 2
KHWPQIAQF

SEQ ID NO: 8030 - protein, 9 aa, Severe acute respiratory syndrome-related coronavirus
  REGION 1..9: note = Table A: HLA-B*39:06H
  source 1..9: note = Severe acute respiratory syndrome coronavirus 2
QIAQFAPSA

SEQ ID NO: 8031 - protein, 9 aa, Severe acute respiratory syndrome-related coronavirus
  REGION 1..9: note = Table A: HLA-B*38:02H HLA-B*39:06M HLA-B*15:01H HLA-B*13:02H HLA-B*50:01H
  source 1..9: note = Severe acute respiratory syndrome coronavirus 2
AQFAPSASA

SEQ ID NO: 8032 - protein, 9 aa, Severe acute respiratory syndrome-related coronavirus
  REGION 1..9: note = Table A: HLA-C*14:02H HLA-C*14:03H HLA-B*46:01M HLA-C*15:05H HLA-A*24:02H HLA-B*35:01H HLA-A*24:07H HLA-A*23:01H HLA-B*38:02M HLA-B*15:01M HLA-B*15:02H HLA-B*15:03H HLA-B*39:01H HLA-B*07:05M HLA-B*15:11H
  source 1..9: note = Severe acute respiratory syndrome coronavirus 2
QFAPSASAF

SEQ ID NO: 8033 - protein, 9 aa, Severe acute respiratory syndrome-related coronavirus
  REGION 1..9: note = Table A: HLA-C*14:03H HLA-B*46:01H HLA-C*04:03H HLA-B*53:01H HLA-C*03:02H HLA-C*01:02M HLA-C*12:02H HLA-A*34:01H HLA-B*38:02H HLA-C*02:02H HLA-A*66:01H
  source 1..9: note = Severe acute respiratory syndrome coronavirus 2
FAPSASAFF

SEQ ID NO: 8034 - protein, 9 aa, Severe acute respiratory syndrome-related coronavirus
  REGION 1..9: note = Table A: HLA-A*74:01M HLA-A*11:01M HLA-A*11:02M HLA-A*68:01H HLA-A*34:01H HLA-A*34:02H HLA-A*31:01H HLA-A*66:01M
  source 1..9: note = Severe acute respiratory syndrome coronavirus 2
ASAFFGMSR

SEQ ID NO: 8035 - protein, 9 aa, Severe acute respiratory syndrome-related coronavirus
  REGION 1..9: note = Table A: HLA-C*12:05H HLA-A*02:11H HLA-B*53:01H HLA-A*68:02H HLA-C*15:05H HLA-C*12:03H HLA-A*02:05H HLA-A*34:01H HLA-B*51:01M HLA-C*17:01H HLA-C*08:01H HLA-B*38:02H HLA-B*57:03H HLA-B*49:01H HLA-A*66:01H
  source 1..9: note = Severe acute respiratory syndrome coronavirus 2
SAFFGMSRI

SEQ ID NO: 8036 - protein, 9 aa, Severe acute respiratory syndrome-related coronavirus
  REGION 1..9: note = Table A: HLA-C*14:02H HLA-C*14:03H
  source 1..9: note = Severe acute respiratory syndrome coronavirus 2
FFGMSRIGM

SEQ ID NO: 8037 - protein, 9 aa, Severe acute respiratory syndrome-related coronavirus
  REGION 1..9: note = Table A: HLA-A*02:11M HLA-C*15:05H HLA-A*02:01H HLA-A*02:02H HLA-A*02:03M HLA-B*52:01H HLA-B*38:02H HLA-B*13:02H
  source 1..9: note = Severe acute respiratory syndrome coronavirus 2
GMSRIGMEV

SEQ ID NO: 8038 - protein, 9 aa, Severe acute respiratory syndrome-related coronavirus
  REGION 1..9: note = Table A: HLA-B*39:06H
  source 1..9: note = Severe acute respiratory syndrome coronavirus 2
SRIGMEVTP

SEQ ID NO: 8039 - protein, 9 aa, Severe acute respiratory syndrome-related coronavirus
  REGION 1..9: note = Table A: HLA-B*58:01H HLA-B*44:02M HLA-B*44:05M HLA-C*16:04H HLA-B*44:03M HLA-B*15:13M HLA-B*49:01H HLA-B*50:01H
  source 1..9: note = Severe acute respiratory syndrome coronavirus 2
MEVTPSGTW

SEQ ID NO: 8040 - protein, 9 aa, Severe acute respiratory syndrome-related coronavirus
  REGION 1..9: note = Table A: HLA-A*34:01H
  source 1..9: note = Severe acute respiratory syndrome coronavirus 2
EVTPSGTWL

SEQ ID NO: 8041 - protein, 9 aa, Severe acute respiratory syndrome-related coronavirus
  REGION 1..9: note = Table A: HLA-A*29:01H HLA-A*29:02H HLA-B*53:01M HLA-C*15:05H HLA-A*34:01H HLA-A*34:02H HLA-B*35:01H HLA-B*35:08H HLA-B*35:07M HLA-B*38:02H HLA-B*15:02H HLA-B*07:05M HLA-B*15:11M
  source 1..9: note = Severe acute respiratory syndrome coronavirus 2
TPSGTWLTY

SEQ ID NO: 8042 - protein, 9 aa, Severe acute respiratory syndrome-related coronavirus
  REGION 1..9: note = Table A: HLA-A*68:02H HLA-C*15:05H HLA-C*12:03H HLA-C*15:02H HLA-A*02:05H HLA-A*02:08H HLA-A*34:02H HLA-C*17:01M HLA-B*57:03M
  source 1..9: note = Severe acute respiratory syndrome coronavirus 2
LTYTGAIKL

SEQ ID NO: 8043 - protein, 9 aa, Severe acute respiratory syndrome-related coronavirus
  REGION 1..9: note = Table A: HLA-B*58:01H HLA-A*02:11H HLA-A*02:07H HLA-B*38:01H HLA-B*38:02H HLA-B*57:03H HLA-C*05:01H HLA-B*13:01H
  source 1..9: note = Severe acute respiratory syndrome coronavirus 2
KLDDKDPNF

SEQ ID NO: 8044 - protein, 9 aa, Severe acute respiratory syndrome-related coronavirus
  REGION 1..9: note = Table A: HLA-B*53:01H HLA-B*35:03H HLA-C*15:05H HLA-B*35:02M HLA-B*51:01M HLA-B*35:12H
  source 1..9: note = Severe acute respiratory syndrome coronavirus 2
DPNFKDQVI

SEQ ID NO: 8045 - protein, 9 aa, Severe acute respiratory syndrome-related coronavirus
  REGION 1..9: note = Table A: HLA-C*14:03H HLA-A*24:07H
  source 1..9: note = Severe acute respiratory syndrome coronavirus 2
NFKDQVILL

SEQ ID NO: 8046 - protein, 9 aa, Severe acute respiratory syndrome-related coronavirus
  REGION 1..9: note = Table A: HLA-A*36:01H HLA-B*46:01H HLA-A*29:02H HLA-A*30:02M HLA-A*02:02H HLA-B*35:07H HLA-B*38:02M HLA-B*15:01M HLA-B*15:02M
  source 1..9: note = Severe acute respiratory syndrome coronavirus 2
LLNKHIDAY

SEQ ID NO: 8047 - protein, 9 aa, Severe acute respiratory syndrome-related coronavirus
  REGION 1..9: note = Table A: HLA-A*23:01H HLA-B*38:01H HLA-B*38:02M HLA-B*15:03M HLA-B*15:10H
  source 1..9: note = Severe acute respiratory syndrome coronavirus 2
KHIDAYKTF

SEQ ID NO: 8048 - protein, 9 aa, Severe acute respiratory syndrome-related coronavirus
  REGION 1..9: note = Table A: HLA-A*11:303M HLA-A*74:01M HLA-A*03:01H HLA-A*03:02H HLA-A*11:01H HLA-A*11:02H HLA-A*36:01M HLA-B*57:01H HLA-B*46:01H HLA-A*30:01M HLA-A*30:02H HLA-A*68:01H HLA-A*68:02H HLA-A*34:01M HLA-A*34:02H
  REGION 1..9: note = CONT. FROM ABOVE: HLA-C*07:27M HLA-C*08:03H HLA-B*37:01H HLA- A*31:01H HLA-B*57:03H HLA-A*66:01M
  source 1..9: note = Severe acute respiratory syndrome coronavirus 2
KTFPPTEPK

SEQ ID NO: 8049 - protein, 9 aa, Severe acute respiratory syndrome-related coronavirus
  REGION 1..9: note = Table A: HLA-B*48:01M HLA-B*15:03H
  source 1..9: note = Severe acute respiratory syndrome coronavirus 2
KKADETQAL

SEQ ID NO: 8050 - protein, 9 aa, Severe acute respiratory syndrome-related coronavirus
  REGION 1..9: note = Table A: HLA-A*33:01M HLA-A*33:03H HLA-A*26:03H HLA-B*18:01H HLA-B*27:02H HLA-A*68:01H HLA-A*68:02H HLA-A*34:01H HLA-A*34:02H HLA-B*07:05H
  source 1..9: note = Severe acute respiratory syndrome coronavirus 2
DETQALPQR

SEQ ID NO: 8051 - protein, 9 aa, Severe acute respiratory syndrome-related coronavirus
  REGION 1..9: note = Table A: HLA-A*33:03H HLA-A*68:02H
  source 1..9: note = Severe acute respiratory syndrome coronavirus 2
ETQALPQRQ

SEQ ID NO: 8052 - protein, 9 aa, Severe acute respiratory syndrome-related coronavirus
  REGION 1..9: note = Table A: HLA-A*03:01M HLA-A*03:02H HLA-A*11:01M HLA-A*11:02H HLA-A*34:02H HLA-C*07:27H
  source 1..9: note = Severe acute respiratory syndrome coronavirus 2
TQALPQRQK

SEQ ID NO: 8053 - protein, 9 aa, Severe acute respiratory syndrome-related coronavirus
  REGION 1..9: note = Table A: HLA-A*34:02H
  source 1..9: note = Severe acute respiratory syndrome coronavirus 2
QALPQRQKK

SEQ ID NO: 8054 - protein, 9 aa, Severe acute respiratory syndrome-related coronavirus
  REGION 1..9: note = Table A: HLA-B*15:03H
  source 1..9: note = Severe acute respiratory syndrome coronavirus 2
QKKQQTVTL

SEQ ID NO: 8055 - protein, 9 aa, Severe acute respiratory syndrome-related coronavirus
  REGION 1..9: note = Table A: HLA-B*48:01H HLA-B*15:03H
  source 1..9: note = Severe acute respiratory syndrome coronavirus 2
KKQQTVTLL

SEQ ID NO: 8056 - protein, 9 aa, Severe acute respiratory syndrome-related coronavirus
  REGION 1..9: note = Table A: HLA-B*13:02H
  source 1..9: note = Severe acute respiratory syndrome coronavirus 2
KQQTVTLLP

SEQ ID NO: 8057 - protein, 9 aa, Severe acute respiratory syndrome-related coronavirus
  REGION 1..9: note = Table A: HLA-B*39:06H
  source 1..9: note = Severe acute respiratory syndrome coronavirus 2
QQTVTLLPA

SEQ ID NO: 8058 - protein, 9 aa, Severe acute respiratory syndrome-related coronavirus
  REGION 1..9: note = Table A: HLA-B*56:01H HLA-B*55:02H HLA-A*02:05H HLA-B*39:06H HLA-B*54:01H
  source 1..9: note = Severe acute respiratory syndrome coronavirus 2
QTVTLLPAA

SEQ ID NO: 8059 - protein, 9 aa, Severe acute respiratory syndrome-related coronavirus
  REGION 1..9: note = Table A: HLA-B*53:01M HLA-B*35:03M HLA-C*15:05H HLA-B*35:01H HLA-B*35:02H HLA-B*35:08H HLA-B*35:07M HLA-B*35:12H HLA-B*39:01H HLA-B*07:05H
  source 1..9: note = Severe acute respiratory syndrome coronavirus 2
LPAADLDDF

SEQ ID NO: 8060 - protein, 9 aa, Severe acute respiratory syndrome-related coronavirus
  REGION 1..9: note = Table A: HLA-A*02:07M HLA-B*14:01H HLA-B*38:02H
  source 1..9: note = Severe acute respiratory syndrome coronavirus 2
DLDDFSKQL

SEQ ID NO: 8061 - protein, 9 aa, Severe acute respiratory syndrome-related coronavirus
  REGION 1..9: note = Table A: HLA-C*16:01H HLA-B*46:01H HLA-B*08:01H HLA-C*12:03H HLA-B*38:02H HLA-B*57:03H HLA-C*02:02H
  source 1..9: note = Severe acute respiratory syndrome coronavirus 2
FSKQLQQSM

SEQ ID NO: 8062 - protein, 9 aa, Severe acute respiratory syndrome-related coronavirus
  REGION 1..9: note = Table A: HLA-B*38:02H
  source 1..9: note = Severe acute respiratory syndrome coronavirus 2
QLQQSMSSA

SEQ ID NO: 8063 - protein, 9 aa, Severe acute respiratory syndrome-related coronavirus
  REGION 1..9: note = Table A: HLA-B*54:01H HLA-B*39:01H
  source 1..9: note = Severe acute respiratory syndrome coronavirus 2
MSSADSTQA

SEQ ID NO: 8064 - protein, 10 aa, Severe acute respiratory syndrome-related coronavirus
  REGION 1..10: note = Table A: HLA-A*68:01H
  source 1..10: note = Severe acute respiratory syndrome coronavirus 2
MSDNGPQNQR

SEQ ID NO: 8065 - protein, 10 aa, Severe acute respiratory syndrome-related coronavirus
  REGION 1..10: note = Table A: HLA-B*38:02H HLA-B*15:01H HLA-B*15:02M HLA-B*15:03H
  source 1..10: note = Severe acute respiratory syndrome coronavirus 2
NQRNAPRITF

SEQ ID NO: 8066 - protein, 10 aa, Severe acute respiratory syndrome-related coronavirus
  REGION 1..10: note = Table A: HLA-A*02:08H
  source 1..10: note = Severe acute respiratory syndrome coronavirus 2
ITFGGPSDST

SEQ ID NO: 8067 - protein, 10 aa, Severe acute respiratory syndrome-related coronavirus
  REGION 1..10: note = Table A: HLA-B*56:01H HLA-B*55:02H HLA-C*15:05H HLA-B*55:01H HLA-B*54:01H HLA-B*07:02H HLA-B*07:04H HLA-B*07:05H
  source 1..10: note = Severe acute respiratory syndrome coronavirus 2
RPQGLPNNTA

SEQ ID NO: 8068 - protein, 10 aa, Severe acute respiratory syndrome-related coronavirus
  REGION 1..10: note = Table A: HLA-B*58:01H HLA-B*57:03H
  source 1..10: note = Severe acute respiratory syndrome coronavirus 2
QGLPNNTASW

SEQ ID NO: 8069 - protein, 10 aa, Severe acute respiratory syndrome-related coronavirus
  REGION 1..10: note = Table A: HLA-B*38:01H HLA-B*38:02M HLA-B*15:01H HLA-B*15:02H HLA-B*13:01M HLA-B*13:02H
  source 1..10: note = Severe acute respiratory syndrome coronavirus 2
TQHGKEDLKF

SEQ ID NO: 8070 - protein, 10 aa, Severe acute respiratory syndrome-related coronavirus
  REGION 1..10: note = Table A: HLA-A*74:01H HLA-A*33:03H
  source 1..10: note = Severe acute respiratory syndrome coronavirus 2
HGKEDLKFPR

SEQ ID NO: 8071 - protein, 10 aa, Severe acute respiratory syndrome-related coronavirus
  REGION 1..10: note = Table A: HLA-A*36:01H HLA-A*01:01H
  source 1..10: note = Severe acute respiratory syndrome coronavirus 2
NSSPDDQIGY

SEQ ID NO: 8072 - protein, 10 aa, Severe acute respiratory syndrome-related coronavirus
  REGION 1..10: note = Table A: HLA-A*36:01H HLA-A*26:01M HLA-A*26:02H HLA-A*01:01H HLA-A*30:02H HLA-B*39:01H
  source 1..10: note = Severe acute respiratory syndrome coronavirus 2
SSPDDQIGYY

SEQ ID NO: 8073 - protein, 10 aa, Severe acute respiratory syndrome-related coronavirus
  REGION 1..10: note = Table A: HLA-A*33:03H HLA-B*27:02H HLA-A*68:01H HLA-A*34:01H HLA-A*66:01H
  source 1..10: note = Severe acute respiratory syndrome coronavirus 2
SPDDQIGYYR

SEQ ID NO: 8074 - protein, 10 aa, Severe acute respiratory syndrome-related coronavirus
  REGION 1..10: note = Table A: HLA-A*74:01H HLA-A*03:01H HLA-A*30:01H
  source 1..10: note = Severe acute respiratory syndrome coronavirus 2
RIRGGDGKMK

SEQ ID NO: 8075 - protein, 10 aa, Severe acute respiratory syndrome-related coronavirus
  REGION 1..10: note = Table A: HLA-A*33:01H
  source 1..10: note = Severe acute respiratory syndrome coronavirus 2
DGKMKDLSPR

SEQ ID NO: 8076 - protein, 10 aa, Severe acute respiratory syndrome-related coronavirus
  REGION 1..10: note = Table A: HLA-A*30:02H
  source 1..10: note = Severe acute respiratory syndrome coronavirus 2
KMKDLSPRWY

SEQ ID NO: 8077 - protein, 10 aa, Severe acute respiratory syndrome-related coronavirus
  REGION 1..10: note = Table A: HLA-C*14:02H HLA-C*14:03H HLA-B*55:02H HLA-C*08:01H HLA-B*54:01H
  source 1..10: note = Severe acute respiratory syndrome coronavirus 2
FYYLGTGPEA

SEQ ID NO: 8078 - protein, 10 aa, Severe acute respiratory syndrome-related coronavirus
  REGION 1..10: note = Table A: HLA-A*02:11H HLA-A*02:01H HLA-A*02:02M HLA-A*02:03H HLA-C*08:03H HLA-B*38:02H
  source 1..10: note = Severe acute respiratory syndrome coronavirus 2
YLGTGPEAGL

SEQ ID NO: 8079 - protein, 10 aa, Severe acute respiratory syndrome-related coronavirus
  REGION 1..10: note = Table A: HLA-A*11:01H HLA-A*36:01M HLA-A*29:01H HLA-A*29:02H HLA-A*01:01H HLA-A*30:02H HLA-C*07:27H HLA-C*08:03H HLA-B*15:01H
  source 1..10: note = Severe acute respiratory syndrome coronavirus 2
GTGPEAGLPY

SEQ ID NO: 8080 - protein, 10 aa, Severe acute respiratory syndrome-related coronavirus
  REGION 1..10: note = Table A: HLA-B*55:02H
  source 1..10: note = Severe acute respiratory syndrome coronavirus 2
GPEAGLPYGA

SEQ ID NO: 8081 - protein, 10 aa, Severe acute respiratory syndrome-related coronavirus
  REGION 1..10: note = Table A: HLA-A*33:03H HLA-A*68:01H HLA-A*34:01H HLA-A*34:02M
  source 1..10: note = Severe acute respiratory syndrome coronavirus 2
EAGLPYGANK

SEQ ID NO: 8082 - protein, 10 aa, Severe acute respiratory syndrome-related coronavirus
  REGION 1..10: note = Table A: HLA-C*15:05H HLA-B*51:01H
  source 1..10: note = Severe acute respiratory syndrome coronavirus 2
LPYGANKDGI

SEQ ID NO: 8083 - protein, 10 aa, Severe acute respiratory syndrome-related coronavirus
  REGION 1..10: note = Table A: HLA-A*11:303M HLA-A*03:01H HLA-A*03:02H HLA-A*11:01H HLA-A*11:02M HLA-A*36:01M HLA-A*30:02H HLA-A*68:01H HLA-A*34:02M HLA-C*07:27M
  source 1..10: note = Severe acute respiratory syndrome coronavirus 2
ATEGALNTPK

SEQ ID NO: 8084 - protein, 10 aa, Severe acute respiratory syndrome-related coronavirus
  REGION 1..10: note = Table A: HLA-A*26:03M HLA-A*68:01H HLA-A*34:01H HLA-A*34:02H
  source 1..10: note = Severe acute respiratory syndrome coronavirus 2
NTPKDHIGTR

SEQ ID NO: 8085 - protein, 10 aa, Severe acute respiratory syndrome-related coronavirus
  REGION 1..10: note = Table A: HLA-B*38:02H HLA-B*39:01H
  source 1..10: note = Severe acute respiratory syndrome coronavirus 2
TRNPANNAAI

SEQ ID NO: 8086 - protein, 10 aa, Severe acute respiratory syndrome-related coronavirus
  REGION 1..10: note = Table A: HLA-B*35:03M HLA-C*15:05H HLA-B*35:01H HLA-B*07:02H HLA-B*07:05H
  source 1..10: note = Severe acute respiratory syndrome coronavirus 2
NPANNAAIVL

SEQ ID NO: 8087 - protein, 10 aa, Severe acute respiratory syndrome-related coronavirus
  REGION 1..10: note = Table A: HLA-A*11:303H
  source 1..10: note = Severe acute respiratory syndrome coronavirus 2
VLQLPQGTTL

SEQ ID NO: 8088 - protein, 10 aa, Severe acute respiratory syndrome-related coronavirus
  REGION 1..10: note = Table A: HLA-A*03:01M HLA-A*03:02M HLA-A*11:01H HLA-A*11:02H HLA-A*36:01H HLA-A*34:01H HLA-A*34:02M
  source 1..10: note = Severe acute respiratory syndrome coronavirus 2
QLPQGTTLPK

SEQ ID NO: 8089 - protein, 10 aa, Severe acute respiratory syndrome-related coronavirus
  REGION 1..10: note = Table A: HLA-A*30:02H
  source 1..10: note = Severe acute respiratory syndrome coronavirus 2
QGTTLPKGFY

SEQ ID NO: 8090 - protein, 10 aa, Severe acute respiratory syndrome-related coronavirus
  REGION 1..10: note = Table A: HLA-A*02:07H
  source 1..10: note = Severe acute respiratory syndrome coronavirus 2
TLPKGFYAEG

SEQ ID NO: 8091 - protein, 10 aa, Severe acute respiratory syndrome-related coronavirus
  REGION 1..10: note = Table A: HLA-B*45:01H
  source 1..10: note = Severe acute respiratory syndrome coronavirus 2
AEGSRGGSQA

SEQ ID NO: 8092 - protein, 10 aa, Severe acute respiratory syndrome-related coronavirus
  REGION 1..10: note = Table A: HLA-B*27:05M
  source 1..10: note = Severe acute respiratory syndrome coronavirus 2
SRNSTPGSSR

SEQ ID NO: 8093 - protein, 10 aa, Severe acute respiratory syndrome-related coronavirus
  REGION 1..10: note = Table A: HLA-C*15:05H
  source 1..10: note = Severe acute respiratory syndrome coronavirus 2
TPGSSRGTSP

SEQ ID NO: 8094 - protein, 10 aa, Severe acute respiratory syndrome-related coronavirus
  REGION 1..10: note = Table A: HLA-B*35:03M HLA-B*35:01H HLA-B*35:02M HLA-B*35:12H HLA-B*38:02H HLA-B*39:01H
  source 1..10: note = Severe acute respiratory syndrome coronavirus 2
MAGNGGDAAL

SEQ ID NO: 8095 - protein, 10 aa, Severe acute respiratory syndrome-related coronavirus
  REGION 1..10: note = Table A: HLA-A*02:04H HLA-A*02:02M
  source 1..10: note = Severe acute respiratory syndrome coronavirus 2
ALALLLLDRL

SEQ ID NO: 8096 - protein, 10 aa, Severe acute respiratory syndrome-related coronavirus
  REGION 1..10: note = Table A: HLA-A*02:04M HLA-A*02:02H
  source 1..10: note = Severe acute respiratory syndrome coronavirus 2
LLLLDRLNQL

SEQ ID NO: 8097 - protein, 10 aa, Severe acute respiratory syndrome-related coronavirus
  REGION 1..10: note = Table A: HLA-B*14:02H HLA-B*14:01H
  source 1..10: note = Severe acute respiratory syndrome coronavirus 2
DRLNQLESKM

SEQ ID NO: 8098 - protein, 10 aa, Severe acute respiratory syndrome-related coronavirus
  REGION 1..10: note = Table A: HLA-B*48:01H HLA-C*08:03H HLA-B*15:01H
  source 1..10: note = Severe acute respiratory syndrome coronavirus 2
GQQQQGQTVT

SEQ ID NO: 8099 - protein, 10 aa, Severe acute respiratory syndrome-related coronavirus
  REGION 1..10: note = Table A: HLA-A*11:303H HLA-A*03:02M HLA-A*11:01H HLA-A*11:02H HLA-A*30:02H
  source 1..10: note = Severe acute respiratory syndrome coronavirus 2
QQQQGQTVTK

SEQ ID NO: 8100 - protein, 10 aa, Severe acute respiratory syndrome-related coronavirus
  REGION 1..10: note = Table A: HLA-A*03:01H HLA-A*03:02M HLA-A*11:01H
  source 1..10: note = Severe acute respiratory syndrome coronavirus 2
QQQGQTVTKK

SEQ ID NO: 8101 - protein, 10 aa, Severe acute respiratory syndrome-related coronavirus
  REGION 1..10: note = Table A: HLA-A*33:03H HLA-A*26:03H HLA-A*68:01M HLA-A*34:01M HLA-A*34:02H HLA-A*66:01M
  source 1..10: note = Severe acute respiratory syndrome coronavirus 2
SAAEASKKPR

SEQ ID NO: 8102 - protein, 10 aa, Severe acute respiratory syndrome-related coronavirus
  REGION 1..10: note = Table A: HLA-A*30:02H HLA-B*15:01M HLA-B*15:03H
  source 1..10: note = Severe acute respiratory syndrome coronavirus 2
RQKRTATKAY

SEQ ID NO: 8103 - protein, 10 aa, Severe acute respiratory syndrome-related coronavirus
  REGION 1..10: note = Table A: HLA-A*02:08H
  source 1..10: note = Severe acute respiratory syndrome coronavirus 2
ATKAYNVTQA

SEQ ID NO: 8104 - protein, 10 aa, Severe acute respiratory syndrome-related coronavirus
  REGION 1..10: note = Table A: HLA-B*38:02H HLA-B*15:03M
  source 1..10: note = Severe acute respiratory syndrome coronavirus 2
TKAYNVTQAF

SEQ ID NO: 8105 - protein, 10 aa, Severe acute respiratory syndrome-related coronavirus
  REGION 1..10: note = Table A: HLA-B*58:01H HLA-A*03:01H HLA-A*02:11H HLA-A*30:02H HLA-A*68:02H HLA-B*57:03H
  source 1..10: note = Severe acute respiratory syndrome coronavirus 2
KAYNVTQAFG

SEQ ID NO: 8106 - protein, 10 aa, Severe acute respiratory syndrome-related coronavirus
  REGION 1..10: note = Table A: HLA-B*27:02H
  source 1..10: note = Severe acute respiratory syndrome coronavirus 2
AYNVTQAFGR

SEQ ID NO: 8107 - protein, 10 aa, Severe acute respiratory syndrome-related coronavirus
  REGION 1..10: note = Table A: HLA-A*66:01H
  source 1..10: note = Severe acute respiratory syndrome coronavirus 2
YNVTQAFGRR

SEQ ID NO: 8108 - protein, 10 aa, Severe acute respiratory syndrome-related coronavirus
  REGION 1..10: note = Table A: HLA-B*57:03H
  source 1..10: note = Severe acute respiratory syndrome coronavirus 2
RGPEQTQGNF

SEQ ID NO: 8109 - protein, 10 aa, Severe acute respiratory syndrome-related coronavirus
  REGION 1..10: note = Table A: HLA-B*44:02M HLA-B*44:05H HLA-B*44:03M
  source 1..10: note = Severe acute respiratory syndrome coronavirus 2
QELIRQGTDY

SEQ ID NO: 8110 - protein, 10 aa, Severe acute respiratory syndrome-related coronavirus
  REGION 1..10: note = Table A: HLA-A*34:02H
  source 1..10: note = Severe acute respiratory syndrome coronavirus 2
ELIRQGTDYK

SEQ ID NO: 8111 - protein, 10 aa, Severe acute respiratory syndrome-related coronavirus
  REGION 1..10: note = Table A: HLA-B*50:01H
  source 1..10: note = Severe acute respiratory syndrome coronavirus 2
TDYKHWPQIA

SEQ ID NO: 8112 - protein, 10 aa, Severe acute respiratory syndrome-related coronavirus
  REGION 1..10: note = Table A: HLA-B*15:03M
  source 1..10: note = Severe acute respiratory syndrome coronavirus 2
YKHWPQIAQF

SEQ ID NO: 8113 - protein, 10 aa, Severe acute respiratory syndrome-related coronavirus
  REGION 1..10: note = Table A: HLA-B*44:05H HLA-B*46:01H HLA-B*38:02H HLA-B*15:01H HLA-B*15:02H HLA-B*15:03H
  source 1..10: note = Severe acute respiratory syndrome coronavirus 2
AQFAPSASAF

SEQ ID NO: 8114 - protein, 10 aa, Severe acute respiratory syndrome-related coronavirus
  REGION 1..10: note = Table A: HLA-C*14:03H HLA-A*24:02M HLA-A*24:07M HLA-A*23:01H
  source 1..10: note = Severe acute respiratory syndrome coronavirus 2
QFAPSASAFF

SEQ ID NO: 8115 - protein, 10 aa, Severe acute respiratory syndrome-related coronavirus
  REGION 1..10: note = Table A: HLA-C*15:05M HLA-B*07:05H
  source 1..10: note = Severe acute respiratory syndrome coronavirus 2
APSASAFFGM

SEQ ID NO: 8116 - protein, 10 aa, Severe acute respiratory syndrome-related coronavirus
  REGION 1..10: note = Table A: HLA-A*68:01H HLA-A*66:01M
  source 1..10: note = Severe acute respiratory syndrome coronavirus 2
SASAFFGMSR

SEQ ID NO: 8117 - protein, 10 aa, Severe acute respiratory syndrome-related coronavirus
  REGION 1..10: note = Table A: HLA-C*14:03H
  source 1..10: note = Severe acute respiratory syndrome coronavirus 2
AFFGMSRIGM

SEQ ID NO: 8118 - protein, 10 aa, Severe acute respiratory syndrome-related coronavirus
  REGION 1..10: note = Table A: HLA-A*02:11H
  source 1..10: note = Severe acute respiratory syndrome coronavirus 2
FGMSRIGMEV

SEQ ID NO: 8119 - protein, 10 aa, Severe acute respiratory syndrome-related coronavirus
  REGION 1..10: note = Table A: HLA-B*44:05H HLA-B*40:01H HLA-B*40:02H HLA-B*49:01H
  source 1..10: note = Severe acute respiratory syndrome coronavirus 2
MEVTPSGTWL

SEQ ID NO: 8120 - protein, 10 aa, Severe acute respiratory syndrome-related coronavirus
  REGION 1..10: note = Table A: HLA-A*36:01H HLA-B*46:01H HLA-A*29:01H HLA-A*29:02H HLA-A*30:02H
  source 1..10: note = Severe acute respiratory syndrome coronavirus 2
VTPSGTWLTY

SEQ ID NO: 8121 - protein, 10 aa, Severe acute respiratory syndrome-related coronavirus
  REGION 1..10: note = Table A: HLA-A*03:01H HLA-A*03:02H HLA-A*36:01H
  source 1..10: note = Severe acute respiratory syndrome coronavirus 2
KLDDKDPNFK

SEQ ID NO: 8122 - protein, 10 aa, Severe acute respiratory syndrome-related coronavirus
  REGION 1..10: note = Table A: HLA-B*35:03H
  source 1..10: note = Severe acute respiratory syndrome coronavirus 2
DPNFKDQVIL

SEQ ID NO: 8123 - protein, 10 aa, Severe acute respiratory syndrome-related coronavirus
  REGION 1..10: note = Table A: HLA-A*36:01H HLA-A*29:02H HLA-A*30:02M HLA-B*38:02M HLA-B*15:01H HLA-B*15:02H
  source 1..10: note = Severe acute respiratory syndrome coronavirus 2
ILLNKHIDAY

SEQ ID NO: 8124 - protein, 10 aa, Severe acute respiratory syndrome-related coronavirus
  REGION 1..10: note = Table A: HLA-A*11:303H HLA-A*74:01H HLA-A*03:01M HLA-A*03:02M HLA-A*11:01M HLA-A*11:02M HLA-A*36:01H HLA-A*30:01M HLA-A*30:02M HLA-A*34:02H HLA-C*07:27M
  source 1..10: note = Severe acute respiratory syndrome coronavirus 2
KTFPPTEPKK

SEQ ID NO: 8125 - protein, 10 aa, Severe acute respiratory syndrome-related coronavirus
  REGION 1..10: note = Table A: HLA-A*36:01H
  source 1..10: note = Severe acute respiratory syndrome coronavirus 2
KADETQALPQ

SEQ ID NO: 8126 - protein, 10 aa, Severe acute respiratory syndrome-related coronavirus
  REGION 1..10: note = Table A: HLA-A*03:02H HLA-A*11:01H HLA-A*33:03M HLA-A*26:03H HLA-A*68:01M HLA-A*34:01H HLA-A*34:02H HLA-A*66:01H
  source 1..10: note = Severe acute respiratory syndrome coronavirus 2
ETQALPQRQK

SEQ ID NO: 8127 - protein, 10 aa, Severe acute respiratory syndrome-related coronavirus
  REGION 1..10: note = Table A: HLA-B*07:04H HLA-B*15:01H
  source 1..10: note = Severe acute respiratory syndrome coronavirus 2
RQKKQQTVTL

SEQ ID NO: 8128 - protein, 10 aa, Severe acute respiratory syndrome-related coronavirus
  REGION 1..10: note = Table A: HLA-A*02:08H
  source 1..10: note = Severe acute respiratory syndrome coronavirus 2
KQLQQSMSSA

SEQ ID NO: 8129 - protein, 10 aa, Severe acute respiratory syndrome-related coronavirus
  REGION 1..10: note = Table A: HLA-A*02:03H HLA-B*38:02H HLA-B*39:01H
  source 1..10: note = Severe acute respiratory syndrome coronavirus 2
SMSSADSTQA

SEQ ID NO: 8130 - protein, 11 aa, Severe acute respiratory syndrome-related coronavirus
  REGION 1..11: note = Table A: HLA-B*39:01H
  source 1..11: note = Severe acute respiratory syndrome coronavirus 2
FGGPSDSTGSN

SEQ ID NO: 8131 - protein, 11 aa, Severe acute respiratory syndrome-related coronavirus
  REGION 1..11: note = Table A: HLA-B*39:06H
  source 1..11: note = Severe acute respiratory syndrome coronavirus 2
RRPQGLPNNTA

SEQ ID NO: 8132 - protein, 11 aa, Severe acute respiratory syndrome-related coronavirus
  REGION 1..11: note = Table A: HLA-B*55:02H
  source 1..11: note = Severe acute respiratory syndrome coronavirus 2
RPQGLPNNTAS

SEQ ID NO: 8133 - protein, 11 aa, Severe acute respiratory syndrome-related coronavirus
  REGION 1..11: note = Table A: HLA-B*55:02H HLA-B*54:01H
  source 1..11: note = Severe acute respiratory syndrome coronavirus 2
LPNNTASWFTA

SEQ ID NO: 8134 - protein, 11 aa, Severe acute respiratory syndrome-related coronavirus
  REGION 1..11: note = Table A: HLA-B*57:03H
  source 1..11: note = Severe acute respiratory syndrome coronavirus 2
LTQHGKEDLKF

SEQ ID NO: 8135 - protein, 11 aa, Severe acute respiratory syndrome-related coronavirus
  REGION 1..11: note = Table A: HLA-A*36:01H HLA-A*26:01H HLA-A*01:01M HLA-A*30:02H
  source 1..11: note = Severe acute respiratory syndrome coronavirus 2
NSSPDDQIGYY

SEQ ID NO: 8136 - protein, 11 aa, Severe acute respiratory syndrome-related coronavirus
  REGION 1..11: note = Table A: HLA-A*74:01H HLA-A*11:01H HLA-A*11:02H HLA-A*33:03H HLA-A*68:01M HLA-A*68:02H HLA-A*66:01H
  source 1..11: note = Severe acute respiratory syndrome coronavirus 2
SSPDDQIGYYR

SEQ ID NO: 8137 - protein, 11 aa, Severe acute respiratory syndrome-related coronavirus
  REGION 1..11: note = Table A: HLA-B*15:03H
  source 1..11: note = Severe acute respiratory syndrome coronavirus 2
GKMKDLSPRWY

SEQ ID NO: 8138 - protein, 11 aa, Severe acute respiratory syndrome-related coronavirus
  REGION 1..11: note = Table A: HLA-A*74:01H HLA-A*02:11H HLA-A*32:01H
  source 1..11: note = Severe acute respiratory syndrome coronavirus 2
KMKDLSPRWYF

SEQ ID NO: 8139 - protein, 11 aa, Severe acute respiratory syndrome-related coronavirus
  REGION 1..11: note = Table A: HLA-A*03:02H HLA-A*11:01H
  source 1..11: note = Severe acute respiratory syndrome coronavirus 2
VATEGALNTPK

SEQ ID NO: 8140 - protein, 11 aa, Severe acute respiratory syndrome-related coronavirus
  REGION 1..11: note = Table A: HLA-A*33:01H HLA-A*33:03H
  source 1..11: note = Severe acute respiratory syndrome coronavirus 2
LNTPKDHIGTR

SEQ ID NO: 8141 - protein, 11 aa, Severe acute respiratory syndrome-related coronavirus
  REGION 1..11: note = Table A: HLA-A*02:11M HLA-C*15:05H HLA-A*02:04H HLA-C*08:01H HLA-B*38:02H HLA-B*07:05H HLA-B*57:03H
  source 1..11: note = Severe acute respiratory syndrome coronavirus 2
IVLQLPQGTTL

SEQ ID NO: 8142 - protein, 11 aa, Severe acute respiratory syndrome-related coronavirus
  REGION 1..11: note = Table A: HLA-A*11:01H HLA-A*11:02H
  source 1..11: note = Severe acute respiratory syndrome coronavirus 2
LQLPQGTTLPK

SEQ ID NO: 8143 - protein, 11 aa, Severe acute respiratory syndrome-related coronavirus
  REGION 1..11: note = Table A: HLA-A*31:01H
  source 1..11: note = Severe acute respiratory syndrome coronavirus 2
TTLPKGFYAEG

SEQ ID NO: 8144 - protein, 11 aa, Severe acute respiratory syndrome-related coronavirus
  REGION 1..11: note = Table A: HLA-A*74:01H HLA-A*31:01H
  source 1..11: note = Severe acute respiratory syndrome coronavirus 2
GSRGGSQASSR

SEQ ID NO: 8145 - protein, 11 aa, Severe acute respiratory syndrome-related coronavirus
  REGION 1..11: note = Table A: HLA-A*74:01H HLA-A*33:03H HLA-A*31:01H HLA-A*66:01H
  source 1..11: note = Severe acute respiratory syndrome coronavirus 2
SSRNSTPGSSR

SEQ ID NO: 8146 - protein, 11 aa, Severe acute respiratory syndrome-related coronavirus
  REGION 1..11: note = Table A: HLA-A*02:02H HLA-B*13:01H
  source 1..11: note = Severe acute respiratory syndrome coronavirus 2
RMAGNGGDAAL

SEQ ID NO: 8147 - protein, 11 aa, Severe acute respiratory syndrome-related coronavirus
  REGION 1..11: note = Table A: HLA-A*02:11M HLA-A*02:04M
  source 1..11: note = Severe acute respiratory syndrome coronavirus 2
ALLLLDRLNQL

SEQ ID NO: 8148 - protein, 11 aa, Severe acute respiratory syndrome-related coronavirus
  REGION 1..11: note = Table A: HLA-A*74:01H
  source 1..11: note = Severe acute respiratory syndrome coronavirus 2
RLNQLESKMSG

SEQ ID NO: 8149 - protein, 11 aa, Severe acute respiratory syndrome-related coronavirus
  REGION 1..11: note = Table A: HLA-A*02:02H
  source 1..11: note = Severe acute respiratory syndrome coronavirus 2
KMSGKGQQQQG

SEQ ID NO: 8150 - protein, 11 aa, Severe acute respiratory syndrome-related coronavirus
  REGION 1..11: note = Table A: HLA-A*11:303M HLA-A*03:01H HLA-A*03:02H HLA-A*11:01M HLA-A*11:02M HLA-B*27:05H HLA-B*27:02M HLA-A*30:02M HLA-C*07:27M HLA-B*15:01H HLA-B*13:02H
  source 1..11: note = Severe acute respiratory syndrome coronavirus 2
GQQQQGQTVTK

SEQ ID NO: 8151 - protein, 11 aa, Severe acute respiratory syndrome-related coronavirus
  REGION 1..11: note = Table A: HLA-A*03:02H
  source 1..11: note = Severe acute respiratory syndrome coronavirus 2
QQQQGQTVTKK

SEQ ID NO: 8152 - protein, 11 aa, Severe acute respiratory syndrome-related coronavirus
  REGION 1..11: note = Table A: HLA-A*74:01M
  source 1..11: note = Severe acute respiratory syndrome coronavirus 2
KSAAEASKKPR

SEQ ID NO: 8153 - protein, 11 aa, Severe acute respiratory syndrome-related coronavirus
  REGION 1..11: note = Table A: HLA-B*15:01H HLA-B*57:03H
  source 1..11: note = Severe acute respiratory syndrome coronavirus 2
ATKAYNVTQAF

SEQ ID NO: 8154 - protein, 11 aa, Severe acute respiratory syndrome-related coronavirus
  REGION 1..11: note = Table A: HLA-A*74:01H HLA-A*03:02H HLA-A*11:01H HLA-A*11:02H HLA-A*36:01H HLA-A*68:01H HLA-A*31:01H HLA-A*66:01H
  source 1..11: note = Severe acute respiratory syndrome coronavirus 2
KAYNVTQAFGR

SEQ ID NO: 8155 - protein, 11 aa, Severe acute respiratory syndrome-related coronavirus
  REGION 1..11: note = Table A: HLA-B*15:02H
  source 1..11: note = Severe acute respiratory syndrome coronavirus 2
DQELIRQGTDY

SEQ ID NO: 8156 - protein, 11 aa, Severe acute respiratory syndrome-related coronavirus
  REGION 1..11: note = Table A: HLA-A*24:07H HLA-A*23:01H
  source 1..11: note = Severe acute respiratory syndrome coronavirus 2
DYKHWPQIAQF

SEQ ID NO: 8157 - protein, 11 aa, Severe acute respiratory syndrome-related coronavirus
  REGION 1..11: note = Table A: HLA-B*54:01H
  source 1..11: note = Severe acute respiratory syndrome coronavirus 2
WPQIAQFAPSA

SEQ ID NO: 8158 - protein, 11 aa, Severe acute respiratory syndrome-related coronavirus
  REGION 1..11: note = Table A: HLA-A*30:02H HLA-B*38:02H HLA-B*15:01M HLA-B*15:03H HLA-B*13:01H
  source 1..11: note = Severe acute respiratory syndrome coronavirus 2
AQFAPSASAFF

SEQ ID NO: 8159 - protein, 11 aa, Severe acute respiratory syndrome-related coronavirus
  REGION 1..11: note = Table A: HLA-A*02:02H
  source 1..11: note = Severe acute respiratory syndrome coronavirus 2
GMSRIGMEVTP

SEQ ID NO: 8160 - protein, 11 aa, Severe acute respiratory syndrome-related coronavirus
  REGION 1..11: note = Table A: HLA-B*58:01M HLA-B*57:01H HLA-B*53:01H HLA-B*57:03M
  source 1..11: note = Severe acute respiratory syndrome coronavirus 2
IGMEVTPSGTW

SEQ ID NO: 8161 - protein, 11 aa, Severe acute respiratory syndrome-related coronavirus
  REGION 1..11: note = Table A: HLA-A*25:01M HLA-A*26:01M HLA-A*26:02H HLA-A*26:03H HLA-A*34:02H
  source 1..11: note = Severe acute respiratory syndrome coronavirus 2
EVTPSGTWLTY

SEQ ID NO: 8162 - protein, 11 aa, Severe acute respiratory syndrome-related coronavirus
  REGION 1..11: note = Table A: HLA-A*30:02H
  source 1..11: note = Severe acute respiratory syndrome coronavirus 2
VILLNKHIDAY

SEQ ID NO: 8163 - protein, 11 aa, Severe acute respiratory syndrome-related coronavirus
  REGION 1..11: note = Table A: HLA-A*30:01H
  source 1..11: note = Severe acute respiratory syndrome coronavirus 2
AYKTFPPTEPK

SEQ ID NO: 8164 - protein, 11 aa, Severe acute respiratory syndrome-related coronavirus
  REGION 1..11: note = Table A: HLA-A*36:01H
  source 1..11: note = Severe acute respiratory syndrome coronavirus 2
KADETQALPQR

SEQ ID NO: 8165 - protein, 11 aa, Severe acute respiratory syndrome-related coronavirus
  REGION 1..11: note = Table A: HLA-A*33:03H
  source 1..11: note = Severe acute respiratory syndrome coronavirus 2
ETQALPQRQKK

SEQ ID NO: 8166 - protein, 11 aa, Severe acute respiratory syndrome-related coronavirus
  REGION 1..11: note = Table A: HLA-B*07:04H
  source 1..11: note = Severe acute respiratory syndrome coronavirus 2
LPQRQKKQQTV

SEQ ID NO: 8167 - protein, 11 aa, Severe acute respiratory syndrome-related coronavirus
  REGION 1..11: note = Table A: HLA-B*38:02H
  source 1..11: note = Severe acute respiratory syndrome coronavirus 2
TLLPAADLDDF

SEQ ID NO: 8168 - protein, 11 aa, Severe acute respiratory syndrome-related coronavirus
  REGION 1..11: note = Table A: HLA-C*08:02H
  source 1..11: note = Severe acute respiratory syndrome coronavirus 2
AADLDDFSKQL

SEQ ID NO: 8169 - protein, 8 aa, Severe acute respiratory syndrome-related coronavirus
  REGION 1..8: note = Table A: HLA-B*46:01H HLA-C*03:02M HLA-B*35:07M HLA-B*38:02H HLA-B*15:02H
  source 1..8: note = Severe acute respiratory syndrome coronavirus 2
FAFPFTIY

SEQ ID NO: 8170 - protein, 8 aa, Severe acute respiratory syndrome-related coronavirus
  REGION 1..8: note = Table A: HLA-B*35:03H HLA-C*15:05H HLA-B*35:01H HLA-B*51:01H HLA-B*35:07M HLA-C*08:01H HLA-B*38:02H HLA-B*54:01H HLA-B*15:02H HLA-B*07:05H
  source 1..8: note = Severe acute respiratory syndrome coronavirus 2
FPFTIYSL

SEQ ID NO: 8171 - protein, 8 aa, Severe acute respiratory syndrome-related coronavirus
  REGION 1..8: note = Table A: HLA-B*39:06H
  source 1..8: note = Severe acute respiratory syndrome coronavirus 2
SRNYIAQV

SEQ ID NO: 8172 - protein, 8 aa, Severe acute respiratory syndrome-related coronavirus
  REGION 1..8: note = Table A: HLA-B*38:02H
  source 1..8: note = Severe acute respiratory syndrome coronavirus 2
YIAQVDVV

SEQ ID NO: 8173 - protein, 8 aa, Severe acute respiratory syndrome-related coronavirus
  REGION 1..8: note = Table A: HLA-B*44:05H HLA-B*38:02H HLA-B*15:01M HLA-B*15:03H
  source 1..8: note = Severe acute respiratory syndrome coronavirus 2
AQVDVVNF

SEQ ID NO: 8174 - protein, 8 aa, Severe acute respiratory syndrome-related coronavirus
  REGION 1..8: note = Table A: HLA-B*37:01H HLA-B*40:02H HLA-B*41:02H
  source 1..8: note = Severe acute respiratory syndrome coronavirus 2
VDVVNFNL

SEQ ID NO: 8175 - protein, 9 aa, Severe acute respiratory syndrome-related coronavirus
  REGION 1..9: note = Table A: HLA-A*02:11M HLA-A*68:02M HLA-A*02:04H HLA-A*02:07H HLA-A*02:03H HLA-B*51:01H HLA-C*08:01H HLA-B*38:02H HLA-B*40:06H HLA-B*07:05H HLA-B*13:02H
  source 1..9: note = Severe acute respiratory syndrome coronavirus 2
NVFAFPFTI

SEQ ID NO: 8176 - protein, 9 aa, Severe acute respiratory syndrome-related coronavirus
  REGION 1..9: note = Table A: HLA-C*14:03H HLA-A*29:02H
  source 1..9: note = Severe acute respiratory syndrome coronavirus 2
VFAFPFTIY

SEQ ID NO: 8177 - protein, 9 aa, Severe acute respiratory syndrome-related coronavirus
  REGION 1..9: note = Table A: HLA-C*14:02M HLA-C*14:03M HLA-A*24:07H
  source 1..9: note = Severe acute respiratory syndrome coronavirus 2
AFPFTIYSL

SEQ ID NO: 8178 - protein, 9 aa, Severe acute respiratory syndrome-related coronavirus
  REGION 1..9: note = Table A: HLA-B*53:01H HLA-B*35:03H HLA-B*35:07H
  source 1..9: note = Severe acute respiratory syndrome coronavirus 2
FPFTIYSLL

SEQ ID NO: 8179 - protein, 9 aa, Severe acute respiratory syndrome-related coronavirus
  REGION 1..9: note = Table A: HLA-A*24:07H
  source 1..9: note = Severe acute respiratory syndrome coronavirus 2
PFTIYSLLL

SEQ ID NO: 8180 - protein, 9 aa, Severe acute respiratory syndrome-related coronavirus
  REGION 1..9: note = Table A: HLA-A*02:02H
  source 1..9: note = Severe acute respiratory syndrome coronavirus 2
RMNSRNYIA

SEQ ID NO: 8181 - protein, 9 aa, Severe acute respiratory syndrome-related coronavirus
  REGION 1..9: note = Table A: HLA-A*68:02H HLA-C*15:05H HLA-C*15:02H HLA-A*02:03H HLA-B*52:01H HLA-B*38:02H
  source 1..9: note = Severe acute respiratory syndrome coronavirus 2
NSRNYIAQV

SEQ ID NO: 8182 - protein, 9 aa, Severe acute respiratory syndrome-related coronavirus
  REGION 1..9: note = Table A: HLA-C*15:02H
  source 1..9: note = Severe acute respiratory syndrome coronavirus 2
RNYIAQVDV

SEQ ID NO: 8183 - protein, 9 aa, Severe acute respiratory syndrome-related coronavirus
  REGION 1..9: note = Table A: HLA-C*14:03H HLA-A*24:02H HLA-C*08:01H HLA-B*38:02H HLA-B*39:01M
  source 1..9: note = Severe acute respiratory syndrome coronavirus 2
NYIAQVDVV

SEQ ID NO: 8184 - protein, 9 aa, Severe acute respiratory syndrome-related coronavirus
  REGION 1..9: note = Table A: HLA-B*58:01H HLA-A*11:303H HLA-B*57:01H HLA-B*46:01H HLA-C*04:03M HLA-B*53:01M HLA-B*35:03H HLA-C*15:05H HLA-C*12:02H HLA-B*35:01M HLA-B*35:02H HLA-B*35:08M HLA-B*35:07H HLA-C*08:01H HLA-B*35:12H
  REGION 1..9: note = CONT. FROM ABOVE: HLA-B*38:02H HLA-B*15:01H HLA-B*07:05H HLA- B*57:03M HLA-C*02:02H HLA-C*05:01H
  source 1..9: note = Severe acute respiratory syndrome coronavirus 2
IAQVDVVNF

SEQ ID NO: 8185 - protein, 9 aa, Severe acute respiratory syndrome-related coronavirus
  REGION 1..9: note = Table A: HLA-C*04:03M HLA-A*02:11H HLA-A*02:06H HLA-A*02:07H HLA-A*02:01H HLA-B*35:02H HLA-C*08:01H HLA-C*08:02M HLA-B*35:12H HLA-B*38:02H
  source 1..9: note = Severe acute respiratory syndrome coronavirus 2
QVDVVNFNL

SEQ ID NO: 8186 - protein, 9 aa, Severe acute respiratory syndrome-related coronavirus
  REGION 1..9: note = Table A: HLA-C*08:03H HLA-B*40:02H HLA-B*50:01H
  source 1..9: note = Severe acute respiratory syndrome coronavirus 2
VDVVNFNLT

SEQ ID NO: 8187 - protein, 10 aa, Severe acute respiratory syndrome-related coronavirus
  REGION 1..10: note = Table A: HLA-A*29:02H
  source 1..10: note = Severe acute respiratory syndrome coronavirus 2
GYINVFAFPF

SEQ ID NO: 8188 - protein, 10 aa, Severe acute respiratory syndrome-related coronavirus
  REGION 1..10: note = Table A: HLA-C*16:01H HLA-B*46:01H HLA-C*03:03H HLA-A*02:11H HLA-C*03:02H HLA-C*03:04M HLA-A*68:02H HLA-C*12:03H HLA-A*02:04M HLA-A*02:05M HLA-A*02:02M HLA-A*02:03H HLA-C*17:01H
  source 1..10: note = Severe acute respiratory syndrome coronavirus 2
FAFPFTIYSL

SEQ ID NO: 8189 - protein, 10 aa, Severe acute respiratory syndrome-related coronavirus
  REGION 1..10: note = Table A: HLA-A*26:02H HLA-A*68:02H HLA-A*02:05H HLA-B*35:01H HLA-B*38:02H HLA-B*15:01H HLA-B*57:03H
  source 1..10: note = Severe acute respiratory syndrome coronavirus 2
YIAQVDVVNF

SEQ ID NO: 8190 - protein, 10 aa, Severe acute respiratory syndrome-related coronavirus
  REGION 1..10: note = Table A: HLA-B*48:01H HLA-A*02:11H HLA-A*02:04M HLA-A*02:05M HLA-A*02:06M HLA-A*02:08H HLA-A*02:01H HLA-A*02:02M HLA-C*08:01H HLA-B*38:02H HLA-B*40:06H HLA-B*13:01H HLA-B*13:02M
  source 1..10: note = Severe acute respiratory syndrome coronavirus 2
AQVDVVNFNL

SEQ ID NO: 8191 - protein, 10 aa, Severe acute respiratory syndrome-related coronavirus
  REGION 1..10: note = Table A: HLA-C*08:03H
  source 1..10: note = Severe acute respiratory syndrome coronavirus 2
QVDVVNFNLT

SEQ ID NO: 8192 - protein, 11 aa, Severe acute respiratory syndrome-related coronavirus
  REGION 1..11: note = Table A: HLA-C*17:01H
  source 1..11: note = Severe acute respiratory syndrome coronavirus 2
FAFPFTIYSLL

SEQ ID NO: 8193 - protein, 11 aa, Severe acute respiratory syndrome-related coronavirus
  REGION 1..11: note = Table A: HLA-A*02:11H
  source 1..11: note = Severe acute respiratory syndrome coronavirus 2
RMNSRNYIAQV

SEQ ID NO: 8194 - protein, 11 aa, Severe acute respiratory syndrome-related coronavirus
  REGION 1..11: note = Table A: HLA-C*14:03H HLA-A*24:02M HLA-A*24:07M HLA-C*08:01H HLA-A*23:01M
  source 1..11: note = Severe acute respiratory syndrome coronavirus 2
NYIAQVDVVNF

SEQ ID NO: 8195 - protein, 11 aa, Severe acute respiratory syndrome-related coronavirus
  REGION 1..11: note = Table A: HLA-B*48:01H HLA-C*06:02H HLA-B*27:02H HLA-A*68:02H HLA-A*02:05M HLA-A*02:06M HLA-C*08:01H HLA-C*08:03H HLA-B*38:02H HLA-B*40:06H HLA-B*39:01H HLA-B*13:02H
  source 1..11: note = Severe acute respiratory syndrome coronavirus 2
AQVDVVNFNLT

SEQ ID NO: 8196 - protein, 12 aa, Severe acute respiratory syndrome-related coronavirus
  REGION 1..12: note = Table B: HLA-DQA1*03:02-B1*03:03L HLA-DQA1*05:01-B1*03:01L HLA-DRB1*01:03L HLA-DRB1*04:05L HLA-DRB1*01:02L HLA-DQA1*01:01-B1*05:01L HLA-DQA1*05:05-B1*03:19L HLA-DQA1*05:01-B1*02:01L HLA-DRB1*04:08L HLA-DRB1*15:03L
  source 1..12: note = Severe acute respiratory syndrome coronavirus 2
ESLVPGFNEKTH

SEQ ID NO: 8197 - protein, 11 aa, Severe acute respiratory syndrome-related coronavirus
  REGION 1..11: note = Table B: HLA-DQA1*03:02-B1*03:03L HLA-DQA1*05:01-B1*03:01L HLA-DRB1*04:03L HLA-DRB1*13:03L HLA-DRB1*01:03L HLA-DRB1*04:02L HLA-DRB1*04:05L HLA-DQA1*01:02-B1*06:02L HLA-DRB1*14:01L HLA-DQA1*01:01-B1*05:01L HLA-DRB1*08:01L
  REGION 1..11: note = CONT. FROM ABOVE: HLA-DQA1*05:01-B1*02:01L HLA-DRB1*12:01L HLA-D RB1*14:17L HLA-DPA1*01:02-B1*04:01L HLA-DRB1*16:01L HLA-DQA1*01: 03-B1*06:01L HLA-DRB1*04:08L HLA-DQA1*02:01-B1*03:03L
  source 1..11: note = Severe acute respiratory syndrome coronavirus 2
VPGFNEKTHVQ

SEQ ID NO: 8198 - protein, 10 aa, Severe acute respiratory syndrome-related coronavirus
  REGION 1..10: note = Table B: HLA-DQA1*03:02-B1*03:03L HLA-DQA1*05:05-B1*03:19L
  source 1..10: note = Severe acute respiratory syndrome coronavirus 2
NEKTHVQLSL

SEQ ID NO: 8199 - protein, 10 aa, Severe acute respiratory syndrome-related coronavirus
  REGION 1..10: note = Table B: HLA-DQA1*03:02-B1*03:03L HLA-DQA1*05:05-B1*03:19L HLA-DQA1*03:01-B1*03:02L HLA-DPA1*01:03-B1*104:01L HLA-DQA1*02:01-B1*03:03L HLA-DRB1*15:03L
  source 1..10: note = Severe acute respiratory syndrome coronavirus 2
VQLSLPVLQV

SEQ ID NO: 8200 - protein, 10 aa, Severe acute respiratory syndrome-related coronavirus
  REGION 1..10: note = Table B: HLA-DQA1*03:02-B1*03:03L HLA-DQA1*05:01-B1*03:01L HLA-DRB1*13:03L HLA-DQA1*01:02-B1*06:02L HLA-DPA1*03:01-B1*04:02L HLA-DRB1*14:01L HLA-DQA1*01-B1*05L HLA-DQA1*05:01-B1*02:01L HLA-DPA1*03:01-B1*105:01L
  REGION 1..10: note = CONT. FROM ABOVE: HLA-DQA1*03:01-B1*03:02L HLA-DPA1*01:02-B1*04: 01L HLA-DQA1*02:01-B1*03:03L
  source 1..10: note = Severe acute respiratory syndrome coronavirus 2
LPVLQVRDVL

SEQ ID NO: 8201 - protein, 12 aa, Severe acute respiratory syndrome-related coronavirus
  REGION 1..12: note = Table B: HLA-DQA1*03:02-B1*03:03L HLA-DQA1*05:01-B1*03:01L HLA-DRB1*13:03L HLA-DRB1*01:03L HLA-DRB1*04:05L HLA-DQA1*01:02-B1*06:02L HLA-DRB1*01:02L HLA-DRB3*02:01L HLA-DPA1*01:03-B1*03:01L HLA-DPA1*03:01-B1*04:02L
  REGION 1..12: note = CONT. FROM ABOVE: HLA-DQA1*01:01-B1*05:01L HLA-DRB1*08:01L HLA-D RB1*04:10L HLA-DPA1*01:03-B1*04:02L HLA-DRB1*12:01L HLA-DPA1*02: 01-B1*13:01L HLA-DPA1*03:01-B1*105:01L HLA-DQA1*05:05-B1*03:01L HLA-DRB1*14:17L HLA-DPA1*01:02-B1*04:01L
  REGION 1..12: note = CONT. FROM ABOVE: HLA-DQA1*01:03-B1*06:01L HLA-DRB1*04:08L HLA-D QA1*02:01-B1*03:03L
  source 1..12: note = Severe acute respiratory syndrome coronavirus 2
DVLVRGFGDSVE

SEQ ID NO: 8202 - protein, 12 aa, Severe acute respiratory syndrome-related coronavirus
  REGION 1..12: note = Table B: HLA-DQA1*03:02-B1*03:03L HLA-DRB1*13:03L HLA-DRB1*01:03L HLA-DRB1*04:04L HLA-DQA1*01:02-B1*06:02L HLA-DRB1*01:02L HLA-DRB4*03:01NL HLA-DPA1*03:01-B1*04:02L HLA-DRB1*08:01L HLA-DRB1*12:01L HLA-DPA1*02:01-B1*13:01L
  REGION 1..12: note = CONT. FROM ABOVE: HLA-DPA1*03:01-B1*105:01L HLA-DRB1*14:17L HLA- DQA1*01:03-B1*06:01L HLA-DRB1*04:08L HLA-DQA1*02:01-B1*03:03L
  source 1..12: note = Severe acute respiratory syndrome coronavirus 2
VLVRGFGDSVEE

SEQ ID NO: 8203 - protein, 10 aa, Severe acute respiratory syndrome-related coronavirus
  REGION 1..10: note = Table B: HLA-DQA1*03:02-B1*03:03L HLA-DQA1*02:01-B1*03:03L
  source 1..10: note = Severe acute respiratory syndrome coronavirus 2
RGFGDSVEEV

SEQ ID NO: 8204 - protein, 10 aa, Severe acute respiratory syndrome-related coronavirus
  REGION 1..10: note = Table B: HLA-DQA1*03:02-B1*03:03L HLA-DQA1*01-B1*05L HLA-DQA1*05:01-B1*02:01L HLA-DQA1*03:01-B1*03:02L
  source 1..10: note = Severe acute respiratory syndrome coronavirus 2
GFGDSVEEVL

SEQ ID NO: 8205 - protein, 12 aa, Severe acute respiratory syndrome-related coronavirus
  REGION 1..12: note = Table B: HLA-DQA1*03:02-B1*03:03L HLA-DQA1*05:01-B1*03:01L HLA-DRB1*04:03L HLA-DRB1*04:05L HLA-DQA1*01:02-B1*06:02L HLA-DQA1*01:01-B1*05:01L HLA-DQA1*01-B1*05L HLA-DQA1*05:01-B1*02:01L HLA-DRB1*16:01L
  source 1..12: note = Severe acute respiratory syndrome coronavirus 2
GDSVEEVLSEAR

SEQ ID NO: 8206 - protein, 12 aa, Severe acute respiratory syndrome-related coronavirus
  REGION 1..12: note = Table B: HLA-DQA1*03:02-B1*03:03L HLA-DQA1*05:01-B1*03:01L HLA-DRB1*04:03L HLA-DRB1*04:05L HLA-DQA1*01:02-B1*06:02L HLA-DQA1*01:01-B1*05:01L HLA-DQA1*01-B1*05L HLA-DQA1*05:05-B1*03:19L HLA-DQA1*05:01-B1*02:01L
  REGION 1..12: note = CONT. FROM ABOVE: HLA-DRB1*04:10L HLA-DPA1*03:01-B1*105:01L HLA- DRB1*16:01L
  source 1..12: note = Severe acute respiratory syndrome coronavirus 2
DSVEEVLSEARQ

SEQ ID NO: 8207 - protein, 12 aa, Severe acute respiratory syndrome-related coronavirus
  REGION 1..12: note = Table B: HLA-DQA1*03:02-B1*03:03L HLA-DQA1*05:01-B1*03:01L HLA-DQA1*01:02-B1*06:02L HLA-DQA1*01:01-B1*05:01L HLA-DQA1*05:01-B1*02:01L HLA-DRB1*16:01L
  source 1..12: note = Severe acute respiratory syndrome coronavirus 2
SVEEVLSEARQH

SEQ ID NO: 8208 - protein, 10 aa, Severe acute respiratory syndrome-related coronavirus
  REGION 1..10: note = Table B: HLA-DQA1*03:02-B1*03:03L HLA-DQA1*05:01-B1*03:01L HLA-DRB1*13:03L HLA-DQA1*01:02-B1*06:02M HLA-DRB1*01:02L HLA-DRB4*03:01NL HLA-DPA1*01:03-B1*03:01L HLA-DPA1*03:01-B1*04:02L HLA-DRB1*14:01L HLA-DRB1*14:02L
  REGION 1..10: note = CONT. FROM ABOVE: HLA-DRB1*08:01L HLA-DQA1*05:05-B1*03:19L HLA-D QA1*05:01-B1*02:01L HLA-DPA1*01:03-B1*04:01L HLA-DQA1*05:05-B1*0 3:116L HLA-DRB1*09:01L HLA-DRB1*12:01L HLA-DPA1*02:01-B1*13:01L HLA-DPA1*03:01-B1*105:01M HLA-DQA1*03:01-B1*03:02L
  REGION 1..10: note = CONT. FROM ABOVE: HLA-DQA1*05:05-B1*03:01L HLA-DPA1*01:02-B1*04: 01L HLA-DQA1*01:03-B1*06:01L HLA-DQA1*02:01-B1*03:03L HLA-DRB1*1 5:03L
  source 1..10: note = Severe acute respiratory syndrome coronavirus 2
EVLSEARQHL

SEQ ID NO: 8209 - protein, 12 aa, Severe acute respiratory syndrome-related coronavirus
  REGION 1..12: note = Table B: HLA-DQA1*03:02-B1*03:03L HLA-DQA1*05:01-B1*03:01L HLA-DQA1*05:05-B1*03:19L HLA-DPA1*03:01-B1*105:01L HLA-DQA1*03:01-B1*03:02L HLA-DQA1*05:05-B1*03:01L
  source 1..12: note = Severe acute respiratory syndrome coronavirus 2
DGTCGLVEVEKG

SEQ ID NO: 8210 - protein, 10 aa, Severe acute respiratory syndrome-related coronavirus
  REGION 1..10: note = Table B: HLA-DQA1*03:02-B1*03:03L HLA-DQA1*03:01-B1*03:02L
  source 1..10: note = Severe acute respiratory syndrome coronavirus 2
GLVEVEKGVL

SEQ ID NO: 8211 - protein, 10 aa, Severe acute respiratory syndrome-related coronavirus
  REGION 1..10: note = Table B: HLA-DQA1*03:02-B1*03:03L HLA-DRB1*04:03L HLA-DRB1*04:02L HLA-DQA1*03:01-B1*03:02L HLA-DRB1*14:17L HLA-DQA1*02:01-B1*03:03L
  source 1..10: note = Severe acute respiratory syndrome coronavirus 2
VEVEKGVLPQ

SEQ ID NO: 8212 - protein, 10 aa, Severe acute respiratory syndrome-related coronavirus
  REGION 1..10: note = Table B: HLA-DQA1*03:02-B1*03:03L HLA-DQA1*05:01-B1*03:01L HLA-DQA1*01:02-B1*06:02L HLA-DPA1*03:01-B1*04:02L HLA-DQA1*05:05-B1*03:19L HLA-DQA1*05:01-B1*02:01L HLA-DQA1*05:05-B1*03:116L HLA-DRB1*09:01L
  REGION 1..10: note = CONT. FROM ABOVE: HLA-DPA1*03:01-B1*105:01L HLA-DQA1*03:01-B1*03 :02L HLA-DPA1*01:02-B1*04:01L HLA-DQA1*02:01-B1*03:03L HLA-DRB1* 15:03L
  source 1..10: note = Severe acute respiratory syndrome coronavirus 2
EVEKGVLPQL

SEQ ID NO: 8213 - protein, 12 aa, Severe acute respiratory syndrome-related coronavirus
  REGION 1..12: note = Table B: HLA-DQA1*03:02-B1*03:03L HLA-DQA1*01:02-B1*06:02L HLA-DQA1*05:01-B1*02:01L HLA-DQA1*03:01-B1*03:02L HLA-DQA1*01:03-B1*06:01L HLA-DQA1*02:01-B1*03:03L
  source 1..12: note = Severe acute respiratory syndrome coronavirus 2
VEKGVLPQLEQP

SEQ ID NO: 8214 - protein, 10 aa, Severe acute respiratory syndrome-related coronavirus
  REGION 1..10: note = Table B: HLA-DQA1*03:02-B1*03:03L HLA-DQA1*05:01-B1*03:01L HLA-DRB1*04:03L HLA-DRB1*13:02L HLA-DRB1*13:03L HLA-DRB1*01:03L HLA-DRB1*04:02L HLA-DRB1*04:05L HLA-DQA1*01:02-B1*06:02M HLA-DRB4*03:01NL HLA-DRB1*08:77L HLA-DPA1*01:03-B1*03:01L
  REGION 1..10: note = CONT. FROM ABOVE: HLA-DPA1*03:01-B1*04:02L HLA-DRB1*03:01L HLA-D RB1*14:01L HLA-DRB1*11:02L HLA-DRB1*14:02L HLA-DRB1*11:01L HLA-D QA1*01-B1*05L HLA-DQA1*05:05-B1*03:19M HLA-DQA1*05:01-B1*02:01M HLA-DRB4*01:01L HLA-DPA1*01:03-B1*04:01L
  REGION 1..10: note = CONT. FROM ABOVE: HLA-DQA1*05:05-B1*03:116L HLA-DPA1*01:03-B1*04 :02L HLA-DRB1*12:01L HLA-DPA1*02:01-B1*13:01L HLA-DPA1*03:01-B1* 105:01L HLA-DQA1*03:01-B1*03:02L HLA-DPA1*01:03-B1*104:01L HLA-D QA1*05:05-B1*03:01L HLA-DPA1*01:02-B1*04:01L HLA-DRB1*10:01L
  REGION 1..10: note = CONT. FROM ABOVE: HLA-DRB1*16:01L HLA-DQA1*01:03-B1*06:01L HLA-D RB1*08:02L HLA-DQA1*02:01-B1*03:03L HLA-DRB1*15:03L
  source 1..10: note = Severe acute respiratory syndrome coronavirus 2
GVLPQLEQPY

SEQ ID NO: 8215 - protein, 10 aa, Severe acute respiratory syndrome-related coronavirus
  REGION 1..10: note = Table B: HLA-DQA1*03:02-B1*03:03L HLA-DQA1*05:01-B1*03:01L HLA-DQA1*01:02-B1*06:02L HLA-DRB1*01:02L HLA-DPA1*03:01-B1*04:02L HLA-DRB1*14:01L HLA-DQA1*01-B1*05L HLA-DQA1*05:05-B1*03:19L HLA-DQA1*05:01-B1*02:01L
  REGION 1..10: note = CONT. FROM ABOVE: HLA-DQA1*05:05-B1*03:116L HLA-DPA1*02:01-B1*13 :01L HLA-DPA1*03:01-B1*105:01L HLA-DQA1*03:01-B1*03:02L HLA-DPA1 *01:03-B1*104:01L HLA-DPA1*01:02-B1*04:01L HLA-DRB1*16:01L HLA-D QA1*01:03-B1*06:01L HLA-DQA1*02:01-B1*03:03L HLA-DRB1*15:03L
  source 1..10: note = Severe acute respiratory syndrome coronavirus 2
VLPQLEQPYV

SEQ ID NO: 8216 - protein, 11 aa, Severe acute respiratory syndrome-related coronavirus
  REGION 1..11: note = Table B: HLA-DQA1*03:02-B1*03:03L HLA-DRB1*13:03L HLA-DRB1*14:01L HLA-DPA1*01:02-B1*04:01L
  source 1..11: note = Severe acute respiratory syndrome coronavirus 2
DARTAPHGHVM

SEQ ID NO: 8217 - protein, 10 aa, Severe acute respiratory syndrome-related coronavirus
  REGION 1..10: note = Table B: HLA-DQA1*03:02-B1*03:03L HLA-DQA1*05:01-B1*03:01L HLA-DRB1*01:03L HLA-DQA1*01:02-B1*06:02L HLA-DRB1*01:02L HLA-DRB1*14:01L HLA-DRB1*08:01L HLA-DQA1*05:05-B1*03:19L HLA-DQA1*03:01-B1*03:02L HLA-DRB1*16:01L
  REGION 1..10: note = CONT. FROM ABOVE: HLA-DQA1*01:03-B1*06:01L HLA-DQA1*02:01-B1*03: 03L HLA-DRB1*15:03L
  source 1..10: note = Severe acute respiratory syndrome coronavirus 2
RTAPHGHVMV

SEQ ID NO: 8218 - protein, 10 aa, Severe acute respiratory syndrome-related coronavirus
  REGION 1..10: note = Table B: HLA-DQA1*03:02-B1*03:03L
  source 1..10: note = Severe acute respiratory syndrome coronavirus 2
HVMVELVAEL

SEQ ID NO: 8219 - protein, 10 aa, Severe acute respiratory syndrome-related coronavirus
  REGION 1..10: note = Table B: HLA-DQA1*03:02-B1*03:03L HLA-DRB1*11:02L HLA-DQA1*05:05-B1*03:19M HLA-DPA1*01:03-B1*104:01M
  source 1..10: note = Severe acute respiratory syndrome coronavirus 2
VELVAELEGI

SEQ ID NO: 8220 - protein, 10 aa, Severe acute respiratory syndrome-related coronavirus
  REGION 1..10: note = Table B: HLA-DQA1*03:02-B1*03:03L HLA-DRB1*13:02L HLA-DRB1*13:03L HLA-DRB4*03:01NL HLA-DRB3*02:01L HLA-DRB1*08:01L HLA-DPA1*01:03-B1*04:02L HLA-DRB1*12:01L HLA-DQA1*03:01-B1*03:02L HLA-DQA1*05:05-B1*03:01L
  source 1..10: note = Severe acute respiratory syndrome coronavirus 2
AELEGIQYGR

SEQ ID NO: 8221 - protein, 11 aa, Severe acute respiratory syndrome-related coronavirus
  REGION 1..11: note = Table B: HLA-DQA1*03:02-B1*03:03L HLA-DQA1*05:01-B1*03:01L HLA-DRB1*04:03L HLA-DRB1*04:02L HLA-DQA1*05:05-B1*03:19L HLA-DQA1*05:05-B1*03:01L HLA-DRB1*14:17L HLA-DQA1*01:03-B1*06:01L
  source 1..11: note = Severe acute respiratory syndrome coronavirus 2
EGIQYGRSGET

SEQ ID NO: 8222 - protein, 10 aa, Severe acute respiratory syndrome-related coronavirus
  REGION 1..10: note = Table B: HLA-DQA1*03:02-B1*03:03M HLA-DQA1*05:01-B1*03:01L HLA-DRB1*04:03L HLA-DRB1*13:02L HLA-DRB1*13:03L HLA-DRB1*01:03L HLA-DRB1*04:02L HLA-DRB1*04:05L HLA-DQA1*01:02-B1*06:02L HLA-DRB1*01:01L HLA-DRB1*01:02L HLA-DRB4*03:01NL HLA-DRB1*08:77L
  REGION 1..10: note = CONT. FROM ABOVE: HLA-DRB3*02:01L HLA-DPA1*01:03-B1*03:01L HLA-D PA1*03:01-B1*04:02L HLA-DRB1*14:01L HLA-DRB1*11:03L HLA-DRB1*11: 04L HLA-DRB1*14:02L HLA-DQA1*01:01-B1*05:01L HLA-DRB1*08:01L HLA -DRB1*11:01L HLA-DRB5*01:01L HLA-DQA1*01-B1*05L
  REGION 1..10: note = CONT. FROM ABOVE: HLA-DQA1*05:05-B1*03:19L HLA-DQA1*05:01-B1*02: 01L HLA-DRB4*01:01L HLA-DPA1*01:03-B1*04:01L HLA-DQA1*05:05-B1*0 3:116L HLA-DRB1*09:01L HLA-DPA1*01:03-B1*04:02L HLA-DRB1*12:01L HLA-DPA1*02:01-B1*13:01L HLA-DPA1*03:01-B1*105:01L
  REGION 1..10: note = CONT. FROM ABOVE: HLA-DQA1*03:01-B1*03:02L HLA-DQA1*05:05-B1*03: 01L HLA-DPA1*01:02-B1*04:01L HLA-DRB1*07:01L HLA-DRB1*10:01L HLA -DRB1*16:01L HLA-DQA1*01:03-B1*06:01L HLA-DRB1*08:02L HLA-DRB1*0 8:03L HLA-DQA1*02:01-B1*03:03L HLA-DRB1*15:03L
  source 1..10: note = Severe acute respiratory syndrome coronavirus 2
IQYGRSGETL

SEQ ID NO: 8223 - protein, 10 aa, Severe acute respiratory syndrome-related coronavirus
  REGION 1..10: note = Table B: HLA-DQA1*03:02-B1*03:03L HLA-DQA1*03:01-B1*03:02L
  source 1..10: note = Severe acute respiratory syndrome coronavirus 2
GETLGVLVPH

SEQ ID NO: 8224 - protein, 10 aa, Severe acute respiratory syndrome-related coronavirus
  REGION 1..10: note = Table B: HLA-DQA1*03:02-B1*03:03M HLA-DQA1*05:01-B1*03:01L HLA-DRB1*13:03L HLA-DQA1*01:02-B1*06:02M HLA-DRB1*01:02M HLA-DPA1*03:01-B1*04:02L HLA-DRB1*14:01L HLA-DRB1*14:02L HLA-DQA1*05:05-B1*03:19L HLA-DQA1*05:01-B1*02:01L
  REGION 1..10: note = CONT. FROM ABOVE: HLA-DPA1*01:03-B1*04:01L HLA-DQA1*05:05-B1*03: 116L HLA-DRB1*09:01L HLA-DRB1*12:01L HLA-DPA1*02:01-B1*13:01L HL A-DPA1*03:01-B1*105:01H HLA-DQA1*03:01-B1*03:02L HLA-DPA1*01:03- B1*104:01L HLA-DQA1*05:05-B1*03:01L HLA-DPA1*01:02-B1*04:01L
  REGION 1..10: note = CONT. FROM ABOVE: HLA-DQA1*01:03-B1*06:01L HLA-DRB1*08:03L HLA-D QA1*02:01-B1*03:03L HLA-DRB1*15:03M
  source 1..10: note = Severe acute respiratory syndrome coronavirus 2
ETLGVLVPHV

SEQ ID NO: 8225 - protein, 11 aa, Severe acute respiratory syndrome-related coronavirus
  REGION 1..11: note = Table B: HLA-DQA1*03:02-B1*03:03L HLA-DRB1*04:03L HLA-DQA1*03:01-B1*03:02L HLA-DQA1*02:01-B1*03:03L
  source 1..11: note = Severe acute respiratory syndrome coronavirus 2
VLVPHVGEIPV

SEQ ID NO: 8226 - protein, 12 aa, Severe acute respiratory syndrome-related coronavirus
  REGION 1..12: note = Table B: HLA-DQA1*03:02-B1*03:03L HLA-DRB1*04:03L HLA-DQA1*05:05-B1*03:01L
  source 1..12: note = Severe acute respiratory syndrome coronavirus 2
LVPHVGEIPVAY

SEQ ID NO: 8227 - protein, 12 aa, Severe acute respiratory syndrome-related coronavirus
  REGION 1..12: note = Table B: HLA-DQA1*03:02-B1*03:03L HLA-DRB1*04:03L HLA-DRB1*04:02L HLA-DRB1*01:02L HLA-DQA1*01:01-B1*05:01L HLA-DRB1*14:17L HLA-DRB1*04:08L
  source 1..12: note = Severe acute respiratory syndrome coronavirus 2
VPHVGEIPVAYR

SEQ ID NO: 8228 - protein, 10 aa, Severe acute respiratory syndrome-related coronavirus
  REGION 1..10: note = Table B: HLA-DQA1*03:02-B1*03:03M HLA-DQA1*05:01-B1*03:01L HLA-DRB1*08:77L HLA-DRB1*11:02M HLA-DQA1*05:05-B1*03:19H HLA-DQA1*05:01-B1*02:01L HLA-DPA1*01:03-B1*04:01L HLA-DRB1*09:01L HLA-DQA1*03:01-B1*03:02L
  REGION 1..10: note = CONT. FROM ABOVE: HLA-DPA1*01:03-B1*104:01M
  source 1..10: note = Severe acute respiratory syndrome coronavirus 2
GEIPVAYRKV

SEQ ID NO: 8229 - protein, 14 aa, Severe acute respiratory syndrome-related coronavirus
  REGION 1..14: note = Table B: HLA-DQA1*03:02-B1*03:03L
  source 1..14: note = Severe acute respiratory syndrome coronavirus 2
NGNKGAGGHSYGAD

SEQ ID NO: 8230 - protein, 11 aa, Severe acute respiratory syndrome-related coronavirus
  REGION 1..11: note = Table B: HLA-DQA1*03:02-B1*03:03L HLA-DQA1*03:01-B1*03:02L
  source 1..11: note = Severe acute respiratory syndrome coronavirus 2
GAGGHSYGADL

SEQ ID NO: 8231 - protein, 10 aa, Severe acute respiratory syndrome-related coronavirus
  REGION 1..10: note = Table B: HLA-DQA1*03:02-B1*03:03L HLA-DQA1*05:01-B1*03:01L HLA-DRB1*04:03L HLA-DRB1*13:02L HLA-DRB1*13:03L HLA-DRB1*01:03L HLA-DRB1*04:05L HLA-DQA1*01:02-B1*06:02M HLA-DRB1*01:01L HLA-DRB1*01:02L HLA-DRB1*08:77L HLA-DPA1*01:03-B1*03:01L
  REGION 1..10: note = CONT. FROM ABOVE: HLA-DPA1*03:01-B1*04:02L HLA-DRB1*03:01L HLA-D RB1*14:01L HLA-DRB1*14:02L HLA-DRB1*11:01L HLA-DQA1*01-B1*05L HL A-DQA1*05:05-B1*03:19L HLA-DQA1*05:01-B1*02:01L HLA-DRB4*01:01L HLA-DPA1*01:03-B1*04:01L HLA-DQA1*05:05-B1*03:116L
  REGION 1..10: note = CONT. FROM ABOVE: HLA-DPA1*01:03-B1*04:02L HLA-DRB1*12:01L HLA-D PA1*02:01-B1*13:01L HLA-DPA1*03:01-B1*105:01M HLA-DPA1*01:02-B1* 04:01L HLA-DRB1*10:01L HLA-DRB1*16:01L HLA-DQA1*01:03-B1*06:01L HLA-DRB1*08:02L HLA-DQA1*02:01-B1*03:03M HLA-DRB1*15:03L
  source 1..10: note = Severe acute respiratory syndrome coronavirus 2
HSYGADLKSF

SEQ ID NO: 8232 - protein, 12 aa, Severe acute respiratory syndrome-related coronavirus
  REGION 1..12: note = Table B: HLA-DQA1*03:02-B1*03:03L HLA-DQA1*05:01-B1*03:01L HLA-DRB1*04:03L HLA-DRB1*13:03L HLA-DRB1*04:02L HLA-DRB1*04:05L HLA-DQA1*01:02-B1*06:02L HLA-DRB1*08:04L HLA-DRB1*08:01L HLA-DQA1*05:05-B1*03:19L HLA-DQA1*05:01-B1*02:01L
  REGION 1..12: note = CONT. FROM ABOVE: HLA-DPA1*03:01-B1*105:01L HLA-DQA1*05:05-B1*03 :01L HLA-DQA1*01:03-B1*06:01L HLA-DRB1*04:08L HLA-DQA1*02:01-B1* 03:03L
  source 1..12: note = Severe acute respiratory syndrome coronavirus 2
SYGADLKSFDLG

SEQ ID NO: 8233 - protein, 12 aa, Severe acute respiratory syndrome-related coronavirus
  REGION 1..12: note = Table B: HLA-DQA1*03:02-B1*03:03L HLA-DRB1*04:05L HLA-DQA1*01:01-B1*05:01L
  source 1..12: note = Severe acute respiratory syndrome coronavirus 2
GADLKSFDLGDE

SEQ ID NO: 8234 - protein, 12 aa, Severe acute respiratory syndrome-related coronavirus
  REGION 1..12: note = Table B: HLA-DQA1*03:02-B1*03:03L
  source 1..12: note = Severe acute respiratory syndrome coronavirus 2
ADLKSFDLGDEL

SEQ ID NO: 8235 - protein, 16 aa, Severe acute respiratory syndrome-related coronavirus
  REGION 1..16: note = Table B: HLA-DQA1*03:02-B1*03:03L HLA-DPA1*02:01-B1*13:01L HLA-DQA1*05:05-B1*03:01L HLA-DQA1*02:01-B1*03:03L
  source 1..16: note = Severe acute respiratory syndrome coronavirus 2
DLKSFDLGDELGTDPY

SEQ ID NO: 8236 - protein, 13 aa, Severe acute respiratory syndrome-related coronavirus
  REGION 1..13: note = Table B: HLA-DQA1*03:02-B1*03:03L
  source 1..13: note = Severe acute respiratory syndrome coronavirus 2
DLGDELGTDPYED

SEQ ID NO: 8237 - protein, 11 aa, Severe acute respiratory syndrome-related coronavirus
  REGION 1..11: note = Table B: HLA-DQA1*03:02-B1*03:03L HLA-DQA1*01:02-B1*06:02L HLA-DQA1*05:05-B1*03:19L HLA-DQA1*05:01-B1*02:01L HLA-DPA1*03:01-B1*105:01L HLA-DQA1*03:01-B1*03:02L HLA-DQA1*01:03-B1*06:01L HLA-DQA1*02:01-B1*03:03L
  source 1..11: note = Severe acute respiratory syndrome coronavirus 2
DELGTDPYEDF

SEQ ID NO: 8238 - protein, 11 aa, Severe acute respiratory syndrome-related coronavirus
  REGION 1..11: note = Table B: HLA-DQA1*03:02-B1*03:03L HLA-DRB1*04:03L HLA-DQA1*05:01-B1*02:01L HLA-DQA1*03:01-B1*03:02L HLA-DRB1*15:03L
  source 1..11: note = Severe acute respiratory syndrome coronavirus 2
GTDPYEDFQEN

SEQ ID NO: 8239 - protein, 13 aa, Severe acute respiratory syndrome-related coronavirus
  REGION 1..13: note = Table B: HLA-DQA1*03:02-B1*03:03L HLA-DRB1*16:01L HLA-DQA1*02:01-B1*03:03L
  source 1..13: note = Severe acute respiratory syndrome coronavirus 2
DPYEDFQENWNTK

SEQ ID NO: 8240 - protein, 13 aa, Severe acute respiratory syndrome-related coronavirus
  REGION 1..13: note = Table B: HLA-DQA1*03:02-B1*03:03L HLA-DQA1*05:01-B1*03:01L HLA-DRB1*04:05L HLA-DRB1*01:02L HLA-DRB4*03:01NL HLA-DRB1*08:04L HLA-DRB1*14:01L HLA-DQA1*01-B1*05L HLA-DRB1*14:54L HLA-DRB1*16:01L HLA-DRB1*04:08L
  source 1..13: note = Severe acute respiratory syndrome coronavirus 2
DFQENWNTKHSSG

SEQ ID NO: 8241 - protein, 13 aa, Severe acute respiratory syndrome-related coronavirus
  REGION 1..13: note = Table B: HLA-DQA1*03:02-B1*03:03L HLA-DQA1*05:05-B1*03:01L HLA-DRB1*16:01L HLA-DQA1*01:03-B1*06:01L
  source 1..13: note = Severe acute respiratory syndrome coronavirus 2
QENWNTKHSSGVT

SEQ ID NO: 8242 - protein, 10 aa, Severe acute respiratory syndrome-related coronavirus
  REGION 1..10: note = Table B: HLA-DQA1*03:02-B1*03:03L HLA-DQA1*05:01-B1*03:01L HLA-DRB1*13:02L HLA-DRB1*13:03L HLA-DRB1*01:03L HLA-DRB1*04:02L HLA-DQA1*01:02-B1*06:02L HLA-DRB1*14:01L HLA-DQA1*01:01-B1*05:01L HLA-DRB1*08:01L HLA-DRB3*01:01L
  REGION 1..10: note = CONT. FROM ABOVE: HLA-DQA1*03:01-B1*03:02L HLA-DPA1*01:02-B1*04: 01L HLA-DRB1*16:01L HLA-DQA1*01:03-B1*06:01L HLA-DQA1*02:01-B1*0 3:03L
  source 1..10: note = Severe acute respiratory syndrome coronavirus 2
KHSSGVTREL

SEQ ID NO: 8243 - protein, 11 aa, Severe acute respiratory syndrome-related coronavirus
  REGION 1..11: note = Table B: HLA-DQA1*03:02-B1*03:03L HLA-DRB1*04:03L HLA-DPA1*03:01-B1*04:02L HLA-DQA1*03:01-B1*03:02L HLA-DQA1*05:05-B1*03:01L HLA-DPA1*01:02-B1*04:01L
  source 1..11: note = Severe acute respiratory syndrome coronavirus 2
ELMRELNGGAY

SEQ ID NO: 8244 - protein, 10 aa, Severe acute respiratory syndrome-related coronavirus
  REGION 1..10: note = Table B: HLA-DQA1*03:02-B1*03:03L HLA-DQA1*05:01-B1*03:01M HLA-DRB1*14:04L HLA-DRB1*04:01L HLA-DRB1*04:03L HLA-DRB1*13:02M HLA-DRB1*13:03M HLA-DRB1*01:03M HLA-DRB1*04:02L HLA-DRB1*04:05L HLA-DQA1*01:02-B1*06:02H HLA-DRB1*01:01L HLA-DRB1*01:02L
  REGION 1..10: note = CONT. FROM ABOVE: HLA-DRB4*03:01NM HLA-DRB1*08:77M HLA-DPA1*01:0 3-B1*03:01M HLA-DPA1*03:01-B1*04:02M HLA-DRB1*03:01M HLA-DRB1*14 :01M HLA-DRB1*11:02L HLA-DRB1*11:03L HLA-DRB1*11:04L HLA-DRB1*14 :02M HLA-DRB1*08:01L HLA-DRB1*11:01L HLA-DRB5*01:01M
  REGION 1..10: note = CONT. FROM ABOVE: HLA-DQA1*01-B1*05M HLA-DQA1*05:05-B1*03:19M HL A-DRB4*02:01NL HLA-DQA1*05:01-B1*02:01M HLA-DRB4*01:01M HLA-DPA1 *01:03-B1*04:01H HLA-DQA1*05:05-B1*03:116M HLA-DRB1*09:01L HLA-D PA1*01:03-B1*04:02M HLA-DRB1*12:01M HLA-DRB1*12:02L
  REGION 1..10: note = CONT. FROM ABOVE: HLA-DPA1*02:01-B1*13:01L HLA-DPA1*03:01-B1*105 :01M HLA-DQA1*03:01-B1*03:02L HLA-DRB1*14:54L HLA-DPA1*01:03-B1* 104:01M HLA-DQA1*05:05-B1*03:01L HLA-DRB1*14:17L HLA-DPA1*01:02- B1*04:01L HLA-DRB1*10:01M HLA-DRB1*16:01M
  REGION 1..10: note = CONT. FROM ABOVE: HLA-DQA1*01:03-B1*06:01L HLA-DRB1*08:02L HLA- DRB1*08:03L HLA-DQA1*02:01-B1*03:03M HLA-DRB1*15:01L HLA-DRB1*15:03M
  source 1..10: note = Severe acute respiratory syndrome coronavirus 2
ELNGGAYTRY

SEQ ID NO: 8245 - protein, 10 aa, Severe acute respiratory syndrome-related coronavirus
  REGION 1..10: note = Table B: HLA-DQA1*03:02-B1*03:03L HLA-DQA1*03:01-B1*03:02L HLA-DQA1*01:03-B1*06:01L HLA-DQA1*02:01-B1*03:03L
  source 1..10: note = Severe acute respiratory syndrome coronavirus 2
GGAYTRYVDN

SEQ ID NO: 8246 - protein, 10 aa, Severe acute respiratory syndrome-related coronavirus
  REGION 1..10: note = Table B: HLA-DQA1*03:02-B1*03:03L HLA-DRB1*04:03L HLA-DRB1*04:02L HLA-DQA1*01-B1*05L HLA-DQA1*03:01-B1*03:02L HLA-DPA1*01:02-B1*04:01L HLA-DQA1*01:03-B1*06:01L HLA-DQA1*02:01-B1*03:03L
  source 1..10: note = Severe acute respiratory syndrome coronavirus 2
GAYTRYVDNN

SEQ ID NO: 8247 - protein, 14 aa, Severe acute respiratory syndrome-related coronavirus
  REGION 1..14: note = Table B: HLA-DQA1*03:02-B1*03:03L HLA-DQA1*05:01-B1*03:01L HLA-DQA1*01-B1*05L HLA-DQA1*05:05-B1*03:19L HLA-DQA1*05:01-B1*02:01L HLA-DPA1*02:01-B1*13:01L HLA-DPA1*03:01-B1*105:01L HLA-DQA1*03:01-B1*03:02L
  REGION 1..14: note = CONT. FROM ABOVE: HLA-DQA1*05:05-B1*03:01L HLA-DQA1*02:01-B1*03: 03L
  source 1..14: note = Severe acute respiratory syndrome coronavirus 2
VDNNFCGPDGYPLE

SEQ ID NO: 8248 - protein, 13 aa, Severe acute respiratory syndrome-related coronavirus
  REGION 1..13: note = Table B: HLA-DQA1*03:02-B1*03:03L HLA-DQA1*01:02-B1*06:02L HLA-DPA1*03:01-B1*105:01L HLA-DQA1*03:01-B1*03:02L HLA-DQA1*05:05-B1*03:01L HLA-DQA1*01:03-B1*06:01L HLA-DQA1*02:01-B1*03:03L
  source 1..13: note = Severe acute respiratory syndrome coronavirus 2
GPDGYPLECIKDL

SEQ ID NO: 8249 - protein, 16 aa, Severe acute respiratory syndrome-related coronavirus
  REGION 1..16: note = Table B: HLA-DQA1*03:02-B1*03:03L HLA-DPA1*03:01-B1*105:01L HLA-DRB1*15:03L
  source 1..16: note = Severe acute respiratory syndrome coronavirus 2
DLLARAGKASCTLSEQ

SEQ ID NO: 8250 - protein, 10 aa, Severe acute respiratory syndrome-related coronavirus
  REGION 1..10: note = Table B: HLA-DQA1*03:02-B1*03:03L HLA-DQA1*03:01-B1*03:02L
  source 1..10: note = Severe acute respiratory syndrome coronavirus 2
SEQLDFIDTK

SEQ ID NO: 8251 - protein, 10 aa, Severe acute respiratory syndrome-related coronavirus
  REGION 1..10: note = Table B: HLA-DQA1*03:02-B1*03:03L HLA-DQA1*05:01-B1*03:01L HLA-DRB1*04:03L HLA-DRB1*13:02L HLA-DRB1*13:03L HLA-DRB1*01:03L HLA-DRB1*04:05L HLA-DQA1*01:02-B1*06:02M HLA-DRB1*01:01L HLA-DRB1*01:02L HLA-DRB4*03:01NL HLA-DRB1*08:77L
  REGION 1..10: note = CONT. FROM ABOVE: HLA-DPA1*01:03-B1*03:01L HLA-DPA1*03:01-B1*04: 02L HLA-DRB1*03:01L HLA-DRB1*14:01L HLA-DRB1*11:02L HLA-DRB1*14: 02L HLA-DQA1*01:01-B1*05:01L HLA-DRB1*08:01L HLA-DRB1*11:01L HLA -DRB5*01:01L HLA-DQA1*01-B1*05L HLA-DQA1*05:05-B1*03:19L
  REGION 1..10: note = CONT. FROM ABOVE: HLA-DQA1*05:01-B1*02:01L HLA-DRB4*01:01L HLA-D PA1*01:03-B1*04:01L HLA-DQA1*05:05-B1*03:116L HLA-DPA1*01:03-B1* 04:02L HLA-DRB1*12:01L HLA-DPA1*02:01-B1*13:01L HLA-DPA1*03:01-B 1*105:01L HLA-DQA1*03:01-B1*03:02L HLA-DPA1*01:03-B1*104:01L
  REGION 1..10: note = CONT. FROM ABOVE: HLA-DQA1*05:05-B1*03:01L HLA-DPA1*01:02-B1*04: 01L HLA-DRB1*10:01L HLA-DRB1*16:01L HLA-DQA1*01:03-B1*06:01L HLA -DRB1*08:02L HLA-DQA1*02:01-B1*03:03M HLA-DRB1*15:03L
  source 1..10: note = Severe acute respiratory syndrome coronavirus 2
DFIDTKRGVY

SEQ ID NO: 8252 - protein, 12 aa, Severe acute respiratory syndrome-related coronavirus
  REGION 1..12: note = Table B: HLA-DQA1*03:02-B1*03:03L HLA-DRB1*04:03L HLA-DRB1*04:02L HLA-DRB1*04:05L HLA-DQA1*01:02-B1*06:02L HLA-DQA1*05:01-B1*02:01L HLA-DRB1*04:10L HLA-DRB1*12:01L HLA-DRB1*14:17L HLA-DRB1*16:01L HLA-DQA1*02:01-B1*03:03L
  REGION 1..12: note = CONT. FROM ABOVE: HLA-DRB1*15:03L
  source 1..12: note = Severe acute respiratory syndrome coronavirus 2
EHEIAWYTERSE

SEQ ID NO: 8253 - protein, 12 aa, Severe acute respiratory syndrome-related coronavirus
  REGION 1..12: note = Table B: HLA-DQA1*03:02-B1*03:03L HLA-DRB1*14:01L HLA-DRB1*08:01L HLA-DQA1*05:05-B1*03:01L
  source 1..12: note = Severe acute respiratory syndrome coronavirus 2
IAWYTERSEKSY

SEQ ID NO: 8254 - protein, 12 aa, Severe acute respiratory syndrome-related coronavirus
  REGION 1..12: note = Table B: HLA-DQA1*03:02-B1*03:03L HLA-DRB3*01:01L
  source 1..12: note = Severe acute respiratory syndrome coronavirus 2
AWYTERSEKSYE

SEQ ID NO: 8255 - protein, 10 aa, Severe acute respiratory syndrome-related coronavirus
  REGION 1..10: note = Table B: HLA-DQA1*03:02-B1*03:03M HLA-DQA1*05:05-B1*03:19L HLA-DRB1*09:01L HLA-DQA1*03:01-B1*03:02L HLA-DRB1*16:01L
  source 1..10: note = Severe acute respiratory syndrome coronavirus 2
TERSEKSYEL

SEQ ID NO: 8256 - protein, 10 aa, Severe acute respiratory syndrome-related coronavirus
  REGION 1..10: note = Table B: HLA-DQA1*03:02-B1*03:03L HLA-DQA1*01-B1*05L HLA-DQA1*03:01-B1*03:02L HLA-DQA1*02:01-B1*03:03L
  source 1..10: note = Severe acute respiratory syndrome coronavirus 2
KSYELQTPFE

SEQ ID NO: 8257 - protein, 10 aa, Severe acute respiratory syndrome-related coronavirus
  REGION 1..10: note = Table B: HLA-DQA1*03:02-B1*03:03L HLA-DQA1*05:05-B1*03:19L HLA-DPA1*02:01-B1*13:01L HLA-DPA1*01:03-B1*104:01L HLA-DQA1*01:03-B1*06:01L HLA-DRB1*15:03L
  source 1..10: note = Severe acute respiratory syndrome coronavirus 2
SYELQTPFEI

SEQ ID NO: 8258 - protein, 10 aa, Severe acute respiratory syndrome-related coronavirus
  REGION 1..10: note = Table B: HLA-DQA1*03:02-B1*03:03L HLA-DQA1*05:01-B1*03:01L HLA-DRB1*04:03L HLA-DRB1*13:02L HLA-DRB1*13:03L HLA-DRB1*01:03L HLA-DRB1*04:02L HLA-DQA1*01:02-B1*06:02L HLA-DRB1*01:02L HLA-DRB4*03:01NL HLA-DRB1*08:77L HLA-DRB3*02:01L HLA-DRB1*11:03L
  REGION 1..10: note = CONT. FROM ABOVE: HLA-DQA1*01-B1*05L HLA-DQA1*05:05-B1*03:19L HL A-DQA1*05:01-B1*02:01L HLA-DRB1*12:01L HLA-DPA1*03:01-B1*105:01L HLA-DQA1*03:01-B1*03:02L HLA-DQA1*05:05-B1*03:01L HLA-DRB1*14:17 L HLA-DPA1*01:02-B1*04:01L HLA-DRB1*16:01L
  REGION 1..10: note = CONT. FROM ABOVE: HLA-DQA1*01:03-B1*06:01L HLA-DRB1*04:08L HLA-D QA1*02:01-B1*03:03L HLA-DRB1*15:03L
  source 1..10: note = Severe acute respiratory syndrome coronavirus 2
YELQTPFEIK

SEQ ID NO: 8259 - protein, 10 aa, Severe acute respiratory syndrome-related coronavirus
  REGION 1..10: note = Table B: HLA-DQA1*03:02-B1*03:03M HLA-DQA1*05:01-B1*03:01L HLA-DRB1*13:03L HLA-DQA1*01:02-B1*06:02L HLA-DRB1*01:02L HLA-DPA1*03:01-B1*04:02L HLA-DRB1*14:01L HLA-DRB1*14:02L HLA-DQA1*05:05-B1*03:19L HLA-DQA1*05:01-B1*02:01L
  REGION 1..10: note = CONT. FROM ABOVE: HLA-DPA1*01:03-B1*04:01L HLA-DQA1*05:05-B1*03: 116L HLA-DRB1*09:01L HLA-DRB1*12:01L HLA-DPA1*02:01-B1*13:01L HL A-DPA1*03:01-B1*105:01M HLA-DQA1*03:01-B1*03:02L HLA-DPA1*01:02- B1*04:01L HLA-DRB1*16:01L HLA-DQA1*01:03-B1*06:01L
  REGION 1..10: note = CONT. FROM ABOVE: HLA-DQA1*02:01-B1*03:03L HLA-DRB1*15:03L
  source 1..10: note = Severe acute respiratory syndrome coronavirus 2
ELQTPFEIKL

SEQ ID NO: 8260 - protein, 15 aa, Severe acute respiratory syndrome-related coronavirus
  REGION 1..15: note = Table B: HLA-DQA1*03:02-B1*03:03L HLA-DRB1*04:04L HLA-DRB1*01:01L HLA-DRB3*02:01L HLA-DPA1*01:03-B1*03:01L HLA-DRB1*03:01L HLA-DRB1*11:02L HLA-DQA1*05:05-B1*03:19L HLA-DRB1*13:01L HLA-DQA1*05:05-B1*03:116L
  REGION 1..15: note = CONT. FROM ABOVE: HLA-DPA1*01:03-B1*04:02L HLA-DPA1*01:03-B1*02: 01L HLA-DPA1*01:03-B1*104:01L HLA-DQA1*05:05-B1*03:01L HLA-DRB1* 07:01L HLA-DRB1*10:01L HLA-DRB1*08:02L
  source 1..15: note = Severe acute respiratory syndrome coronavirus 2
TPFEIKLAKKFDTFN

SEQ ID NO: 8261 - protein, 15 aa, Severe acute respiratory syndrome-related coronavirus
  REGION 1..15: note = Table B: HLA-DQA1*03:02-B1*03:03L HLA-DRB1*01:03L HLA-DPA1*01:03-B1*03:01L HLA-DRB1*16:01L HLA-DRB1*04:08L
  source 1..15: note = Severe acute respiratory syndrome coronavirus 2
FDTFNGECPNFVFPL

SEQ ID NO: 8262 - protein, 15 aa, Severe acute respiratory syndrome-related coronavirus
  REGION 1..15: note = Table B: HLA-DQA1*03:02-B1*03:03L HLA-DPA1*01:03-B1*03:01L HLA-DQA1*05:01-B1*02:01L HLA-DQA1*03:01-B1*03:02L
  source 1..15: note = Severe acute respiratory syndrome coronavirus 2
DTFNGECPNFVFPLN

SEQ ID NO: 8263 - protein, 10 aa, Severe acute respiratory syndrome-related coronavirus
  REGION 1..10: note = Table B: HLA-DQA1*03:02-B1*03:03L HLA-DQA1*05:01-B1*03:01L HLA-DQA1*01:02-B1*06:02L HLA-DRB1*01:01L HLA-DPA1*03:01-B1*04:02L HLA-DRB1*14:01L HLA-DQA1*05:05-B1*03:116M HLA-DPA1*02:01-B1*13:01M
  REGION 1..10: note = CONT. FROM ABOVE: HLA-DPA1*03:01-B1*105:01L HLA-DPA1*01:02-B1*04 :01L HLA-DQA1*01:03-B1*06:01L HLA-DRB1*08:03L HLA-DRB1*15:03L
  source 1..10: note = Severe acute respiratory syndrome coronavirus 2
FPLNSIIKTI

SEQ ID NO: 8264 - protein, 10 aa, Severe acute respiratory syndrome-related coronavirus
  REGION 1..10: note = Table B: HLA-DQA1*03:02-B1*03:03L HLA-DQA1*05:01-B1*03:01L HLA-DQA1*01:02-B1*06:02L HLA-DRB1*14:01L HLA-DQA1*05:05-B1*03:19L HLA-DPA1*03:01-B1*105:01L HLA-DQA1*03:01-B1*03:02L HLA-DRB1*16:01L
  REGION 1..10: note = CONT. FROM ABOVE: HLA-DQA1*01:03-B1*06:01L HLA-DQA1*02:01-B1*03: 03L HLA-DRB1*15:03L
  source 1..10: note = Severe acute respiratory syndrome coronavirus 2
SIIKTIQPRV

SEQ ID NO: 8265 - protein, 10 aa, Severe acute respiratory syndrome-related coronavirus
  REGION 1..10: note = Table B: HLA-DQA1*03:02-B1*03:03L HLA-DQA1*05:01-B1*03:01L HLA-DRB1*04:03L HLA-DRB1*13:02L HLA-DRB1*13:03L HLA-DRB1*01:03L HLA-DRB1*04:02L HLA-DRB1*04:05L HLA-DQA1*01:02-B1*06:02L HLA-DRB1*01:02L HLA-DRB4*03:01NL HLA-DRB1*08:77L HLA-DRB3*02:01L
  REGION 1..10: note = CONT. FROM ABOVE: HLA-DPA1*03:01-B1*04:02L HLA-DRB1*14:01L HLA-D QA1*05:01-B1*02:01L HLA-DRB1*12:01L HLA-DRB1*12:02L HLA-DPA1*03: 01-B1*105:01L HLA-DQA1*03:01-B1*03:02L HLA-DRB1*14:54L HLA-DQA1* 05:05-B1*03:01L HLA-DRB1*14:17L HLA-DPA1*01:02-B1*04:01L
  REGION 1..10: note = CONT. FROM ABOVE: HLA-DRB1*16:01L HLA-DQA1*01:03-B1*06:01L HLA-D RB1*04:08L HLA-DQA1*02:01-B1*03:03L HLA-DRB1*15:03L
  source 1..10: note = Severe acute respiratory syndrome coronavirus 2
IIKTIQPRVE

SEQ ID NO: 8266 - protein, 11 aa, Severe acute respiratory syndrome-related coronavirus
  REGION 1..11: note = Table B: HLA-DQA1*03:02-B1*03:03L HLA-DQA1*05:01-B1*03:01L HLA-DRB1*04:03L HLA-DRB1*04:02L HLA-DQA1*01:02-B1*06:02L HLA-DRB4*03:01NL HLA-DRB1*04:10L HLA-DQA1*05:05-B1*03:01L HLA-DRB1*14:17L HLA-DQA1*01:03-B1*06:01L
  REGION 1..11: note = CONT. FROM ABOVE: HLA-DQA1*02:01-B1*03:03L
  source 1..11: note = Severe acute respiratory syndrome coronavirus 2
IRSVYPVASPN

SEQ ID NO: 8267 - protein, 10 aa, Severe acute respiratory syndrome-related coronavirus
  REGION 1..10: note = Table B: HLA-DQA1*03:02-B1*03:03L HLA-DQA1*05:01-B1*03:01L HLA-DRB1*04:03L HLA-DRB1*13:02L HLA-DRB1*13:03L HLA-DRB1*01:03L HLA-DRB1*04:02L HLA-DRB1*04:05L HLA-DQA1*01:02-B1*06:02L HLA-DRB4*03:01NL HLA-DRB1*08:77L HLA-DRB1*14:01L HLA-DRB1*11:04L
  REGION 1..10: note = CONT. FROM ABOVE: HLA-DRB1*14:02L HLA-DQA1*01-B1*05L HLA-DQA1*05 :05-B1*03:19L HLA-DQA1*05:01-B1*02:01L HLA-DRB1*04:10L HLA-DRB1* 12:01L HLA-DRB1*12:02L HLA-DPA1*03:01-B1*105:01L HLA-DQA1*03:01- B1*03:02L HLA-DRB1*14:54L HLA-DQA1*05:05-B1*03:01L
  REGION 1..10: note = CONT. FROM ABOVE: HLA-DRB1*14:17L HLA-DPA1*01:02-B1*04:01L HLA-D RB1*10:01L HLA-DRB1*16:01L HLA-DQA1*01:03-B1*06:01L HLA-DQA1*02: 01-B1*03:03L
  source 1..10: note = Severe acute respiratory syndrome coronavirus 2
SVYPVASPNE

SEQ ID NO: 8268 - protein, 12 aa, Severe acute respiratory syndrome-related coronavirus
  REGION 1..12: note = Table B: HLA-DQA1*03:02-B1*03:03L HLA-DQA1*05:01-B1*03:01L HLA-DRB1*04:03L HLA-DQA1*01:02-B1*06:02L HLA-DQA1*05:05-B1*03:19L HLA-DQA1*03:01-B1*03:02L HLA-DQA1*05:05-B1*03:01L HLA-DQA1*02:01-B1*03:03L
  source 1..12: note = Severe acute respiratory syndrome coronavirus 2
VYPVASPNECNQ

SEQ ID NO: 8269 - protein, 10 aa, Severe acute respiratory syndrome-related coronavirus
  REGION 1..10: note = Table B: HLA-DQA1*03:02-B1*03:03L HLA-DQA1*05:01-B1*03:01L HLA-DRB1*08:77L HLA-DPA1*03:01-B1*04:02L HLA-DRB1*03:01L HLA-DQA1*01-B1*05L HLA-DQA1*05:05-B1*03:19L HLA-DQA1*05:01-B1*02:01L HLA-DRB4*01:01L
  REGION 1..10: note = CONT. FROM ABOVE: HLA-DPA1*01:03-B1*04:01L HLA-DQA1*03:01-B1*03: 02L HLA-DPA1*01:03-B1*104:01L HLA-DPA1*01:02-B1*04:01L HLA-DRB1* 16:01L HLA-DRB1*15:03L
  source 1..10: note = Severe acute respiratory syndrome coronavirus 2
GETSWQTGDF

SEQ ID NO: 8270 - protein, 10 aa, Severe acute respiratory syndrome-related coronavirus
  REGION 1..10: note = Table B: HLA-DQA1*03:02-B1*03:03L HLA-DPA1*03:01-B1*105:01L
  source 1..10: note = Severe acute respiratory syndrome coronavirus 2
ETSWQTGDFV

SEQ ID NO: 8271 - protein, 10 aa, Severe acute respiratory syndrome-related coronavirus
  REGION 1..10: note = Table B: HLA-DQA1*03:02-B1*03:03L HLA-DQA1*05:01-B1*03:01L HLA-DRB1*04:03L HLA-DRB1*13:03L HLA-DRB1*04:02L HLA-DRB4*03:01NL HLA-DQA1*05:01-B1*02:01L HLA-DQA1*03:01-B1*03:02L HLA-DQA1*05:05-B1*03:01L HLA-DQA1*01:03-B1*06:01L
  REGION 1..10: note = CONT. FROM ABOVE: HLA-DQA1*02:01-B1*03:03L
  source 1..10: note = Severe acute respiratory syndrome coronavirus 2
TSWQTGDFVK

SEQ ID NO: 8272 - protein, 10 aa, Severe acute respiratory syndrome-related coronavirus
  REGION 1..10: note = Table B: HLA-DQA1*03:02-B1*03:03L HLA-DPA1*03:01-B1*04:02L HLA-DQA1*01-B1*05L HLA-DPA1*03:01-B1*105:01L HLA-DQA1*03:01-B1*03:02L HLA-DPA1*01:02-B1*04:01L HLA-DRB1*16:01L HLA-DQA1*01:03-B1*06:01L
  REGION 1..10: note = CONT. FROM ABOVE: HLA-DQA1*02:01-B1*03:03L
  source 1..10: note = Severe acute respiratory syndrome coronavirus 2
SWQTGDFVKA

SEQ ID NO: 8273 - protein, 10 aa, Severe acute respiratory syndrome-related coronavirus
  REGION 1..10: note = Table B: HLA-DQA1*03:02-B1*03:03L HLA-DQA1*05:01-B1*03:01L HLA-DRB1*04:03L HLA-DRB1*01:03L HLA-DQA1*01:02-B1*06:02L HLA-DPA1*03:01-B1*04:02L HLA-DQA1*01-B1*05L HLA-DQA1*05:05-B1*03:19L HLA-DQA1*05:01-B1*02:01L
  REGION 1..10: note = CONT. FROM ABOVE: HLA-DPA1*01:03-B1*04:01L HLA-DPA1*01:03-B1*04: 02L HLA-DPA1*03:01-B1*105:01L HLA-DQA1*03:01-B1*03:02L HLA-DQA1* 05:05-B1*03:01L HLA-DPA1*01:02-B1*04:01L HLA-DRB1*16:01L HLA-DQA 1*01:03-B1*06:01M HLA-DRB1*04:08L HLA-DQA1*02:01-B1*03:03L
  source 1..10: note = Severe acute respiratory syndrome coronavirus 2
WQTGDFVKAT

SEQ ID NO: 8274 - protein, 15 aa, Severe acute respiratory syndrome-related coronavirus
  REGION 1..15: note = Table B: HLA-DQA1*03:02-B1*03:03L HLA-DRB1*04:03L HLA-DRB1*13:02L HLA-DPA1*03:01-B1*04:02L HLA-DRB1*14:01L HLA-DRB1*12:01L HLA-DRB1*16:01L
  source 1..15: note = Severe acute respiratory syndrome coronavirus 2
GDFVKATCEFCGTEN

SEQ ID NO: 8275 - protein, 10 aa, Severe acute respiratory syndrome-related coronavirus
  REGION 1..10: note = Table B: HLA-DQA1*03:02-B1*03:03L
  source 1..10: note = Severe acute respiratory syndrome coronavirus 2
TENLTKEGAT

SEQ ID NO: 8276 - protein, 10 aa, Severe acute respiratory syndrome-related coronavirus
  REGION 1..10: note = Table B: HLA-DQA1*03:02-B1*03:03L HLA-DQA1*05:01-B1*03:01L HLA-DRB1*04:03L HLA-DRB1*13:02L HLA-DRB1*13:03L HLA-DRB1*01:03L HLA-DRB1*04:02L HLA-DRB1*04:05L HLA-DQA1*01:02-B1*06:02L HLA-DRB1*01:01L HLA-DRB1*01:02L HLA-DRB4*03:01NL HLA-DRB3*02:01L
  REGION 1..10: note = CONT. FROM ABOVE: HLA-DRB1*14:01L HLA-DRB1*11:04L HLA-DRB1*14:02 L HLA-DRB1*08:01L HLA-DRB5*01:01L HLA-DQA1*01-B1*05L HLA-DQA1*05 :01-B1*02:01L HLA-DRB1*12:01L HLA-DRB1*12:02L HLA-DPA1*03:01-B1* 105:01L HLA-DQA1*03:01-B1*03:02M HLA-DRB1*14:54L
  REGION 1..10: note = CONT. FROM ABOVE: HLA-DQA1*05:05-B1*03:01L HLA-DRB1*14:17L HLA-D PA1*01:02-B1*04:01L HLA-DRB1*16:01L HLA-DQA1*01:03-B1*06:01L HLA -DRB1*04:08L HLA-DQA1*02:01-B1*03:03L
  source 1..10: note = Severe acute respiratory syndrome coronavirus 2
GYLPQNAVVK

SEQ ID NO: 8277 - protein, 10 aa, Severe acute respiratory syndrome-related coronavirus
  REGION 1..10: note = Table B: HLA-DQA1*03:02-B1*03:03M HLA-DQA1*05:01-B1*03:01L HLA-DRB1*01:03L HLA-DRB1*04:05L HLA-DQA1*01:02-B1*06:02L HLA-DRB1*01:01L HLA-DRB1*01:02L HLA-DRB1*08:77L HLA-DPA1*03:01-B1*04:02L HLA-DRB1*14:01L HLA-DRB1*14:02L
  REGION 1..10: note = CONT. FROM ABOVE: HLA-DQA1*01-B1*05L HLA-DQA1*05:05-B1*03:19L HL A-DQA1*05:01-B1*02:01L HLA-DQA1*05:05-B1*03:116M HLA-DRB1*09:01L HLA-DPA1*02:01-B1*13:01M HLA-DPA1*03:01-B1*105:01L HLA-DQA1*03:0 1-B1*03:02L HLA-DPA1*01:03-B1*104:01L HLA-DPA1*01:02-B1*04:01L
  REGION 1..10: note = CONT. FROM ABOVE: HLA-DRB1*10:01L HLA-DRB1*16:01L HLA-DQA1*01:03 -B1*06:01M HLA-DRB1*08:03L HLA-DQA1*02:01-B1*03:03L HLA-DRB1*15: 03L
  source 1..10: note = Severe acute respiratory syndrome coronavirus 2
YLPQNAVVKI

SEQ ID NO: 8278 - protein, 13 aa, Severe acute respiratory syndrome-related coronavirus
  REGION 1..13: note = Table B: HLA-DQA1*03:02-B1*03:03L HLA-DQA1*03:01-B1*03:02L HLA-DQA1*05:05-B1*03:01L HLA-DQA1*01:03-B1*06:01L
  source 1..13: note = Severe acute respiratory syndrome coronavirus 2
LPQNAVVKIYCPA

SEQ ID NO: 8279 - protein, 10 aa, Severe acute respiratory syndrome-related coronavirus
  REGION 1..10: note = Table B: HLA-DQA1*03:02-B1*03:03M HLA-DQA1*05:01-B1*03:01L HLA-DRB1*13:03L HLA-DRB1*08:77L HLA-DPA1*03:01-B1*04:02L HLA-DRB1*14:02L HLA-DQA1*01-B1*05L HLA-DQA1*05:05-B1*03:19L HLA-DQA1*05:01-B1*02:01L HLA-DQA1*05:05-B1*03:116L
  REGION 1..10: note = CONT. FROM ABOVE: HLA-DRB1*09:01L HLA-DPA1*01:03-B1*04:02L HLA-D QA1*03:01-B1*03:02L HLA-DPA1*01:03-B1*104:01L HLA-DPA1*01:02-B1* 04:01L HLA-DRB1*16:01L HLA-DQA1*02:01-B1*03:03L HLA-DRB1*15:03L
  source 1..10: note = Severe acute respiratory syndrome coronavirus 2
NSEVGPEHSL

SEQ ID NO: 8280 - protein, 10 aa, Severe acute respiratory syndrome-related coronavirus
  REGION 1..10: note = Table B: HLA-DQA1*03:02-B1*03:03L HLA-DQA1*05:05-B1*03:19L HLA-DQA1*03:01-B1*03:02L
  source 1..10: note = Severe acute respiratory syndrome coronavirus 2
SEVGPEHSLA

SEQ ID NO: 8281 - protein, 12 aa, Severe acute respiratory syndrome-related coronavirus
  REGION 1..12: note = Table B: HLA-DQA1*03:02-B1*03:03L HLA-DQA1*05:01-B1*03:01L HLA-DRB1*04:03L HLA-DQA1*01:01-B1*05:01L HLA-DQA1*05:05-B1*03:01L HLA-DQA1*01:03-B1*06:01L
  source 1..12: note = Severe acute respiratory syndrome coronavirus 2
VGPEHSLAEYHN

SEQ ID NO: 8282 - protein, 13 aa, Severe acute respiratory syndrome-related coronavirus
  REGION 1..13: note = Table B: HLA-DQA1*03:02-B1*03:03L
  source 1..13: note = Severe acute respiratory syndrome coronavirus 2
GPEHSLAEYHNES

SEQ ID NO: 8283 - protein, 11 aa, Severe acute respiratory syndrome-related coronavirus
  REGION 1..11: note = Table B: HLA-DQA1*03:02-B1*03:03L
  source 1..11: note = Severe acute respiratory syndrome coronavirus 2
SLAEYHNESGL

SEQ ID NO: 8284 - protein, 11 aa, Severe acute respiratory syndrome-related coronavirus
  REGION 1..11: note = Table B: HLA-DQA1*03:02-B1*03:03L HLA-DRB1*04:03L HLA-DRB1*13:03L HLA-DRB1*01:03L HLA-DRB1*04:02L HLA-DRB1*04:05L HLA-DRB1*01:02L HLA-DRB4*03:01NL HLA-DRB1*12:01L HLA-DRB1*14:17L HLA-DRB1*16:01L HLA-DRB1*04:08L HLA-DQA1*02:01-B1*03:03L
  source 1..11: note = Severe acute respiratory syndrome coronavirus 2
AEYHNESGLKT

SEQ ID NO: 8285 - protein, 10 aa, Severe acute respiratory syndrome-related coronavirus
  REGION 1..10: note = Table B: HLA-DQA1*03:02-B1*03:03L HLA-DQA1*05:01-B1*03:01L HLA-DRB1*13:03L HLA-DRB1*04:05L HLA-DQA1*01:02-B1*06:02L HLA-DRB1*01:02L HLA-DPA1*03:01-B1*04:02L HLA-DRB1*14:01L HLA-DRB1*11:02L HLA-DRB1*08:01L HLA-DQA1*01-B1*05L
  REGION 1..10: note = CONT. FROM ABOVE: HLA-DQA1*05:05-B1*03:19M HLA-DQA1*05:01-B1*02: 01L HLA-DPA1*01:03-B1*04:01L HLA-DQA1*05:05-B1*03:116L HLA-DPA1* 02:01-B1*13:01L HLA-DPA1*03:01-B1*105:01L HLA-DQA1*03:01-B1*03:0 2L HLA-DPA1*01:03-B1*104:01L HLA-DPA1*01:02-B1*04:01L
  REGION 1..10: note = CONT. FROM ABOVE: HLA-DRB1*10:01L HLA-DRB1*16:01L HLA-DQA1*01:03 -B1*06:01L HLA-DQA1*02:01-B1*03:03L HLA-DRB1*15:03L
  source 1..10: note = Severe acute respiratory syndrome coronavirus 2
YHNESGLKTI

SEQ ID NO: 8286 - protein, 10 aa, Severe acute respiratory syndrome-related coronavirus
  REGION 1..10: note = Table B: HLA-DQA1*03:02-B1*03:03L
  source 1..10: note = Severe acute respiratory syndrome coronavirus 2
HNESGLKTIL

SEQ ID NO: 8287 - protein, 15 aa, Severe acute respiratory syndrome-related coronavirus
  REGION 1..15: note = Table B: HLA-DQA1*03:02-B1*03:03L HLA-DRB1*01:03L HLA-DRB1*12:01L HLA-DPA1*02:01-B1*13:01L HLA-DPA1*01:03-B1*104:01L HLA-DRB1*16:01L HLA-DRB1*15:03L
  source 1..15: note = Severe acute respiratory syndrome coronavirus 2
GRTIAFGGCVFSYVG

SEQ ID NO: 8288 - protein, 10 aa, Severe acute respiratory syndrome-related coronavirus
  REGION 1..10: note = Table B: HLA-DQA1*03:02-B1*03:03L HLA-DQA1*05:01-B1*03:01L HLA-DRB1*04:03L HLA-DRB1*13:03L HLA-DRB1*01:03L HLA-DRB1*04:02L HLA-DRB4*03:01NL HLA-DRB1*14:01L HLA-DQA1*05:05-B1*03:19L HLA-DQA1*05:01-B1*02:01L HLA-DQA1*03:01-B1*03:02L
  REGION 1..10: note = CONT. FROM ABOVE: HLA-DQA1*05:05-B1*03:01L HLA-DRB1*14:17L HLA-D PA1*01:02-B1*04:01L HLA-DRB1*16:01L HLA-DQA1*02:01-B1*03:03L
  source 1..10: note = Severe acute respiratory syndrome coronavirus 2
WVPRASANIG

SEQ ID NO: 8289 - protein, 14 aa, Severe acute respiratory syndrome-related coronavirus
  REGION 1..14: note = Table B: HLA-DQA1*03:02-B1*03:03L HLA-DRB1*04:03L HLA-DRB1*13:02L HLA-DRB1*01:03L HLA-DRB1*04:04L HLA-DQA1*01:01-B1*05:01L HLA-DRB1*08:01L HLA-DQA1*05:05-B1*03:19L HLA-DPA1*02:01-B1*13:01L
  REGION 1..14: note = CONT. FROM ABOVE: HLA-DPA1*03:01-B1*105:01L HLA-DPA1*01:03-B1*10 4:01L HLA-DRB1*07:01L HLA-DRB1*04:08L
  source 1..14: note = Severe acute respiratory syndrome coronavirus 2
VPRASANIGCNHTG

SEQ ID NO: 8290 - protein, 13 aa, Severe acute respiratory syndrome-related coronavirus
  REGION 1..13: note = Table B: HLA-DQA1*03:02-B1*03:03L HLA-DRB1*14:04L HLA-DRB1*13:03L HLA-DRB1*01:03L HLA-DRB1*04:05L HLA-DRB1*01:02L HLA-DRB4*03:01NL HLA-DRB1*08:77L HLA-DRB3*02:01L HLA-DPA1*01:03-B1*03:01L HLA-DPA1*03:01-B1*04:02L
  REGION 1..13: note = CONT. FROM ABOVE: HLA-DRB1*11:03L HLA-DRB1*11:04L HLA-DRB1*14:02 L HLA-DRB1*08:01L HLA-DQA1*05:05-B1*03:19L HLA-DQA1*05:01-B1*02: 01L HLA-DPA1*02:01-B1*13:01L HLA-DPA1*03:01-B1*105:01L HLA-DPA1* 01:03-B1*104:01L HLA-DRB1*14:17L HLA-DRB1*16:01L HLA-DRB1*04:08L
  source 1..13: note = Severe acute respiratory syndrome coronavirus 2
SANIGCNHTGVVG

SEQ ID NO: 8291 - protein, 11 aa, Severe acute respiratory syndrome-related coronavirus
  REGION 1..11: note = Table B: HLA-DQA1*03:02-B1*03:03L HLA-DQA1*05:01-B1*03:01L HLA-DQA1*01:02-B1*06:02L HLA-DQA1*05:05-B1*03:19L HLA-DPA1*03:01-B1*105:01L HLA-DQA1*03:01-B1*03:02L HLA-DQA1*05:05-B1*03:01L
  source 1..11: note = Severe acute respiratory syndrome coronavirus 2
NHTGVVGEGSE

SEQ ID NO: 8292 - protein, 11 aa, Severe acute respiratory syndrome-related coronavirus
  REGION 1..11: note = Table B: HLA-DQA1*03:02-B1*03:03L HLA-DQA1*05:01-B1*03:01L HLA-DQA1*01:02-B1*06:02L HLA-DQA1*01:01-B1*05:01L HLA-DQA1*05:05-B1*03:19L HLA-DQA1*03:01-B1*03:02L HLA-DQA1*05:05-B1*03:01L
  source 1..11: note = Severe acute respiratory syndrome coronavirus 2
HTGVVGEGSEG

SEQ ID NO: 8293 - protein, 10 aa, Severe acute respiratory syndrome-related coronavirus
  REGION 1..10: note = Table B: HLA-DQA1*03:02-B1*03:03L HLA-DQA1*03:01-B1*03:02L
  source 1..10: note = Severe acute respiratory syndrome coronavirus 2
GVVGEGSEGL

SEQ ID NO: 8294 - protein, 12 aa, Severe acute respiratory syndrome-related coronavirus
  REGION 1..12: note = Table B: HLA-DQA1*03:02-B1*03:03L HLA-DQA1*05:01-B1*03:01L HLA-DRB1*04:03L HLA-DRB1*13:02L HLA-DRB1*13:03L HLA-DRB1*01:03L HLA-DRB1*04:02L HLA-DRB1*04:05L HLA-DQA1*01:02-B1*06:02L HLA-DRB1*01:02L HLA-DRB4*03:01NL HLA-DRB1*08:77L
  REGION 1..12: note = CONT. FROM ABOVE: HLA-DPA1*01:03-B1*03:01L HLA-DRB1*11:03L HLA-D RB1*14:02L HLA-DQA1*01:01-B1*05:01L HLA-DQA1*01-B1*05L HLA-DQA1* 05:05-B1*03:19L HLA-DQA1*05:01-B1*02:01L HLA-DRB1*04:10L HLA-DRB 1*12:01L HLA-DRB1*12:02L HLA-DPA1*03:01-B1*105:01L
  REGION 1..12: note = CONT. FROM ABOVE: HLA-DRB1*14:54L HLA-DQA1*05:05-B1*03:01L HLA-D RB1*14:17L HLA-DRB1*07:01L HLA-DRB1*10:01L HLA-DRB1*16:01L HLA-D QA1*01:03-B1*06:01L HLA-DRB1*04:08L HLA-DQA1*02:01-B1*03:03L HLA -DRB1*15:03L
  source 1..12: note = Severe acute respiratory syndrome coronavirus 2
VVGEGSEGLNDN

SEQ ID NO: 8295 - protein, 11 aa, Severe acute respiratory syndrome-related coronavirus
  REGION 1..11: note = Table B: HLA-DQA1*03:02-B1*03:03L HLA-DQA1*05:05-B1*03:19L HLA-DQA1*03:01-B1*03:02L
  source 1..11: note = Severe acute respiratory syndrome coronavirus 2
GEGSEGLNDNL

SEQ ID NO: 8296 - protein, 10 aa, Severe acute respiratory syndrome-related coronavirus
  REGION 1..10: note = Table B: HLA-DQA1*03:02-B1*03:03L HLA-DQA1*01-B1*05L
  source 1..10: note = Severe acute respiratory syndrome coronavirus 2
GSEGLNDNLL

SEQ ID NO: 8297 - protein, 11 aa, Severe acute respiratory syndrome-related coronavirus
  REGION 1..11: note = Table B: HLA-DQA1*03:02-B1*03:03L HLA-DRB1*11:02L HLA-DQA1*05:05-B1*03:19M HLA-DQA1*03:01-B1*03:02L HLA-DPA1*01:03-B1*104:01L
  source 1..11: note = Severe acute respiratory syndrome coronavirus 2
SEGLNDNLLEI

SEQ ID NO: 8298 - protein, 10 aa, Severe acute respiratory syndrome-related coronavirus
  REGION 1..10: note = Table B: HLA-DQA1*03:02-B1*03:03L
  source 1..10: note = Severe acute respiratory syndrome coronavirus 2
GLNDNLLEIL

SEQ ID NO: 8299 - protein, 13 aa, Severe acute respiratory syndrome-related coronavirus
  REGION 1..13: note = Table B: HLA-DQA1*03:02-B1*03:03L HLA-DRB1*14:04L HLA-DRB1*04:03L HLA-DRB4*03:01NL HLA-DRB3*02:01L HLA-DPA1*01:03-B1*03:01L HLA-DRB1*11:02L HLA-DRB1*11:03L HLA-DRB1*14:02L HLA-DQA1*05:05-B1*03:19L
  REGION 1..13: note = CONT. FROM ABOVE: HLA-DQA1*05:01-B1*02:01L HLA-DQA1*05:05-B1*03: 116L HLA-DPA1*01:03-B1*04:02L HLA-DRB1*12:02L HLA-DPA1*02:01-B1* 13:01L HLA-DPA1*03:01-B1*105:01L HLA-DPA1*01:03-B1*02:01L HLA-DQ A1*05:05-B1*03:01L HLA-DRB1*14:17L HLA-DRB1*07:01L
  REGION 1..13: note = CONT. FROM ABOVE: HLA-DRB1*08:02L HLA-DRB1*08:03L
  source 1..13: note = Severe acute respiratory syndrome coronavirus 2
DNLLEILQKEKVN

SEQ ID NO: 8300 - protein, 13 aa, Severe acute respiratory syndrome-related coronavirus
  REGION 1..13: note = Table B: HLA-DQA1*03:02-B1*03:03L HLA-DQA1*05:01-B1*03:01L HLA-DRB1*04:03L HLA-DRB1*13:02L HLA-DRB1*01:03L HLA-DRB1*04:02L HLA-DRB1*04:05L HLA-DQA1*01:02-B1*06:02L HLA-DRB1*01:02L HLA-DPA1*01:03-B1*03:01L HLA-DQA1*05:01-B1*02:01L
  REGION 1..13: note = CONT. FROM ABOVE: HLA-DRB1*12:01L HLA-DPA1*02:01-B1*13:01L HLA-D PA1*03:01-B1*105:01L HLA-DQA1*03:01-B1*03:02L HLA-DQA1*05:05-B1* 03:01L HLA-DRB1*16:01L HLA-DQA1*02:01-B1*03:03L HLA-DRB1*15:03L
  source 1..13: note = Severe acute respiratory syndrome coronavirus 2
ILQKEKVNINIVG

SEQ ID NO: 8301 - protein, 10 aa, Severe acute respiratory syndrome-related coronavirus
  REGION 1..10: note = Table B: HLA-DQA1*03:02-B1*03:03L HLA-DRB1*04:03L HLA-DRB1*04:02L HLA-DQA1*01:02-B1*06:02L HLA-DQA1*05:01-B1*02:01L HLA-DQA1*03:01-B1*03:02L HLA-DRB1*14:17L HLA-DQA1*01:03-B1*06:01L
  REGION 1..10: note = CONT. FROM ABOVE: HLA-DQA1*02:01-B1*03:03L
  source 1..10: note = Severe acute respiratory syndrome coronavirus 2
VNINIVGDFK

SEQ ID NO: 8302 - protein, 10 aa, Severe acute respiratory syndrome-related coronavirus
  REGION 1..10: note = Table B: HLA-DQA1*03:02-B1*03:03L HLA-DQA1*05:01-B1*03:01L HLA-DRB1*04:03L HLA-DRB1*13:02L HLA-DRB1*13:03L HLA-DRB1*01:03L HLA-DRB1*04:02L HLA-DRB1*04:05L HLA-DRB1*01:02L HLA-DRB4*03:01NL HLA-DPA1*01:03-B1*03:01L HLA-DRB1*14:01L HLA-DRB1*14:02L
  REGION 1..10: note = CONT. FROM ABOVE: HLA-DQA1*01-B1*05L HLA-DQA1*05:01-B1*02:01L HL A-DRB1*12:01L HLA-DPA1*03:01-B1*105:01L HLA-DQA1*03:01-B1*03:02L HLA-DRB1*14:54L HLA-DRB1*14:17L HLA-DPA1*01:02-B1*04:01L HLA-DRB 1*16:01L HLA-DQA1*01:03-B1*06:01L HLA-DRB1*04:08L
  REGION 1..10: note = CONT. FROM ABOVE: HLA-DQA1*02:01-B1*03:03L HLA-DRB1*15:03L
  source 1..10: note = Severe acute respiratory syndrome coronavirus 2
IVGDFKLNEE

SEQ ID NO: 8303 - protein, 13 aa, Severe acute respiratory syndrome-related coronavirus
  REGION 1..13: note = Table B: HLA-DQA1*03:02-B1*03:03L HLA-DQA1*05:01-B1*03:01L HLA-DRB1*04:03L HLA-DQA1*01:02-B1*06:02L HLA-DRB1*01:02L HLA-DRB1*08:04L HLA-DRB1*08:77L HLA-DPA1*01:03-B1*03:01L HLA-DRB1*14:02L HLA-DQA1*05:05-B1*03:19L
  REGION 1..13: note = CONT. FROM ABOVE: HLA-DPA1*01:03-B1*04:01L HLA-DRB1*09:01L HLA-D RB1*12:02L HLA-DPA1*02:01-B1*13:01L HLA-DPA1*03:01-B1*105:01L HL A-DQA1*05:05-B1*03:01L HLA-DPA1*01:02-B1*04:01L HLA-DRB1*07:01L HLA-DQA1*01:03-B1*06:01L HLA-DQA1*02:01-B1*03:03L
  source 1..13: note = Severe acute respiratory syndrome coronavirus 2
VGDFKLNEEIAII

SEQ ID NO: 8304 - protein, 10 aa, Severe acute respiratory syndrome-related coronavirus
  REGION 1..10: note = Table B: HLA-DQA1*03:02-B1*03:03L HLA-DPA1*03:01-B1*04:02L HLA-DQA1*03:01-B1*03:02L HLA-DQA1*02:01-B1*03:03L HLA-DRB1*15:03L
  source 1..10: note = Severe acute respiratory syndrome coronavirus 2
KLNEEIAIIL

SEQ ID NO: 8305 - protein, 10 aa, Severe acute respiratory syndrome-related coronavirus
  REGION 1..10: note = Table B: HLA-DQA1*03:02-B1*03:03M HLA-DQA1*05:01-B1*03:01M HLA-DRB1*13:03L HLA-DQA1*01:02-B1*06:02L HLA-DRB4*03:01NL HLA-DRB1*08:77M HLA-DPA1*01:03-B1*03:01L HLA-DPA1*03:01-B1*04:02L HLA-DRB1*03:01L HLA-DRB1*11:02L
  REGION 1..10: note = CONT. FROM ABOVE: HLA-DQA1*01-B1*05L HLA-DQA1*05:05-B1*03:19M HL A-DQA1*05:01-B1*02:01L HLA-DRB4*01:01M HLA-DPA1*01:03-B1*04:01M HLA-DQA1*05:05-B1*03:116L HLA-DRB1*09:01L HLA-DPA1*01:03-B1*04:0 2L HLA-DRB1*12:01L HLA-DPA1*02:01-B1*13:01L
  REGION 1..10: note = CONT. FROM ABOVE: HLA-DPA1*03:01-B1*105:01L HLA-DQA1*03:01-B1*03 :02L HLA-DPA1*01:03-B1*104:01L HLA-DPA1*01:02-B1*04:01L HLA-DRB1 *10:01L HLA-DRB1*16:01L HLA-DRB1*15:03M
  source 1..10: note = Severe acute respiratory syndrome coronavirus 2
EEIAIILASF

SEQ ID NO: 8306 - protein, 14 aa, Severe acute respiratory syndrome-related coronavirus
  REGION 1..14: note = Table B: HLA-DQA1*03:02-B1*03:03L HLA-DRB1*13:02L HLA-DRB1*01:03L HLA-DPA1*03:01-B1*04:02L HLA-DQA1*01-B1*05L HLA-DRB4*01:01L HLA-DPA1*01:03-B1*104:01L HLA-DRB1*10:01L HLA-DQA1*01:03-B1*06:01L
  source 1..14: note = Severe acute respiratory syndrome coronavirus 2
IAIILASFSASTSA

SEQ ID NO: 8307 - protein, 10 aa, Severe acute respiratory syndrome-related coronavirus
  REGION 1..10: note = Table B: HLA-DQA1*03:02-B1*03:03L HLA-DQA1*05:01-B1*03:01L HLA-DRB1*13:03L HLA-DRB1*01:03L HLA-DQA1*01:02-B1*06:02L HLA-DRB1*08:77L HLA-DRB1*14:02L HLA-DQA1*05:05-B1*03:19L HLA-DQA1*05:01-B1*02:01L HLA-DPA1*01:03-B1*04:01L
  REGION 1..10: note = CONT. FROM ABOVE: HLA-DPA1*02:01-B1*13:01L HLA-DPA1*03:01-B1*105 :01L HLA-DQA1*01:03-B1*06:01L HLA-DQA1*02:01-B1*03:03L HLA-DRB1* 15:03L
  source 1..10: note = Severe acute respiratory syndrome coronavirus 2
ASFSASTSAF

SEQ ID NO: 8308 - protein, 12 aa, Severe acute respiratory syndrome-related coronavirus
  REGION 1..12: note = Table B: HLA-DQA1*03:02-B1*03:03L HLA-DQA1*05:01-B1*03:01L HLA-DRB1*01:02L HLA-DRB4*03:01NL HLA-DRB1*08:77L HLA-DQA1*05:05-B1*03:19L HLA-DQA1*05:01-B1*02:01L HLA-DRB1*12:01L HLA-DQA1*05:05-B1*03:01L HLA-DRB1*07:01L
  REGION 1..12: note = CONT. FROM ABOVE: HLA-DRB1*16:01L HLA-DQA1*02:01-B1*03:03L
  source 1..12: note = Severe acute respiratory syndrome coronavirus 2
SFSASTSAFVET

SEQ ID NO: 8309 - protein, 10 aa, Severe acute respiratory syndrome-related coronavirus
  REGION 1..10: note = Table B: HLA-DQA1*03:02-B1*03:03L HLA-DQA1*05:01-B1*03:01L HLA-DRB1*13:02L HLA-DRB1*13:03L HLA-DRB1*01:03L HLA-DQA1*01:02-B1*06:02L HLA-DRB4*03:01NL HLA-DRB1*08:01L HLA-DRB5*01:01L HLA-DQA1*05:05-B1*03:19L
  REGION 1..10: note = CONT. FROM ABOVE: HLA-DQA1*05:01-B1*02:01L HLA-DPA1*01:03-B1*04: 02L HLA-DRB1*12:01L HLA-DPA1*03:01-B1*105:01L HLA-DQA1*03:01-B1* 03:02L HLA-DQA1*05:05-B1*03:01M HLA-DRB1*16:01L HLA-DQA1*01:03-B 1*06:01M HLA-DQA1*02:01-B1*03:03L
  source 1..10: note = Severe acute respiratory syndrome coronavirus 2
STSAFVETVK

SEQ ID NO: 8310 - protein, 10 aa, Severe acute respiratory syndrome-related coronavirus
  REGION 1..10: note = Table B: HLA-DQA1*03:02-B1*03:03L HLA-DQA1*05:01-B1*03:01L HLA-DRB1*04:03L HLA-DQA1*01:02-B1*06:02L HLA-DQA1*01:01-B1*05:01L HLA-DQA1*05:05-B1*03:19L HLA-DQA1*05:01-B1*02:01L HLA-DPA1*03:01-B1*105:01L
  REGION 1..10: note = CONT. FROM ABOVE: HLA-DQA1*03:01-B1*03:02L HLA-DQA1*05:05-B1*03: 01L HLA-DQA1*01:03-B1*06:01M HLA-DQA1*02:01-B1*03:03L
  source 1..10: note = Severe acute respiratory syndrome coronavirus 2
TSAFVETVKG

SEQ ID NO: 8311 - protein, 10 aa, Severe acute respiratory syndrome-related coronavirus
  REGION 1..10: note = Table B: HLA-DQA1*03:02-B1*03:03L HLA-DQA1*05:01-B1*03:01L HLA-DQA1*01:02-B1*06:02L HLA-DQA1*05:05-B1*03:19L HLA-DPA1*03:01-B1*105:01L HLA-DQA1*03:01-B1*03:02L HLA-DQA1*01:03-B1*06:01L HLA-DQA1*02:01-B1*03:03L
  source 1..10: note = Severe acute respiratory syndrome coronavirus 2
SAFVETVKGL

SEQ ID NO: 8312 - protein, 10 aa, Severe acute respiratory syndrome-related coronavirus
  REGION 1..10: note = Table B: HLA-DQA1*03:02-B1*03:03L HLA-DQA1*05:01-B1*03:01L HLA-DRB1*04:03L HLA-DRB1*13:02L HLA-DRB1*13:03L HLA-DRB1*01:03L HLA-DRB1*04:02L HLA-DRB1*04:05L HLA-DQA1*01:02-B1*06:02L HLA-DRB4*03:01NL HLA-DRB1*08:77M HLA-DPA1*01:03-B1*03:01M
  REGION 1..10: note = CONT. FROM ABOVE: HLA-DPA1*03:01-B1*04:02L HLA-DRB1*03:01L HLA-D RB1*14:01L HLA-DRB1*11:02L HLA-DRB1*11:03L HLA-DRB1*14:02L HLA-D RB1*11:01L HLA-DQA1*01-B1*05M HLA-DQA1*05:05-B1*03:19M HLA-DQA1* 05:01-B1*02:01M HLA-DRB4*01:01L HLA-DPA1*01:03-B1*04:01L
  REGION 1..10: note = CONT. FROM ABOVE: HLA-DQA1*05:05-B1*03:116L HLA-DPA1*01:03-B1*04 :02L HLA-DRB1*12:01L HLA-DPA1*02:01-B1*13:01L HLA-DPA1*03:01-B1* 105:01L HLA-DRB1*14:54L HLA-DPA1*01:03-B1*104:01M HLA-DPA1*01:02 -B1*04:01L HLA-DRB1*10:01L HLA-DRB1*16:01M
  REGION 1..10: note = CONT. FROM ABOVE: HLA-DQA1*01:03-B1*06:01L HLA-DRB1*08:02L HLA-D QA1*02:01-B1*03:03L HLA-DRB1*15:03L
  source 1..10: note = Severe acute respiratory syndrome coronavirus 2
FVETVKGLDY

SEQ ID NO: 8313 - protein, 10 aa, Severe acute respiratory syndrome-related coronavirus
  REGION 1..10: note = Table B: HLA-DQA1*03:02-B1*03:03L HLA-DQA1*05:01-B1*03:01L HLA-DRB1*04:03L HLA-DRB1*13:02L HLA-DRB1*13:03L HLA-DRB1*01:03L HLA-DRB1*04:02L HLA-DRB1*04:05L HLA-DQA1*01:02-B1*06:02L HLA-DRB1*01:02L HLA-DRB4*03:01NL HLA-DRB1*08:77L HLA-DRB3*02:01L
  REGION 1..10: note = CONT. FROM ABOVE: HLA-DPA1*03:01-B1*04:02L HLA-DRB1*14:01L HLA-D QA1*01:01-B1*05:01L HLA-DQA1*01-B1*05L HLA-DQA1*05:05-B1*03:19L HLA-DQA1*05:01-B1*02:01L HLA-DRB1*12:01L HLA-DPA1*03:01-B1*105:0 1L HLA-DQA1*03:01-B1*03:02L HLA-DRB1*14:54L
  REGION 1..10: note = CONT. FROM ABOVE: HLA-DQA1*05:05-B1*03:01L HLA-DRB1*14:17L HLA-D PA1*01:02-B1*04:01L HLA-DRB1*16:01L HLA-DQA1*01:03-B1*06:01L HLA -DRB1*04:08L HLA-DQA1*02:01-B1*03:03L HLA-DRB1*15:03L
  source 1..10: note = Severe acute respiratory syndrome coronavirus 2
VETVKGLDYK

SEQ ID NO: 8314 - protein, 12 aa, Severe acute respiratory syndrome-related coronavirus
  REGION 1..12: note = Table B: HLA-DQA1*03:02-B1*03:03L HLA-DRB1*13:02L HLA-DRB1*04:04L HLA-DRB1*08:04L HLA-DPA1*01:03-B1*03:01L HLA-DRB3*01:01L HLA-DPA1*02:01-B1*13:01L HLA-DRB1*08:03L
  source 1..12: note = Severe acute respiratory syndrome coronavirus 2
LDYKAFKQIVES

SEQ ID NO: 8315 - protein, 11 aa, Severe acute respiratory syndrome-related coronavirus
  REGION 1..11: note = Table B: HLA-DQA1*03:02-B1*03:03L HLA-DQA1*05:01-B1*03:01L HLA-DQA1*01:02-B1*06:02L HLA-DQA1*05:01-B1*02:01L HLA-DPA1*02:01-B1*13:01L HLA-DPA1*03:01-B1*105:01L HLA-DPA1*01:03-B1*104:01L HLA-DRB1*16:01L
  REGION 1..11: note = CONT. FROM ABOVE: HLA-DQA1*01:03-B1*06:01L HLA-DRB1*15:03L
  source 1..11: note = Severe acute respiratory syndrome coronavirus 2
GAWNIGEQKSI

SEQ ID NO: 8316 - protein, 10 aa, Severe acute respiratory syndrome-related coronavirus
  REGION 1..10: note = Table B: HLA-DQA1*03:02-B1*03:03L HLA-DQA1*03:01-B1*03:02L HLA-DQA1*01:03-B1*06:01L HLA-DQA1*02:01-B1*03:03L
  source 1..10: note = Severe acute respiratory syndrome coronavirus 2
WNIGEQKSIL

SEQ ID NO: 8317 - protein, 10 aa, Severe acute respiratory syndrome-related coronavirus
  REGION 1..10: note = Table B: HLA-DQA1*03:02-B1*03:03M HLA-DRB1*13:03L HLA-DQA1*05:05-B1*03:19L HLA-DQA1*05:05-B1*03:116L HLA-DRB1*09:01L HLA-DPA1*01:03-B1*04:02L HLA-DQA1*03:01-B1*03:02L HLA-DPA1*01:03-B1*104:01L
  REGION 1..10: note = CONT. FROM ABOVE: HLA-DQA1*02:01-B1*03:03L
  source 1..10: note = Severe acute respiratory syndrome coronavirus 2
GEQKSILSPL

SEQ ID NO: 8318 - protein, 10 aa, Severe acute respiratory syndrome-related coronavirus
  REGION 1..10: note = Table B: HLA-DQA1*03:02-B1*03:03L HLA-DQA1*05:01-B1*03:01L HLA-DRB1*13:02L HLA-DRB1*13:03L HLA-DRB1*01:03L HLA-DQA1*01:02-B1*06:02M HLA-DRB4*03:01NL HLA-DRB1*08:77L HLA-DPA1*01:03-B1*03:01L HLA-DPA1*03:01-B1*04:02L
  REGION 1..10: note = CONT. FROM ABOVE: HLA-DRB1*03:01L HLA-DRB1*14:01L HLA-DRB1*14:02 L HLA-DQA1*01-B1*05L HLA-DQA1*05:05-B1*03:19L HLA-DQA1*05:01-B1* 02:01L HLA-DRB4*01:01L HLA-DPA1*01:03-B1*04:01L HLA-DQA1*05:05-B 1*03:116L HLA-DPA1*01:03-B1*04:02L HLA-DRB1*12:01L
  REGION 1..10: note = CONT. FROM ABOVE: HLA-DPA1*02:01-B1*13:01L HLA-DPA1*03:01-B1*105 :01L HLA-DQA1*03:01-B1*03:02L HLA-DPA1*01:03-B1*104:01L HLA-DQA1 *05:05-B1*03:01L HLA-DPA1*01:02-B1*04:01L HLA-DRB1*10:01L HLA-DR B1*16:01L HLA-DQA1*01:03-B1*06:01L HLA-DRB1*08:02L
  REGION 1..10: note = CONT. FROM ABOVE: HLA-DQA1*02:01-B1*03:03L HLA-DRB1*15:03L
  source 1..10: note = Severe acute respiratory syndrome coronavirus 2
EQKSILSPLY

SEQ ID NO: 8319 - protein, 12 aa, Severe acute respiratory syndrome-related coronavirus
  REGION 1..12: note = Table B: HLA-DQA1*03:02-B1*03:03L HLA-DRB1*04:01L HLA-DRB1*13:02L HLA-DRB1*13:03L HLA-DRB1*01:03L HLA-DRB1*04:04L HLA-DRB1*04:05L HLA-DQA1*01:02-B1*06:02L HLA-DRB1*01:01L HLA-DRB1*01:02L HLA-DRB4*03:01NL HLA-DRB1*08:04L HLA-DRB1*08:77L
  REGION 1..12: note = CONT. FROM ABOVE: HLA-DRB3*02:01L HLA-DPA1*01:03-B1*03:01L HLA-D PA1*03:01-B1*04:02L HLA-DRB1*14:01L HLA-DRB1*11:03L HLA-DRB1*11: 04L HLA-DRB1*14:02L HLA-DQA1*01:01-B1*05:01L HLA-DRB1*08:01L HLA -DRB1*11:01L HLA-DRB5*01:01L HLA-DQA1*05:05-B1*03:19L
  REGION 1..12: note = CONT. FROM ABOVE: HLA-DQA1*05:01-B1*02:01L HLA-DPA1*01:03-B1*04: 01L HLA-DRB1*04:10M HLA-DRB1*09:01L HLA-DPA1*01:03-B1*04:02L HLA -DRB1*12:01L HLA-DRB1*12:02L HLA-DRB3*01:01L HLA-DPA1*02:01-B1*1 3:01L HLA-DPA1*03:01-B1*105:01L HLA-DRB1*14:54L
  REGION 1..12: note = CONT. FROM ABOVE: HLA-DPA1*01:03-B1*104:01L HLA-DQA1*05:05-B1*03 :01L HLA-DPA1*01:02-B1*04:01L HLA-DRB1*07:01L HLA-DRB1*10:01L HL A-DQA1*01:03-B1*06:01L HLA-DRB1*04:08L HLA-DRB1*08:03L HLA-DRB1* 15:01L HLA-DRB1*15:03L
  source 1..12: note = Severe acute respiratory syndrome coronavirus 2
SPLYAFASEAAR

SEQ ID NO: 8320 - protein, 10 aa, Severe acute respiratory syndrome-related coronavirus
  REGION 1..10: note = Table B: HLA-DQA1*03:02-B1*03:03L HLA-DQA1*05:05-B1*03:19L HLA-DPA1*02:01-B1*13:01L HLA-DQA1*03:01-B1*03:02L HLA-DQA1*02:01-B1*03:03L HLA-DRB1*15:03L
  source 1..10: note = Severe acute respiratory syndrome coronavirus 2
YAFASEAARV

SEQ ID NO: 8321 - protein, 10 aa, Severe acute respiratory syndrome-related coronavirus
  REGION 1..10: note = Table B: HLA-DQA1*03:02-B1*03:03L HLA-DQA1*05:01-B1*03:01L HLA-DRB1*04:03L HLA-DQA1*01:02-B1*06:02L HLA-DPA1*03:01-B1*04:02L HLA-DQA1*01-B1*05L HLA-DQA1*05:05-B1*03:19L HLA-DQA1*05:01-B1*02:01L
  REGION 1..10: note = CONT. FROM ABOVE: HLA-DRB1*12:01L HLA-DPA1*02:01-B1*13:01L HLA-D PA1*03:01-B1*105:01L HLA-DQA1*03:01-B1*03:02L HLA-DQA1*05:05-B1* 03:01L HLA-DPA1*01:02-B1*04:01L HLA-DRB1*16:01L HLA-DQA1*01:03-B 1*06:01L HLA-DQA1*02:01-B1*03:03L HLA-DRB1*15:03L
  source 1..10: note = Severe acute respiratory syndrome coronavirus 2
AFASEAARVV

SEQ ID NO: 8322 - protein, 10 aa, Severe acute respiratory syndrome-related coronavirus
  REGION 1..10: note = Table B: HLA-DQA1*03:02-B1*03:03L HLA-DQA1*05:01-B1*03:01L HLA-DRB1*04:01L HLA-DRB1*04:03L HLA-DRB1*13:02L HLA-DRB1*13:03M HLA-DRB1*01:03L HLA-DRB1*04:02L HLA-DRB1*04:04L HLA-DRB1*04:05L HLA-DQA1*01:02-B1*06:02L HLA-DRB1*01:01L HLA-DRB1*01:02L
  REGION 1..10: note = CONT. FROM ABOVE: HLA-DRB4*03:01NL HLA-DRB1*08:77L HLA-DRB3*02:0 1L HLA-DPA1*03:01-B1*04:02L HLA-DRB1*14:01L HLA-DRB1*11:03L HLA- DRB1*11:04L HLA-DRB1*14:02L HLA-DRB1*08:01L HLA-DRB1*11:01L HLA- DRB5*01:01L HLA-DQA1*01-B1*05L HLA-DQA1*05:05-B1*03:19L
  REGION 1..10: note = CONT. FROM ABOVE: HLA-DQA1*05:01-B1*02:01L HLA-DPA1*01:03-B1*04: 01L HLA-DPA1*01:03-B1*04:02L HLA-DRB1*12:01M HLA-DRB1*12:02L HLA -DRB3*01:01L HLA-DPA1*03:01-B1*105:01L HLA-DQA1*03:01-B1*03:02M HLA-DRB1*14:54L HLA-DQA1*05:05-B1*03:01L HLA-DRB1*14:17L
  REGION 1..10: note = CONT. FROM ABOVE: HLA-DPA1*01:02-B1*04:01L HLA-DRB1*07:01L HLA-D RB1*10:01L HLA-DRB1*16:01L HLA-DQA1*01:03-B1*06:01L HLA-DRB1*04: 08L HLA-DRB1*08:03L HLA-DQA1*02:01-B1*03:03M HLA-DRB1*15:03L
  source 1..10: note = Severe acute respiratory syndrome coronavirus 2
FASEAARVVR

SEQ ID NO: 8323 - protein, 10 aa, Severe acute respiratory syndrome-related coronavirus
  REGION 1..10: note = Table B: HLA-DQA1*03:02-B1*03:03M HLA-DQA1*05:01-B1*03:01L HLA-DRB1*08:77L HLA-DPA1*03:01-B1*04:02L HLA-DRB1*11:02M HLA-DQA1*05:05-B1*03:19H HLA-DQA1*05:01-B1*02:01L HLA-DRB4*01:01L HLA-DPA1*01:03-B1*04:01L
  REGION 1..10: note = CONT. FROM ABOVE: HLA-DQA1*05:05-B1*03:116L HLA-DRB1*09:01L HLA- DPA1*01:03-B1*04:02L HLA-DQA1*03:01-B1*03:02L HLA-DPA1*01:03-B1* 104:01M HLA-DRB1*10:01L HLA-DRB1*16:01L HLA-DQA1*01:03-B1*06:01L HLA-DQA1*02:01-B1*03:03L HLA-DRB1*15:03L
  source 1..10: note = Severe acute respiratory syndrome coronavirus 2
SEAARVVRSI

SEQ ID NO: 8324 - protein, 10 aa, Severe acute respiratory syndrome-related coronavirus
  REGION 1..10: note = Table B: HLA-DQA1*03:02-B1*03:03L HLA-DQA1*05:01-B1*03:01L HLA-DRB1*04:03L HLA-DRB1*13:03L HLA-DRB1*01:03L HLA-DQA1*01:02-B1*06:02L HLA-DRB1*01:02L HLA-DPA1*03:01-B1*04:02L HLA-DRB1*14:01L HLA-DRB1*14:02L
  REGION 1..10: note = CONT. FROM ABOVE: HLA-DQA1*05:05-B1*03:19L HLA-DQA1*05:01-B1*02: 01L HLA-DPA1*03:01-B1*105:01L HLA-DQA1*03:01-B1*03:02L HLA-DPA1* 01:02-B1*04:01L HLA-DRB1*16:01L HLA-DQA1*01:03-B1*06:01L HLA-DQA 1*02:01-B1*03:03L HLA-DRB1*15:03L
  source 1..10: note = Severe acute respiratory syndrome coronavirus 2
SIFSRTLETA

SEQ ID NO: 8325 - protein, 10 aa, Severe acute respiratory syndrome-related coronavirus
  REGION 1..10: note = Table B: HLA-DQA1*03:02-B1*03:03M HLA-DQA1*05:01-B1*03:01L HLA-DRB1*13:03L HLA-DRB1*01:03L HLA-DQA1*01:02-B1*06:02L HLA-DRB1*01:02L HLA-DPA1*03:01-B1*04:02L HLA-DRB1*14:01L HLA-DRB1*14:02L HLA-DRB1*08:01L HLA-DQA1*05:05-B1*03:19L
  REGION 1..10: note = CONT. FROM ABOVE: HLA-DQA1*05:01-B1*02:01L HLA-DPA1*01:03-B1*04: 01L HLA-DQA1*05:05-B1*03:116L HLA-DRB1*09:01L HLA-DPA1*01:03-B1* 04:02L HLA-DRB1*12:01L HLA-DPA1*02:01-B1*13:01L HLA-DPA1*03:01-B 1*105:01L HLA-DQA1*03:01-B1*03:02L HLA-DPA1*01:03-B1*104:01L
  REGION 1..10: note = CONT. FROM ABOVE: HLA-DPA1*01:02-B1*04:01L HLA-DRB1*10:01L HLA-D RB1*16:01L HLA-DQA1*01:03-B1*06:01L HLA-DRB1*08:03L HLA-DQA1*02: 01-B1*03:03L HLA-DRB1*15:03L
  source 1..10: note = Severe acute respiratory syndrome coronavirus 2
RTLETAQNSV

SEQ ID NO: 8326 - protein, 10 aa, Severe acute respiratory syndrome-related coronavirus
  REGION 1..10: note = Table B: HLA-DQA1*03:02-B1*03:03L HLA-DQA1*05:01-B1*03:01L HLA-DRB1*04:03L HLA-DRB1*13:02L HLA-DRB1*13:03L HLA-DRB1*01:03L HLA-DRB1*04:02L HLA-DRB1*04:04L HLA-DRB1*04:05L HLA-DRB1*01:01L HLA-DRB1*01:02L HLA-DRB4*03:01NL HLA-DRB1*11:04L
  REGION 1..10: note = CONT. FROM ABOVE: HLA-DQA1*01:01-B1*05:01L HLA-DRB1*08:01L HLA-D RB5*01:01L HLA-DQA1*01-B1*05L HLA-DQA1*05:01-B1*02:01L HLA-DRB1* 04:10L HLA-DRB1*12:01L HLA-DPA1*03:01-B1*105:01L HLA-DQA1*03:01- B1*03:02L HLA-DRB1*14:54L HLA-DQA1*05:05-B1*03:01L
  REGION 1..10: note = CONT. FROM ABOVE: HLA-DRB1*14:17L HLA-DRB1*16:01L HLA-DQA1*01:03 -B1*06:01L HLA-DQA1*02:01-B1*03:03L
  source 1..10: note = Severe acute respiratory syndrome coronavirus 2
TLETAQNSVR

SEQ ID NO: 8327 - protein, 10 aa, Severe acute respiratory syndrome-related coronavirus
  REGION 1..10: note = Table B: HLA-DQA1*03:02-B1*03:03L HLA-DQA1*05:01-B1*03:01L HLA-DRB1*11:02L HLA-DQA1*05:05-B1*03:19M HLA-DQA1*05:01-B1*02:01L HLA-DRB1*09:01L HLA-DQA1*03:01-B1*03:02L HLA-DPA1*01:03-B1*104:01L
  REGION 1..10: note = CONT. FROM ABOVE: HLA-DRB1*16:01L HLA-DQA1*01:03-B1*06:01L HLA-D QA1*02:01-B1*03:03L HLA-DRB1*15:03L
  source 1..10: note = Severe acute respiratory syndrome coronavirus 2
LETAQNSVRV

SEQ ID NO: 8328 - protein, 10 aa, Severe acute respiratory syndrome-related coronavirus
  REGION 1..10: note = Table B: HLA-DQA1*03:02-B1*03:03M HLA-DQA1*05:01-B1*03:01L HLA-DRB1*13:02L HLA-DRB1*13:03M HLA-DQA1*01:02-B1*06:02M HLA-DRB1*01:01L HLA-DRB1*01:02M HLA-DRB4*03:01NL HLA-DRB3*02:01L HLA-DPA1*01:03-B1*03:01L HLA-DPA1*03:01-B1*04:02L
  REGION 1..10: note = CONT. FROM ABOVE: HLA-DRB1*14:01L HLA-DRB1*11:04L HLA-DRB1*14:02 L HLA-DRB1*08:01L HLA-DRB5*01:01L HLA-DQA1*05:01-B1*02:01L HLA-D PA1*01:03-B1*04:01L HLA-DQA1*05:05-B1*03:116L HLA-DRB1*09:01L HL A-DRB1*12:01L HLA-DPA1*02:01-B1*13:01L HLA-DPA1*03:01-B1*105:01M
  REGION 1..10: note = CONT. FROM ABOVE: HLA-DQA1*03:01-B1*03:02L HLA-DQA1*05:05-B1*03: 01L HLA-DPA1*01:02-B1*04:01L HLA-DQA1*01:03-B1*06:01L HLA-DRB1*0 8:03L HLA-DQA1*02:01-B1*03:03L HLA-DRB1*15:01L HLA-DRB1*15:03M
  source 1..10: note = Severe acute respiratory syndrome coronavirus 2
ETAQNSVRVL

SEQ ID NO: 8329 - protein, 10 aa, Severe acute respiratory syndrome-related coronavirus
  REGION 1..10: note = Table B: HLA-DQA1*03:02-B1*03:03L HLA-DQA1*05:01-B1*03:01L HLA-DQA1*05:05-B1*03:19L HLA-DQA1*03:01-B1*03:02L HLA-DRB1*16:01L HLA-DQA1*01:03-B1*06:01L HLA-DQA1*02:01-B1*03:03L
  source 1..10: note = Severe acute respiratory syndrome coronavirus 2
RVLQKAAITI

SEQ ID NO: 8330 - protein, 12 aa, Severe acute respiratory syndrome-related coronavirus
  REGION 1..12: note = Table B: HLA-DQA1*03:02-B1*03:03L HLA-DQA1*05:01-B1*03:01L HLA-DRB1*04:03L HLA-DRB1*13:02L HLA-DRB1*13:03L HLA-DRB1*01:03L HLA-DRB1*04:02L HLA-DRB1*04:05L HLA-DQA1*01:02-B1*06:02L HLA-DRB1*01:02L HLA-DRB4*03:01NL HLA-DRB1*08:04L
  REGION 1..12: note = CONT. FROM ABOVE: HLA-DPA1*01:03-B1*03:01L HLA-DRB1*14:01L HLA-D QA1*01:01-B1*05:01L HLA-DQA1*05:05-B1*03:19L HLA-DQA1*05:01-B1*0 2:01L HLA-DRB1*04:10L HLA-DRB1*12:01L HLA-DRB1*12:02L HLA-DPA1*0 2:01-B1*13:01L HLA-DPA1*03:01-B1*105:01L
  REGION 1..12: note = CONT. FROM ABOVE: HLA-DQA1*03:01-B1*03:02L HLA-DRB1*14:54L HLA-D PA1*01:03-B1*104:01L HLA-DQA1*05:05-B1*03:01L HLA-DRB1*14:17L HL A-DRB1*07:01L HLA-DRB1*16:01L HLA-DQA1*01:03-B1*06:01L HLA-DRB1* 04:08L HLA-DQA1*02:01-B1*03:03L HLA-DRB1*15:03L
  source 1..12: note = Severe acute respiratory syndrome coronavirus 2
VLQKAAITILDG

SEQ ID NO: 8331 - protein, 12 aa, Severe acute respiratory syndrome-related coronavirus
  REGION 1..12: note = Table B: HLA-DQA1*03:02-B1*03:03L HLA-DQA1*05:01-B1*03:01L HLA-DRB1*13:02L HLA-DRB1*13:03L HLA-DRB1*01:03L HLA-DRB1*04:04L HLA-DQA1*01:02-B1*06:02L HLA-DRB1*01:02L HLA-DRB1*08:04L HLA-DPA1*01:03-B1*03:01L HLA-DRB1*14:01L HLA-DRB1*11:04L
  REGION 1..12: note = CONT. FROM ABOVE: HLA-DQA1*01-B1*05L HLA-DRB1*12:02L HLA-DQA1*05 :05-B1*03:01L HLA-DRB1*10:01L HLA-DRB1*04:08L HLA-DRB1*08:03L HL A-DRB1*15:03L
  source 1..12: note = Severe acute respiratory syndrome coronavirus 2
KAAITILDGISQ

SEQ ID NO: 8332 - protein, 10 aa, Severe acute respiratory syndrome-related coronavirus
  REGION 1..10: note = Table B: HLA-DQA1*03:02-B1*03:03L HLA-DQA1*05:01-B1*03:01L HLA-DRB1*04:03L HLA-DRB1*13:02L HLA-DRB1*13:03L HLA-DRB1*01:03L HLA-DQA1*01:02-B1*06:02M HLA-DRB4*03:01NL HLA-DRB1*08:77L HLA-DPA1*01:03-B1*03:01L HLA-DPA1*03:01-B1*04:02L
  REGION 1..10: note = CONT. FROM ABOVE: HLA-DRB1*03:01L HLA-DRB1*14:01L HLA-DRB1*11:02 L HLA-DRB1*14:02L HLA-DQA1*01-B1*05L HLA-DQA1*05:05-B1*03:19M HL A-DQA1*05:01-B1*02:01M HLA-DRB4*01:01L HLA-DPA1*01:03-B1*04:01L HLA-DQA1*05:05-B1*03:116L HLA-DPA1*01:03-B1*04:02L
  REGION 1..10: note = CONT. FROM ABOVE: HLA-DRB1*12:01L HLA-DPA1*02:01-B1*13:01L HLA-D PA1*03:01-B1*105:01L HLA-DPA1*01:03-B1*104:01L HLA-DQA1*05:05-B1 *03:01L HLA-DPA1*01:02-B1*04:01L HLA-DRB1*10:01L HLA-DRB1*16:01L HLA-DQA1*01:03-B1*06:01L HLA-DRB1*08:02L
  REGION 1..10: note = CONT. FROM ABOVE: HLA-DQA1*02:01-B1*03:03L HLA-DRB1*15:03L
  source 1..10: note = Severe acute respiratory syndrome coronavirus 2
ITILDGISQY

SEQ ID NO: 8333 - protein, 10 aa, Severe acute respiratory syndrome-related coronavirus
  REGION 1..10: note = Table B: HLA-DQA1*03:02-B1*03:03M HLA-DQA1*05:01-B1*03:01L HLA-DRB1*13:03L HLA-DQA1*01:02-B1*06:02L HLA-DPA1*03:01-B1*04:02L HLA-DRB1*14:01L HLA-DRB1*14:02L HLA-DRB1*08:01L HLA-DQA1*05:05-B1*03:19L
  REGION 1..10: note = CONT. FROM ABOVE: HLA-DQA1*05:01-B1*02:01L HLA-DRB4*01:01L HLA-D QA1*05:05-B1*03:116L HLA-DRB1*09:01L HLA-DPA1*01:03-B1*04:02L HL A-DPA1*02:01-B1*13:01L HLA-DPA1*03:01-B1*105:01L HLA-DQA1*03:01- B1*03:02L HLA-DPA1*01:03-B1*104:01L HLA-DPA1*01:02-B1*04:01L
  REGION 1..10: note = CONT. FROM ABOVE: HLA-DRB1*10:01L HLA-DRB1*16:01L HLA-DQA1*01:03 -B1*06:01L HLA-DRB1*08:03L HLA-DQA1*02:01-B1*03:03L HLA-DRB1*15: 03L
  source 1..10: note = Severe acute respiratory syndrome coronavirus 2
ILDGISQYSL

SEQ ID NO: 8334 - protein, 12 aa, Severe acute respiratory syndrome-related coronavirus
  REGION 1..12: note = Table B: HLA-DQA1*03:02-B1*03:03L HLA-DQA1*05:01-B1*03:01L HLA-DRB1*04:03L HLA-DRB1*04:02L HLA-DQA1*01:02-B1*06:02L HLA-DPA1*03:01-B1*04:02L HLA-DRB1*14:01L HLA-DQA1*05:01-B1*02:01L HLA-DRB1*12:01L
  REGION 1..12: note = CONT. FROM ABOVE: HLA-DPA1*03:01-B1*105:01L HLA-DQA1*03:01-B1*03 :02L HLA-DPA1*01:02-B1*04:01L HLA-DRB1*16:01L HLA-DQA1*01:03-B1* 06:01L HLA-DQA1*02:01-B1*03:03L HLA-DRB1*15:03L
  source 1..12: note = Severe acute respiratory syndrome coronavirus 2
DGISQYSLRLID

SEQ ID NO: 8335 - protein, 10 aa, Severe acute respiratory syndrome-related coronavirus
  REGION 1..10: note = Table B: HLA-DQA1*03:02-B1*03:03L HLA-DQA1*03:01-B1*03:02L HLA-DQA1*02:01-B1*03:03L
  source 1..10: note = Severe acute respiratory syndrome coronavirus 2
SQYSLRLIDA

SEQ ID NO: 8336 - protein, 11 aa, Severe acute respiratory syndrome-related coronavirus
  REGION 1..11: note = Table B: HLA-DQA1*03:02-B1*03:03L HLA-DQA1*05:01-B1*03:01L HLA-DRB1*04:03L HLA-DQA1*01:02-B1*06:02L HLA-DPA1*03:01-B1*04:02L HLA-DPA1*03:01-B1*105:01L HLA-DQA1*03:01-B1*03:02L HLA-DPA1*01:02-B1*04:01L
  REGION 1..11: note = CONT. FROM ABOVE: HLA-DRB1*16:01L HLA-DQA1*01:03-B1*06:01L HLA-D QA1*02:01-B1*03:03L HLA-DRB1*15:03L
  source 1..11: note = Severe acute respiratory syndrome coronavirus 2
RLIDAMMFTSD

SEQ ID NO: 8337 - protein, 13 aa, Severe acute respiratory syndrome-related coronavirus
  REGION 1..13: note = Table B: HLA-DQA1*03:02-B1*03:03L HLA-DRB1*04:03L HLA-DRB1*04:02L HLA-DRB1*04:05L HLA-DQA1*01:02-B1*06:02L HLA-DQA1*05:01-B1*02:01L HLA-DRB1*04:10L HLA-DRB1*12:01L HLA-DPA1*03:01-B1*105:01L HLA-DQA1*03:01-B1*03:02L
  REGION 1..13: note = CONT. FROM ABOVE: HLA-DQA1*05:05-B1*03:01L HLA-DRB1*14:17L HLA-D RB1*16:01L HLA-DQA1*01:03-B1*06:01L HLA-DQA1*02:01-B1*03:03L
  source 1..13: note = Severe acute respiratory syndrome coronavirus 2
IDAMMFTSDLATN

SEQ ID NO: 8338 - protein, 12 aa, Severe acute respiratory syndrome-related coronavirus
  REGION 1..12: note = Table B: HLA-DQA1*03:02-B1*03:03L HLA-DRB1*04:02L HLA-DRB1*04:05L HLA-DQA1*01:02-B1*06:02L HLA-DQA1*01-B1*05L HLA-DQA1*05:05-B1*03:01L HLA-DRB1*16:01L
  source 1..12: note = Severe acute respiratory syndrome coronavirus 2
AMMFTSDLATNN

SEQ ID NO: 8339 - protein, 10 aa, Severe acute respiratory syndrome-related coronavirus
  REGION 1..10: note = Table B: HLA-DQA1*03:02-B1*03:03M HLA-DQA1*05:01-B1*03:01L HLA-DRB1*04:03L HLA-DRB1*13:03L HLA-DRB1*01:03L HLA-DRB1*04:02L HLA-DRB1*04:05L HLA-DQA1*01:02-B1*06:02L HLA-DRB1*01:02L HLA-DRB4*03:01NL HLA-DRB1*08:77L HLA-DRB3*02:01L
  REGION 1..10: note = CONT. FROM ABOVE: HLA-DPA1*01:03-B1*03:01L HLA-DPA1*03:01-B1*04: 02L HLA-DRB1*14:01L HLA-DRB1*14:02L HLA-DRB1*08:01L HLA-DQA1*01- B1*05L HLA-DQA1*05:05-B1*03:19L HLA-DQA1*05:01-B1*02:01L HLA-DRB 4*01:01L HLA-DPA1*01:03-B1*04:01L HLA-DQA1*05:05-B1*03:116L
  REGION 1..10: note = CONT. FROM ABOVE: HLA-DRB1*09:01L HLA-DPA1*01:03-B1*04:02L HLA-D RB1*12:01L HLA-DPA1*02:01-B1*13:01L HLA-DPA1*03:01-B1*105:01L HL A-DQA1*03:01-B1*03:02M HLA-DPA1*01:03-B1*104:01L HLA-DQA1*05:05- B1*03:01L HLA-DPA1*01:02-B1*04:01L HLA-DRB1*07:01L
  REGION 1..10: note = CONT. FROM ABOVE: HLA-DRB1*10:01L HLA-DRB1*16:01L HLA-DQA1*01:03 -B1*06:01L HLA-DRB1*08:03L HLA-DQA1*02:01-B1*03:03L HLA-DRB1*15: 03L
  source 1..10: note = Severe acute respiratory syndrome coronavirus 2
FTSDLATNNL

SEQ ID NO: 8340 - protein, 10 aa, Severe acute respiratory syndrome-related coronavirus
  REGION 1..10: note = Table B: HLA-DQA1*03:02-B1*03:03L
  source 1..10: note = Severe acute respiratory syndrome coronavirus 2
TSDLATNNLV

SEQ ID NO: 8341 - protein, 10 aa, Severe acute respiratory syndrome-related coronavirus
  REGION 1..10: note = Table B: HLA-DQA1*03:02-B1*03:03L
  source 1..10: note = Severe acute respiratory syndrome coronavirus 2
SDLATNNLVV

SEQ ID NO: 8342 - protein, 10 aa, Severe acute respiratory syndrome-related coronavirus
  REGION 1..10: note = Table B: HLA-DQA1*03:02-B1*03:03L HLA-DQA1*05:01-B1*03:01L HLA-DRB1*13:03L HLA-DQA1*01:02-B1*06:02L HLA-DQA1*05:01-B1*02:01L HLA-DRB1*12:01L HLA-DPA1*03:01-B1*105:01L HLA-DQA1*03:01-B1*03:02L
  REGION 1..10: note = CONT. FROM ABOVE: HLA-DQA1*01:03-B1*06:01L HLA-DQA1*02:01-B1*03: 03L HLA-DRB1*15:03L
  source 1..10: note = Severe acute respiratory syndrome coronavirus 2
DLATNNLVVM

SEQ ID NO: 8343 - protein, 10 aa, Severe acute respiratory syndrome-related coronavirus
  REGION 1..10: note = Table B: HLA-DQA1*03:02-B1*03:03L HLA-DQA1*05:01-B1*03:01L HLA-DRB1*04:03L HLA-DRB1*13:02L HLA-DRB1*13:03M HLA-DRB1*01:03L HLA-DQA1*01:02-B1*06:02M HLA-DRB4*03:01NL HLA-DRB1*08:77M HLA-DPA1*01:03-B1*03:01M HLA-DPA1*03:01-B1*04:02L
  REGION 1..10: note = CONT. FROM ABOVE: HLA-DRB1*03:01M HLA-DRB1*14:01L HLA-DRB1*11:02 L HLA-DRB1*11:03L HLA-DRB1*14:02L HLA-DRB1*11:01L HLA-DRB5*01:01 L HLA-DQA1*01-B1*05M HLA-DQA1*05:05-B1*03:19M HLA-DQA1*05:01-B1* 02:01M HLA-DRB4*01:01M HLA-DPA1*01:03-B1*04:01M
  REGION 1..10: note = CONT. FROM ABOVE: HLA-DQA1*05:05-B1*03:116L HLA-DPA1*01:03-B1*04 :02L HLA-DRB1*12:01L HLA-DPA1*02:01-B1*13:01L HLA-DPA1*03:01-B1* 105:01L HLA-DPA1*01:03-B1*104:01M HLA-DQA1*05:05-B1*03:01L HLA-D PA1*01:02-B1*04:01L HLA-DRB1*10:01L HLA-DRB1*16:01M
  REGION 1..10: note = CONT. FROM ABOVE: HLA-DQA1*01:03-B1*06:01L HLA-DRB1*08:02L HLA-D QA1*02:01-B1*03:03L HLA-DRB1*15:03L
  source 1..10: note = Severe acute respiratory syndrome coronavirus 2
ATNNLVVMAY

SEQ ID NO: 8344 - protein, 10 aa, Severe acute respiratory syndrome-related coronavirus
  REGION 1..10: note = Table B: HLA-DQA1*03:02-B1*03:03L HLA-DQA1*05:01-B1*03:01L HLA-DRB1*04:03L HLA-DQA1*05:01-B1*02:01L HLA-DQA1*03:01-B1*03:02L HLA-DQA1*02:01-B1*03:03L
  source 1..10: note = Severe acute respiratory syndrome coronavirus 2
MAYITGGVVQ

SEQ ID NO: 8345 - protein, 10 aa, Severe acute respiratory syndrome-related coronavirus
  REGION 1..10: note = Table B: HLA-DQA1*03:02-B1*03:03M HLA-DQA1*05:01-B1*03:01M HLA-DRB1*04:01L HLA-DRB1*04:03L HLA-DRB1*13:02L HLA-DRB1*13:03L HLA-DRB1*01:03L HLA-DRB1*04:02L HLA-DRB1*04:05M HLA-DQA1*01:02-B1*06:02L HLA-DRB1*01:01L HLA-DRB1*01:02L
  REGION 1..10: note = CONT. FROM ABOVE: HLA-DRB1*08:77L HLA-DRB3*02:01L HLA-DPA1*03:01 -B1*04:02M HLA-DRB1*14:01L HLA-DRB1*11:02L HLA-DRB1*11:03L HLA-D RB1*14:02M HLA-DQA1*01:01-B1*05:01L HLA-DRB1*08:01L HLA-DRB1*11: 01L HLA-DQA1*01-B1*05L HLA-DQA1*05:05-B1*03:19L
  REGION 1..10: note = CONT. FROM ABOVE: HLA-DQA1*05:01-B1*02:01L HLA-DRB4*01:01L HLA-D PA1*01:03-B1*04:01L HLA-DQA1*05:05-B1*03:116M HLA-DRB1*09:01L HL A-DPA1*01:03-B1*04:02L HLA-DRB1*12:01L HLA-DPA1*02:01-B1*13:01M HLA-DPA1*03:01-B1*105:01L HLA-DQA1*03:01-B1*03:02M
  REGION 1..10: note = CONT. FROM ABOVE: HLA-DPA1*01:03-B1*104:01L HLA-DPA1*01:02-B1*04 :01L HLA-DRB1*07:01L HLA-DRB1*10:01L HLA-DRB1*16:01L HLA-DQA1*01 :03-B1*06:01M HLA-DRB1*08:03M HLA-DQA1*02:01-B1*03:03M HLA-DRB1* 15:03M
  source 1..10: note = Severe acute respiratory syndrome coronavirus 2
AYITGGVVQL

SEQ ID NO: 8346 - protein, 11 aa, Severe acute respiratory syndrome-related coronavirus
  REGION 1..11: note = Table B: HLA-DQA1*03:02-B1*03:03L HLA-DQA1*05:01-B1*03:01L HLA-DQA1*01:02-B1*06:02L HLA-DQA1*05:05-B1*03:19L HLA-DPA1*03:01-B1*105:01L HLA-DQA1*03:01-B1*03:02L HLA-DQA1*05:05-B1*03:01L HLA-DRB1*04:08L
  REGION 1..11: note = CONT. FROM ABOVE: HLA-DQA1*02:01-B1*03:03L
  source 1..11: note = Severe acute respiratory syndrome coronavirus 2
ITGGVVQLTSQ

SEQ ID NO: 8347 - protein, 14 aa, Severe acute respiratory syndrome-related coronavirus
  REGION 1..14: note = Table B: HLA-DQA1*03:02-B1*03:03L HLA-DPA1*01:03-B1*03:01L HLA-DPA1*02:01-B1*13:01L HLA-DQA1*03:01-B1*03:02L HLA-DPA1*01:03-B1*104:01L HLA-DPA1*01:02-B1*04:01L HLA-DRB1*04:08L
  source 1..14: note = Severe acute respiratory syndrome coronavirus 2
VVQLTSQWLTNIFG

SEQ ID NO: 8348 - protein, 14 aa, Severe acute respiratory syndrome-related coronavirus
  REGION 1..14: note = Table B: HLA-DQA1*03:02-B1*03:03L HLA-DRB1*13:02L HLA-DRB1*08:04L HLA-DRB1*08:01L HLA-DRB1*11:01L HLA-DQA1*02:01-B1*03:03L
  source 1..14: note = Severe acute respiratory syndrome coronavirus 2
TSQWLTNIFGTVYE

SEQ ID NO: 8349 - protein, 10 aa, Severe acute respiratory syndrome-related coronavirus
  REGION 1..10: note = Table B: HLA-DQA1*03:02-B1*03:03L HLA-DQA1*05:01-B1*03:01L HLA-DRB1*04:03L HLA-DRB1*13:02L HLA-DRB1*13:03L HLA-DRB1*01:03L HLA-DRB1*04:05L HLA-DQA1*01:02-B1*06:02L HLA-DRB1*01:02L HLA-DRB1*08:77L HLA-DRB3*02:01L HLA-DPA1*01:03-B1*03:01L
  REGION 1..10: note = CONT. FROM ABOVE: HLA-DPA1*03:01-B1*04:02M HLA-DRB1*14:01L HLA-D RB1*11:03L HLA-DRB1*11:04L HLA-DRB1*14:02L HLA-DRB1*08:01L HLA-D RB1*11:01L HLA-DQA1*01-B1*05L HLA-DQA1*05:05-B1*03:19L HLA-DQA1* 05:01-B1*02:01L HLA-DRB4*01:01L HLA-DPA1*01:03-B1*04:01L
  REGION 1..10: note = CONT. FROM ABOVE: HLA-DQA1*05:05-B1*03:116L HLA-DRB1*09:01L HLA- DPA1*01:03-B1*04:02L HLA-DRB1*12:01L HLA-DPA1*02:01-B1*13:01L HL A-DPA1*03:01-B1*105:01M HLA-DQA1*03:01-B1*03:02L HLA-DPA1*01:03- B1*104:01L HLA-DQA1*05:05-B1*03:01L HLA-DPA1*01:02-B1*04:01M
  REGION 1..10: note = CONT. FROM ABOVE: HLA-DRB1*07:01L HLA-DRB1*16:01L HLA-DQA1*01:03 -B1*06:01L HLA-DRB1*04:08L HLA-DRB1*08:03L HLA-DQA1*02:01-B1*03: 03L HLA-DRB1*15:03L
  source 1..10: note = Severe acute respiratory syndrome coronavirus 2
NIFGTVYEKL

SEQ ID NO: 8350 - protein, 10 aa, Severe acute respiratory syndrome-related coronavirus
  REGION 1..10: note = Table B: HLA-DQA1*03:02-B1*03:03L HLA-DQA1*05:01-B1*03:01L HLA-DRB1*13:02L HLA-DRB1*13:03L HLA-DRB1*01:03L HLA-DRB1*04:02L HLA-DQA1*01:02-B1*06:02L HLA-DRB1*01:02L HLA-DPA1*01:03-B1*03:01L HLA-DPA1*03:01-B1*04:02L
  REGION 1..10: note = CONT. FROM ABOVE: HLA-DRB1*14:01L HLA-DRB1*14:02L HLA-DRB1*08:01 L HLA-DQA1*01-B1*05L HLA-DQA1*05:05-B1*03:19L HLA-DQA1*05:01-B1* 02:01L HLA-DPA1*01:03-B1*04:01L HLA-DQA1*05:05-B1*03:116L HLA-DP A1*01:03-B1*04:02L HLA-DRB1*12:01L HLA-DPA1*02:01-B1*13:01L
  REGION 1..10: note = CONT. FROM ABOVE: HLA-DPA1*03:01-B1*105:01L HLA-DQA1*03:01-B1*03 :02L HLA-DQA1*05:05-B1*03:01L HLA-DPA1*01:02-B1*04:01L HLA-DRB1* 16:01L HLA-DQA1*01:03-B1*06:01L HLA-DQA1*02:01-B1*03:03L HLA-DRB 1*15:03L
  source 1..10: note = Severe acute respiratory syndrome coronavirus 2
TVYEKLKPVL

SEQ ID NO: 8351 - protein, 16 aa, Severe acute respiratory syndrome-related coronavirus
  REGION 1..16: note = Table B: HLA-DQA1*03:02-B1*03:03L HLA-DQA1*05:01-B1*03:01L HLA-DRB3*02:01L HLA-DPA1*01:03-B1*03:01L HLA-DRB1*11:02L HLA-DRB1*14:02L HLA-DQA1*05:05-B1*03:19L HLA-DPA1*01:03-B1*104:01L HLA-DQA1*05:05-B1*03:01L
  REGION 1..16: note = CONT. FROM ABOVE: HLA-DRB1*08:03L
  source 1..16: note = Severe acute respiratory syndrome coronavirus 2
KPVLDWLEEKFKEGVE

SEQ ID NO: 8352 - protein, 10 aa, Severe acute respiratory syndrome-related coronavirus
  REGION 1..10: note = Table B: HLA-DQA1*03:02-B1*03:03L HLA-DQA1*05:01-B1*03:01L HLA-DRB1*08:77L HLA-DPA1*01:03-B1*03:01L HLA-DPA1*03:01-B1*04:02L HLA-DRB1*03:01L HLA-DQA1*01-B1*05L HLA-DQA1*05:05-B1*03:19L HLA-DQA1*05:01-B1*02:01L
  REGION 1..10: note = CONT. FROM ABOVE: HLA-DRB4*01:01L HLA-DPA1*01:03-B1*04:01L HLA-D QA1*03:01-B1*03:02L HLA-DPA1*01:03-B1*104:01L HLA-DPA1*01:02-B1* 04:01L HLA-DRB1*10:01L HLA-DRB1*16:01L HLA-DRB1*15:03L
  source 1..10: note = Severe acute respiratory syndrome coronavirus 2
EEKFKEGVEF

SEQ ID NO: 8353 - protein, 15 aa, Severe acute respiratory syndrome-related coronavirus
  REGION 1..15: note = Table B: HLA-DQA1*03:02-B1*03:03L HLA-DQA1*05:01-B1*03:01L HLA-DRB1*13:03L HLA-DQA1*01:01-B1*05:01L HLA-DQA1*05:05-B1*03:19L HLA-DPA1*01:03-B1*04:01L HLA-DRB3*01:01L HLA-DQA1*05:05-B1*03:01L
  source 1..15: note = Severe acute respiratory syndrome coronavirus 2
EKFKEGVEFLRDGWE

SEQ ID NO: 8354 - protein, 10 aa, Severe acute respiratory syndrome-related coronavirus
  REGION 1..10: note = Table B: HLA-DQA1*03:02-B1*03:03M HLA-DRB1*11:02L HLA-DQA1*05:05-B1*03:19H HLA-DQA1*05:01-B1*02:01L HLA-DRB1*09:01L HLA-DQA1*03:01-B1*03:02L HLA-DPA1*01:03-B1*104:01M
  source 1..10: note = Severe acute respiratory syndrome coronavirus 2
VEFLRDGWEI

SEQ ID NO: 8355 - protein, 11 aa, Severe acute respiratory syndrome-related coronavirus
  REGION 1..11: note = Table B: HLA-DQA1*03:02-B1*03:03L HLA-DQA1*05:01-B1*03:01L HLA-DRB1*04:03L HLA-DRB1*13:02L HLA-DRB1*13:03L HLA-DRB1*04:02L HLA-DRB1*04:05L HLA-DQA1*01:02-B1*06:02L HLA-DRB1*01:02L HLA-DRB4*03:01NL HLA-DRB1*08:04L HLA-DPA1*01:03-B1*03:01L
  REGION 1..11: note = CONT. FROM ABOVE: HLA-DRB1*14:01L HLA-DRB1*11:04L HLA-DRB1*08:01 L HLA-DRB1*11:01L HLA-DQA1*05:05-B1*03:19L HLA-DQA1*05:01-B1*02: 01L HLA-DRB1*12:01L HLA-DPA1*02:01-B1*13:01L HLA-DQA1*03:01-B1*0 3:02L HLA-DRB1*14:54L HLA-DPA1*01:03-B1*02:01L
  REGION 1..11: note = CONT. FROM ABOVE: HLA-DPA1*01:03-B1*104:01L HLA-DQA1*05:05-B1*03 :01L HLA-DRB1*14:17L HLA-DQA1*02:01-B1*03:03L HLA-DRB1*15:03L
  source 1..11: note = Severe acute respiratory syndrome coronavirus 2
DGWEIVKFIST

SEQ ID NO: 8356 - protein, 16 aa, Severe acute respiratory syndrome-related coronavirus
  REGION 1..16: note = Table B: HLA-DQA1*03:02-B1*03:03L HLA-DRB1*04:03L HLA-DRB3*02:01L HLA-DRB1*11:02L HLA-DRB1*14:02L HLA-DQA1*05:01-B1*02:01L HLA-DPA1*01:03-B1*04:01L HLA-DRB1*10:01L
  source 1..16: note = Severe acute respiratory syndrome coronavirus 2
IVKFISTCACEIVGGQ

SEQ ID NO: 8357 - protein, 10 aa, Severe acute respiratory syndrome-related coronavirus
  REGION 1..10: note = Table B: HLA-DQA1*03:02-B1*03:03L HLA-DQA1*01:02-B1*06:02L HLA-DPA1*03:01-B1*105:01L HLA-DQA1*01:03-B1*06:01L HLA-DRB1*15:03L
  source 1..10: note = Severe acute respiratory syndrome coronavirus 2
EIVGGQIVTC

SEQ ID NO: 8358 - protein, 11 aa, Severe acute respiratory syndrome-related coronavirus
  REGION 1..11: note = Table B: HLA-DQA1*03:02-B1*03:03L HLA-DQA1*05:01-B1*03:01L HLA-DQA1*01:02-B1*06:02L HLA-DQA1*05:05-B1*03:19L HLA-DPA1*03:01-B1*105:01L HLA-DQA1*03:01-B1*03:02L HLA-DQA1*05:05-B1*03:01L HLA-DQA1*02:01-B1*03:03L
  source 1..11: note = Severe acute respiratory syndrome coronavirus 2
IVGGQIVTCAK

SEQ ID NO: 8359 - protein, 10 aa, Severe acute respiratory syndrome-related coronavirus
  REGION 1..10: note = Table B: HLA-DQA1*03:02-B1*03:03M HLA-DQA1*05:01-B1*03:01H HLA-DRB1*04:01L HLA-DRB1*13:02L HLA-DRB1*13:03L HLA-DRB1*01:03M HLA-DRB1*04:02L HLA-DRB1*04:05L HLA-DQA1*01:02-B1*06:02L HLA-DRB4*03:01NM HLA-DRB1*08:77H HLA-DPA1*01:03-B1*03:01L
  REGION 1..10: note = CONT. FROM ABOVE: HLA-DPA1*03:01-B1*04:02M HLA-DRB1*03:01M HLA-D RB1*14:01L HLA-DRB1*11:02L HLA-DRB1*14:02L HLA-DRB1*11:01L HLA-D QA1*01-B1*05M HLA-DQA1*05:05-B1*03:19M HLA-DQA1*05:01-B1*02:01M HLA-DRB4*01:01M HLA-DPA1*01:03-B1*04:01H
  REGION 1..10: note = CONT. FROM ABOVE: HLA-DQA1*05:05-B1*03:116M HLA-DRB1*09:01L HLA- DPA1*01:03-B1*04:02M HLA-DRB1*12:01L HLA-DPA1*02:01-B1*13:01L HL A-DPA1*03:01-B1*105:01L HLA-DQA1*03:01-B1*03:02M HLA-DPA1*01:03- B1*104:01L HLA-DPA1*01:02-B1*04:01M HLA-DRB1*10:01M
  REGION 1..10: note = CONT. FROM ABOVE: HLA-DRB1*16:01M HLA-DQA1*01:03-B1*06:01L HLA-D RB1*08:02L HLA-DQA1*02:01-B1*03:03M HLA-DRB1*15:03M
  source 1..10: note = Severe acute respiratory syndrome coronavirus 2
KEIKESVQTF

SEQ ID NO: 8360 - protein, 10 aa, Severe acute respiratory syndrome-related coronavirus
  REGION 1..10: note = Table B: HLA-DQA1*03:02-B1*03:03L HLA-DQA1*05:01-B1*03:01L HLA-DRB1*13:03L HLA-DRB1*01:03L HLA-DQA1*01:02-B1*06:02M HLA-DRB1*08:77L HLA-DPA1*01:03-B1*03:01L HLA-DPA1*03:01-B1*04:02L HLA-DRB1*03:01L HLA-DRB1*14:01L
  REGION 1..10: note = CONT. FROM ABOVE: HLA-DRB1*14:02L HLA-DQA1*05:05-B1*03:19L HLA-D QA1*05:01-B1*02:01L HLA-DPA1*01:03-B1*04:01L HLA-DRB1*12:01L HLA -DPA1*02:01-B1*13:01L HLA-DPA1*03:01-B1*105:01L HLA-DQA1*05:05-B 1*03:01L HLA-DPA1*01:02-B1*04:01L HLA-DQA1*01:03-B1*06:01L
  REGION 1..10: note = CONT. FROM ABOVE: HLA-DQA1*02:01-B1*03:03L HLA-DRB1*15:03L
  source 1..10: note = Severe acute respiratory syndrome coronavirus 2
EIKESVQTFF

SEQ ID NO: 8361 - protein, 10 aa, Severe acute respiratory syndrome-related coronavirus
  REGION 1..10: note = Table B: HLA-DQA1*03:02-B1*03:03L HLA-DQA1*05:05-B1*03:19M HLA-DQA1*03:01-B1*03:02L HLA-DPA1*01:03-B1*104:01L
  source 1..10: note = Severe acute respiratory syndrome coronavirus 2
KESVQTFFKL

SEQ ID NO: 8362 - protein, 10 aa, Severe acute respiratory syndrome-related coronavirus
  REGION 1..10: note = Table B: HLA-DQA1*03:02-B1*03:03L HLA-DQA1*05:01-B1*03:01L HLA-DRB1*01:03L HLA-DQA1*01:02-B1*06:02L HLA-DRB1*14:02L HLA-DQA1*05:05-B1*03:19L HLA-DQA1*05:01-B1*02:01L HLA-DPA1*01:03-B1*04:01L HLA-DPA1*02:01-B1*13:01L
  REGION 1..10: note = CONT. FROM ABOVE: HLA-DPA1*03:01-B1*105:01L HLA-DQA1*03:01-B1*03 :02L HLA-DPA1*01:02-B1*04:01L HLA-DRB1*16:01L HLA-DQA1*01:03-B1* 06:01L HLA-DQA1*02:01-B1*03:03L HLA-DRB1*15:03L
  source 1..10: note = Severe acute respiratory syndrome coronavirus 2
QTFFKLVNKF

SEQ ID NO: 8363 - protein, 10 aa, Severe acute respiratory syndrome-related coronavirus
  REGION 1..10: note = Table B: HLA-DQA1*03:02-B1*03:03L HLA-DRB1*04:03L HLA-DQA1*03:01-B1*03:02L HLA-DQA1*01:03-B1*06:01L HLA-DQA1*02:01-B1*03:03L
  source 1..10: note = Severe acute respiratory syndrome coronavirus 2
ADSIIIGGAK

SEQ ID NO: 8364 - protein, 10 aa, Severe acute respiratory syndrome-related coronavirus
  REGION 1..10: note = Table B: HLA-DQA1*03:02-B1*03:03L HLA-DQA1*05:01-B1*03:01L HLA-DRB1*13:03L HLA-DQA1*01:02-B1*06:02L HLA-DRB1*01:02L HLA-DPA1*03:01-B1*04:02L HLA-DRB1*14:01L HLA-DRB1*08:01L HLA-DQA1*05:05-B1*03:19L HLA-DQA1*05:01-B1*02:01L
  REGION 1..10: note = CONT. FROM ABOVE: HLA-DPA1*01:03-B1*04:01L HLA-DRB1*12:01L HLA-D PA1*03:01-B1*105:01L HLA-DQA1*03:01-B1*03:02L HLA-DPA1*01:02-B1* 04:01L HLA-DQA1*01:03-B1*06:01L HLA-DQA1*02:01-B1*03:03L HLA-DRB 1*15:03L
  source 1..10: note = Severe acute respiratory syndrome coronavirus 2
DSIIIGGAKL

SEQ ID NO: 8365 - protein, 11 aa, Severe acute respiratory syndrome-related coronavirus
  REGION 1..11: note = Table B: HLA-DQA1*03:02-B1*03:03L HLA-DQA1*01:02-B1*06:02L HLA-DPA1*03:01-B1*04:02L HLA-DQA1*05:05-B1*03:19L HLA-DQA1*05:01-B1*02:01L HLA-DPA1*03:01-B1*105:01L HLA-DQA1*05:05-B1*03:01L
  source 1..11: note = Severe acute respiratory syndrome coronavirus 2
IIIGGAKLKAL

SEQ ID NO: 8366 - protein, 11 aa, Severe acute respiratory syndrome-related coronavirus
  REGION 1..11: note = Table B: HLA-DQA1*03:02-B1*03:03L HLA-DRB1*04:03L HLA-DRB1*01:03L HLA-DRB1*04:02L HLA-DRB1*01:02L HLA-DQA1*05:05-B1*03:19L HLA-DPA1*01:03-B1*04:02L HLA-DRB1*12:01L HLA-DQA1*03:01-B1*03:02L HLA-DRB1*14:17L
  REGION 1..11: note = CONT. FROM ABOVE: HLA-DPA1*01:02-B1*04:01L HLA-DRB1*16:01L HLA-D RB1*04:08L HLA-DRB1*15:03L
  source 1..11: note = Severe acute respiratory syndrome coronavirus 2
IIGGAKLKALN

SEQ ID NO: 8367 - protein, 10 aa, Severe acute respiratory syndrome-related coronavirus
  REGION 1..10: note = Table B: HLA-DQA1*03:02-B1*03:03L HLA-DQA1*03:01-B1*03:02L HLA-DQA1*02:01-B1*03:03L
  source 1..10: note = Severe acute respiratory syndrome coronavirus 2
GETFVTHSKG

SEQ ID NO: 8368 - protein, 10 aa, Severe acute respiratory syndrome-related coronavirus
  REGION 1..10: note = Table B: HLA-DQA1*03:02-B1*03:03L HLA-DQA1*05:01-B1*03:01L HLA-DRB1*13:03L HLA-DQA1*01:02-B1*06:02L HLA-DRB1*01:02L HLA-DPA1*01:03-B1*03:01L HLA-DRB1*14:01L HLA-DQA1*05:01-B1*02:01L HLA-DPA1*01:03-B1*04:01L
  REGION 1..10: note = CONT. FROM ABOVE: HLA-DRB1*12:01L HLA-DPA1*03:01-B1*105:01L HLA- DQA1*03:01-B1*03:02L HLA-DQA1*05:05-B1*03:01L HLA-DPA1*01:02-B1* 04:01L HLA-DQA1*01:03-B1*06:01L HLA-DQA1*02:01-B1*03:03L HLA-DRB 1*15:03L
  source 1..10: note = Severe acute respiratory syndrome coronavirus 2
ETFVTHSKGL

SEQ ID NO: 8369 - protein, 10 aa, Severe acute respiratory syndrome-related coronavirus
  REGION 1..10: note = Table B: HLA-DQA1*03:02-B1*03:03L HLA-DQA1*05:05-B1*03:19L HLA-DRB1*09:01L HLA-DQA1*03:01-B1*03:02L
  source 1..10: note = Severe acute respiratory syndrome coronavirus 2
REETGLLMPL

SEQ ID NO: 8370 - protein, 10 aa, Severe acute respiratory syndrome-related coronavirus
  REGION 1..10: note = Table B: HLA-DQA1*03:02-B1*03:03L HLA-DQA1*05:01-B1*03:01L HLA-DRB1*04:03L HLA-DRB1*13:03L HLA-DRB1*01:03L HLA-DRB1*04:02L HLA-DQA1*01:02-B1*06:02M HLA-DRB1*01:02L HLA-DRB4*03:01NL HLA-DRB1*14:02L HLA-DQA1*01:01-B1*05:01L HLA-DRB1*08:01L
  REGION 1..10: note = CONT. FROM ABOVE: HLA-DQA1*05:05-B1*03:19L HLA-DRB4*02:01NL HLA- DQA1*05:01-B1*02:01L HLA-DPA1*01:03-B1*04:02L HLA-DRB1*12:01L HL A-DPA1*03:01-B1*105:01L HLA-DQA1*03:01-B1*03:02L HLA-DQA1*05:05- B1*03:01M HLA-DPA1*01:02-B1*04:01L HLA-DRB1*16:01L
  REGION 1..10: note = CONT. FROM ABOVE: HLA-DQA1*01:03-B1*06:01M HLA-DRB1*04:08L HLA-D QA1*02:01-B1*03:03M
  source 1..10: note = Severe acute respiratory syndrome coronavirus 2
EETGLLMPLK

SEQ ID NO: 8371 - protein, 12 aa, Severe acute respiratory syndrome-related coronavirus
  REGION 1..12: note = Table B: HLA-DQA1*03:02-B1*03:03L HLA-DRB1*14:04L HLA-DRB1*13:02L HLA-DRB1*08:04L HLA-DRB1*08:77L HLA-DRB3*02:01L HLA-DPA1*01:03-B1*03:01L HLA-DPA1*03:01-B1*04:02L HLA-DRB1*11:03L HLA-DRB1*11:04L HLA-DQA1*01:01-B1*05:01L
  REGION 1..12: note = CONT. FROM ABOVE: HLA-DQA1*01-B1*05L HLA-DQA1*05:05-B1*03:19L HL A-DQA1*05:01-B1*02:01L HLA-DRB1*09:01L HLA-DRB1*12:02L HLA-DPA1* 02:01-B1*13:01L HLA-DPA1*03:01-B1*105:01L HLA-DQA1*05:05-B1*03:0 1L HLA-DRB1*07:01L HLA-DRB1*10:01L HLA-DRB1*08:03L
  source 1..12: note = Severe acute respiratory syndrome coronavirus 2
TGLLMPLKAPKE

SEQ ID NO: 8372 - protein, 11 aa, Severe acute respiratory syndrome-related coronavirus
  REGION 1..11: note = Table B: HLA-DQA1*03:02-B1*03:03L
  source 1..11: note = Severe acute respiratory syndrome coronavirus 2
KEIIFLEGETL

SEQ ID NO: 8373 - protein, 10 aa, Severe acute respiratory syndrome-related coronavirus
  REGION 1..10: note = Table B: HLA-DQA1*03:02-B1*03:03L HLA-DRB1*11:02L HLA-DQA1*05:05-B1*03:19M HLA-DRB1*09:01L HLA-DQA1*03:01-B1*03:02L HLA-DPA1*01:03-B1*104:01L
  source 1..10: note = Severe acute respiratory syndrome coronavirus 2
LEGETLPTEV

SEQ ID NO: 8374 - protein, 10 aa, Severe acute respiratory syndrome-related coronavirus
  REGION 1..10: note = Table B: HLA-DQA1*03:02-B1*03:03L HLA-DQA1*03:01-B1*03:02L
  source 1..10: note = Severe acute respiratory syndrome coronavirus 2
EGETLPTEVL

SEQ ID NO: 8375 - protein, 13 aa, Severe acute respiratory syndrome-related coronavirus
  REGION 1..13: note = Table B: HLA-DQA1*03:02-B1*03:03L HLA-DQA1*01:03-B1*06:01L
  source 1..13: note = Severe acute respiratory syndrome coronavirus 2
ETLPTEVLTEEVV

SEQ ID NO: 8376 - protein, 10 aa, Severe acute respiratory syndrome-related coronavirus
  REGION 1..10: note = Table B: HLA-DQA1*03:02-B1*03:03M HLA-DQA1*05:05-B1*03:19L HLA-DRB1*09:01L HLA-DQA1*03:01-B1*03:02L
  source 1..10: note = Severe acute respiratory syndrome coronavirus 2
TEVLTEEVVL

SEQ ID NO: 8377 - protein, 10 aa, Severe acute respiratory syndrome-related coronavirus
  REGION 1..10: note = Table B: HLA-DQA1*03:02-B1*03:03L HLA-DQA1*03:01-B1*03:02L
  source 1..10: note = Severe acute respiratory syndrome coronavirus 2
TEEVVLKTGD

SEQ ID NO: 8378 - protein, 10 aa, Severe acute respiratory syndrome-related coronavirus
  REGION 1..10: note = Table B: HLA-DQA1*03:02-B1*03:03L HLA-DQA1*05:05-B1*03:19L HLA-DQA1*03:01-B1*03:02L
  source 1..10: note = Severe acute respiratory syndrome coronavirus 2
EEVVLKTGDL

SEQ ID NO: 8379 - protein, 11 aa, Severe acute respiratory syndrome-related coronavirus
  REGION 1..11: note = Table B: HLA-DQA1*03:02-B1*03:03L HLA-DQA1*05:01-B1*03:01L HLA-DQA1*05:05-B1*03:19L HLA-DQA1*05:01-B1*02:01L HLA-DQA1*03:01-B1*03:02L HLA-DQA1*05:05-B1*03:01L HLA-DRB1*16:01L
  source 1..11: note = Severe acute respiratory syndrome coronavirus 2
VLKTGDLQPLE

SEQ ID NO: 8380 - protein, 13 aa, Severe acute respiratory syndrome-related coronavirus
  REGION 1..13: note = Table B: HLA-DQA1*03:02-B1*03:03L
  source 1..13: note = Severe acute respiratory syndrome coronavirus 2
LKTGDLQPLEQPT

SEQ ID NO: 8381 - protein, 12 aa, Severe acute respiratory syndrome-related coronavirus
  REGION 1..12: note = Table B: HLA-DQA1*03:02-B1*03:03L HLA-DRB1*13:03L HLA-DRB1*14:01L HLA-DRB1*12:01L HLA-DRB1*12:02L HLA-DRB1*14:54L HLA-DQA1*02:01-B1*03:03L
  source 1..12: note = Severe acute respiratory syndrome coronavirus 2
TGDLQPLEQPTS

SEQ ID NO: 8382 - protein, 12 aa, Severe acute respiratory syndrome-related coronavirus
  REGION 1..12: note = Table B: HLA-DQA1*03:02-B1*03:03L HLA-DRB1*13:03L HLA-DRB1*01:03L HLA-DRB1*12:01L HLA-DRB1*12:02L HLA-DRB1*14:54L HLA-DQA1*05:05-B1*03:01L HLA-DRB1*10:01L HLA-DRB1*04:08L HLA-DQA1*02:01-B1*03:03L
  source 1..12: note = Severe acute respiratory syndrome coronavirus 2
GDLQPLEQPTSE

SEQ ID NO: 8383 - protein, 12 aa, Severe acute respiratory syndrome-related coronavirus
  REGION 1..12: note = Table B: HLA-DQA1*03:02-B1*03:03L HLA-DRB1*04:02L HLA-DQA1*05:01-B1*02:01L HLA-DRB1*04:10L HLA-DQA1*02:01-B1*03:03L
  source 1..12: note = Severe acute respiratory syndrome coronavirus 2
DLQPLEQPTSEA

SEQ ID NO: 8384 - protein, 12 aa, Severe acute respiratory syndrome-related coronavirus
  REGION 1..12: note = Table B: HLA-DQA1*03:02-B1*03:03L HLA-DQA1*05:01-B1*02:01L HLA-DQA1*03:01-B1*03:02L HLA-DQA1*02:01-B1*03:03L
  source 1..12: note = Severe acute respiratory syndrome coronavirus 2
QPLEQPTSEAVE

SEQ ID NO: 8385 - protein, 12 aa, Severe acute respiratory syndrome-related coronavirus
  REGION 1..12: note = Table B: HLA-DQA1*03:02-B1*03:03L HLA-DQA1*05:01-B1*02:01L HLA-DQA1*03:01-B1*03:02L
  source 1..12: note = Severe acute respiratory syndrome coronavirus 2
EQPTSEAVEAPL

SEQ ID NO: 8386 - protein, 12 aa, Severe acute respiratory syndrome-related coronavirus
  REGION 1..12: note = Table B: HLA-DQA1*03:02-B1*03:03L HLA-DQA1*05:01-B1*02:01L HLA-DQA1*03:01-B1*03:02L HLA-DQA1*01:03-B1*06:01L HLA-DQA1*02:01-B1*03:03L
  source 1..12: note = Severe acute respiratory syndrome coronavirus 2
PTSEAVEAPLVG

SEQ ID NO: 8387 - protein, 10 aa, Severe acute respiratory syndrome-related coronavirus
  REGION 1..10: note = Table B: HLA-DQA1*03:02-B1*03:03L HLA-DQA1*05:05-B1*03:19L HLA-DQA1*03:01-B1*03:02L HLA-DPA1*01:03-B1*104:01L
  source 1..10: note = Severe acute respiratory syndrome coronavirus 2
VEAPLVGTPV

SEQ ID NO: 8388 - protein, 12 aa, Severe acute respiratory syndrome-related coronavirus
  REGION 1..12: note = Table B: HLA-DQA1*03:02-B1*03:03L HLA-DQA1*05:01-B1*03:01L HLA-DRB1*04:03L HLA-DRB1*01:03L HLA-DRB1*04:02L HLA-DRB1*04:05L HLA-DQA1*01:02-B1*06:02L HLA-DRB1*01:02L HLA-DPA1*01:03-B1*03:01L HLA-DPA1*03:01-B1*04:02L
  REGION 1..12: note = CONT. FROM ABOVE: HLA-DQA1*01-B1*05L HLA-DQA1*05:05-B1*03:19L HL A-DQA1*05:01-B1*02:01L HLA-DPA1*01:03-B1*04:01L HLA-DPA1*01:03-B 1*04:02L HLA-DRB1*12:01L HLA-DPA1*02:01-B1*13:01L HLA-DPA1*03:01 -B1*105:01L HLA-DQA1*03:01-B1*03:02L HLA-DPA1*01:03-B1*104:01L
  REGION 1..12: note = CONT. FROM ABOVE: HLA-DQA1*05:05-B1*03:01L HLA-DRB1*14:17L HLA-D PA1*01:02-B1*04:01L HLA-DRB1*16:01L HLA-DQA1*01:03-B1*06:01L HLA -DRB1*04:08L HLA-DQA1*02:01-B1*03:03L HLA-DRB1*15:03L
  source 1..12: note = Severe acute respiratory syndrome coronavirus 2
APLVGTPVCING

SEQ ID NO: 8389 - protein, 13 aa, Severe acute respiratory syndrome-related coronavirus
  REGION 1..13: note = Table B: HLA-DQA1*03:02-B1*03:03L HLA-DRB1*04:03L HLA-DRB1*01:02L HLA-DPA1*01:03-B1*03:01L HLA-DQA1*01-B1*05L HLA-DQA1*05:01-B1*02:01L HLA-DPA1*01:03-B1*04:01L HLA-DRB1*12:01L HLA-DRB1*16:01L HLA-DRB1*15:03L
  source 1..13: note = Severe acute respiratory syndrome coronavirus 2
INGLMLLEIKDTE

SEQ ID NO: 8390 - protein, 10 aa, Severe acute respiratory syndrome-related coronavirus
  REGION 1..10: note = Table B: HLA-DQA1*03:02-B1*03:03L HLA-DQA1*05:01-B1*03:01L HLA-DRB1*04:03L HLA-DRB1*13:02L HLA-DRB1*13:03L HLA-DRB1*01:03L HLA-DQA1*01:02-B1*06:02L HLA-DRB1*08:77L HLA-DPA1*01:03-B1*03:01M HLA-DPA1*03:01-B1*04:02L
  REGION 1..10: note = CONT. FROM ABOVE: HLA-DRB1*03:01L HLA-DRB1*11:02L HLA-DRB1*14:02 L HLA-DQA1*01-B1*05L HLA-DQA1*05:05-B1*03:19M HLA-DQA1*05:01-B1* 02:01M HLA-DRB4*01:01L HLA-DPA1*01:03-B1*04:01L HLA-DQA1*05:05-B 1*03:116L HLA-DPA1*01:03-B1*04:02L HLA-DRB1*12:01L
  REGION 1..10: note = CONT. FROM ABOVE: HLA-DPA1*03:01-B1*105:01L HLA-DQA1*03:01-B1*03 :02L HLA-DPA1*01:03-B1*104:01M HLA-DPA1*01:02-B1*04:01L HLA-DRB1 *10:01L HLA-DRB1*16:01M HLA-DQA1*01:03-B1*06:01L HLA-DRB1*08:02L HLA-DQA1*02:01-B1*03:03L HLA-DRB1*15:03L
  source 1..10: note = Severe acute respiratory syndrome coronavirus 2
LLEIKDTEKY

SEQ ID NO: 8391 - protein, 15 aa, Severe acute respiratory syndrome-related coronavirus
  REGION 1..15: note = Table B: HLA-DQA1*03:02-B1*03:03L HLA-DRB1*04:03L HLA-DRB1*13:03L HLA-DRB1*04:02L HLA-DRB1*01:01L HLA-DRB3*02:01L HLA-DRB1*03:01L HLA-DRB1*11:02L HLA-DRB1*11:03L HLA-DRB1*14:02L HLA-DQA1*01:01-B1*05:01L HLA-DQA1*01-B1*05L
  REGION 1..15: note = CONT. FROM ABOVE: HLA-DQA1*05:05-B1*03:19L HLA-DRB1*08:02L HLA-D RB1*08:03L
  source 1..15: note = Severe acute respiratory syndrome coronavirus 2
LEIKDTEKYCALAPN

SEQ ID NO: 8392 - protein, 12 aa, Severe acute respiratory syndrome-related coronavirus
  REGION 1..12: note = Table B: HLA-DQA1*03:02-B1*03:03L HLA-DQA1*05:01-B1*03:01L HLA-DQA1*01:02-B1*06:02L HLA-DPA1*01:03-B1*03:01L HLA-DPA1*03:01-B1*04:02L HLA-DQA1*05:05-B1*03:19L HLA-DPA1*01:03-B1*04:02L HLA-DQA1*05:05-B1*03:01L
  REGION 1..12: note = CONT. FROM ABOVE: HLA-DQA1*02:01-B1*03:03L
  source 1..12: note = Severe acute respiratory syndrome coronavirus 2
DTEKYCALAPNM

SEQ ID NO: 8393 - protein, 12 aa, Severe acute respiratory syndrome-related coronavirus
  REGION 1..12: note = Table B: HLA-DQA1*03:02-B1*03:03L HLA-DQA1*05:01-B1*03:01L HLA-DRB1*01:02L HLA-DPA1*01:03-B1*03:01L HLA-DPA1*03:01-B1*04:02L HLA-DQA1*05:05-B1*03:19L HLA-DQA1*05:01-B1*02:01L HLA-DRB1*12:01L
  REGION 1..12: note = CONT. FROM ABOVE: HLA-DPA1*02:01-B1*13:01L HLA-DPA1*03:01-B1*105 :01L HLA-DQA1*03:01-B1*03:02L HLA-DPA1*01:03-B1*104:01L HLA-DQA1 *05:05-B1*03:01L HLA-DRB1*16:01L HLA-DQA1*02:01-B1*03:03L HLA-DR B1*15:03L
  source 1..12: note = Severe acute respiratory syndrome coronavirus 2
TEKYCALAPNMM

SEQ ID NO: 8394 - protein, 12 aa, Severe acute respiratory syndrome-related coronavirus
  REGION 1..12: note = Table B: HLA-DQA1*03:02-B1*03:03L HLA-DRB1*04:03L HLA-DRB1*01:03L HLA-DRB1*04:02L HLA-DRB1*04:05L HLA-DRB4*03:01NL HLA-DPA1*01:03-B1*03:01L HLA-DRB1*14:01L HLA-DQA1*01:01-B1*05:01L HLA-DQA1*01-B1*05L
  REGION 1..12: note = CONT. FROM ABOVE: HLA-DQA1*05:05-B1*03:19L HLA-DRB1*04:10L HLA-D RB1*12:01L HLA-DRB1*12:02L HLA-DQA1*03:01-B1*03:02L HLA-DRB1*14: 54L HLA-DQA1*05:05-B1*03:01L HLA-DRB1*14:17L HLA-DRB1*16:01L HLA -DRB1*04:08L
  source 1..12: note = Severe acute respiratory syndrome coronavirus 2
APNMMVTNNTFT

SEQ ID NO: 8395 - protein, 10 aa, Severe acute respiratory syndrome-related coronavirus
  REGION 1..10: note = Table B: HLA-DQA1*03:02-B1*03:03L HLA-DQA1*03:01-B1*03:02L HLA-DQA1*02:01-B1*03:03L HLA-DRB1*15:03L
  source 1..10: note = Severe acute respiratory syndrome coronavirus 2
MMVTNNTFTL

SEQ ID NO: 8396 - protein, 12 aa, Severe acute respiratory syndrome-related coronavirus
  REGION 1..12: note = Table B: HLA-DQA1*03:02-B1*03:03L HLA-DQA1*05:01-B1*03:01L HLA-DRB1*13:02L HLA-DQA1*01:02-B1*06:02L HLA-DRB1*01:02L HLA-DRB1*08:04L HLA-DRB1*08:77L HLA-DRB1*14:01L HLA-DRB1*11:03L HLA-DRB1*11:04L HLA-DRB1*14:02L HLA-DQA1*01:01-B1*05:01L
  REGION 1..12: note = CONT. FROM ABOVE: HLA-DRB1*11:01L HLA-DQA1*05:05-B1*03:19L HLA-D QA1*05:01-B1*02:01L HLA-DRB1*04:10L HLA-DRB1*12:01L HLA-DRB1*12: 02L HLA-DPA1*03:01-B1*105:01L HLA-DQA1*05:05-B1*03:01L HLA-DRB1* 10:01L HLA-DQA1*01:03-B1*06:01L HLA-DRB1*04:08L HLA-DRB1*08:03L
  source 1..12: note = Severe acute respiratory syndrome coronavirus 2
NNTFTLKGGAPT

SEQ ID NO: 8397 - protein, 10 aa, Severe acute respiratory syndrome-related coronavirus
  REGION 1..10: note = Table B: HLA-DQA1*03:02-B1*03:03L HLA-DQA1*03:01-B1*03:02L HLA-DRB1*16:01L HLA-DQA1*02:01-B1*03:03L
  source 1..10: note = Severe acute respiratory syndrome coronavirus 2
TLKGGAPTKV

SEQ ID NO: 8398 - protein, 12 aa, Severe acute respiratory syndrome-related coronavirus
  REGION 1..12: note = Table B: HLA-DQA1*03:02-B1*03:03L HLA-DQA1*05:01-B1*03:01L HLA-DQA1*01:02-B1*06:02L HLA-DQA1*05:05-B1*03:19L HLA-DQA1*05:05-B1*03:01L HLA-DQA1*01:03-B1*06:01L HLA-DQA1*02:01-B1*03:03L
  source 1..12: note = Severe acute respiratory syndrome coronavirus 2
GGAPTKVTFGDD

SEQ ID NO: 8399 - protein, 12 aa, Severe acute respiratory syndrome-related coronavirus
  REGION 1..12: note = Table B: HLA-DQA1*03:02-B1*03:03L
  source 1..12: note = Severe acute respiratory syndrome coronavirus 2
GAPTKVTFGDDT

SEQ ID NO: 8400 - protein, 14 aa, Severe acute respiratory syndrome-related coronavirus
  REGION 1..14: note = Table B: HLA-DQA1*03:02-B1*03:03L HLA-DQA1*05:01-B1*03:01L HLA-DRB1*04:03L HLA-DRB1*13:02L HLA-DRB1*13:03L HLA-DRB1*01:03L HLA-DRB1*04:02L HLA-DRB1*04:04L HLA-DRB1*04:05L HLA-DQA1*01:02-B1*06:02L HLA-DRB1*01:02L HLA-DRB4*03:01NL
  REGION 1..14: note = CONT. FROM ABOVE: HLA-DRB1*08:04L HLA-DRB3*02:01L HLA-DPA1*01:03 -B1*03:01L HLA-DPA1*03:01-B1*04:02L HLA-DRB1*14:01L HLA-DRB1*14: 02L HLA-DQA1*01:01-B1*05:01L HLA-DRB1*08:01L HLA-DQA1*05:05-B1*0 3:19L HLA-DPA1*01:03-B1*04:01L HLA-DRB1*04:10L
  REGION 1..14: note = CONT. FROM ABOVE: HLA-DPA1*01:03-B1*04:02L HLA-DRB1*12:01L HLA-D RB1*12:02L HLA-DRB3*01:01L HLA-DPA1*02:01-B1*13:01L HLA-DPA1*03: 01-B1*105:01L HLA-DRB1*14:54L HLA-DPA1*01:03-B1*104:01L HLA-DQA1 *05:05-B1*03:01L HLA-DRB1*14:17L HLA-DPA1*01:02-B1*04:01L
  REGION 1..14: note = CONT. FROM ABOVE: HLA-DRB1*07:01L HLA-DRB1*16:01L HLA-DQA1*01:03 -B1*06:01L HLA-DRB1*04:08L HLA-DRB1*08:03L HLA-DRB1*15:03L
  source 1..14: note = Severe acute respiratory syndrome coronavirus 2
APTKVTFGDDTVIE

SEQ ID NO: 8401 - protein, 11 aa, Severe acute respiratory syndrome-related coronavirus
  REGION 1..11: note = Table B: HLA-DQA1*03:02-B1*03:03L
  source 1..11: note = Severe acute respiratory syndrome coronavirus 2
VTFGDDTVIEV

SEQ ID NO: 8402 - protein, 11 aa, Severe acute respiratory syndrome-related coronavirus
  REGION 1..11: note = Table B: HLA-DQA1*03:02-B1*03:03L HLA-DRB1*04:03L HLA-DQA1*01:01-B1*05:01L
  source 1..11: note = Severe acute respiratory syndrome coronavirus 2
DDTVIEVQGYK

SEQ ID NO: 8403 - protein, 11 aa, Severe acute respiratory syndrome-related coronavirus
  REGION 1..11: note = Table B: HLA-DQA1*03:02-B1*03:03L HLA-DQA1*05:01-B1*02:01L
  source 1..11: note = Severe acute respiratory syndrome coronavirus 2
DTVIEVQGYKS

SEQ ID NO: 8404 - protein, 11 aa, Severe acute respiratory syndrome-related coronavirus
  REGION 1..11: note = Table B: HLA-DQA1*03:02-B1*03:03L HLA-DQA1*05:05-B1*03:19L HLA-DPA1*01:03-B1*104:01L HLA-DRB1*15:03L
  source 1..11: note = Severe acute respiratory syndrome coronavirus 2
TVIEVQGYKSV

SEQ ID NO: 8405 - protein, 10 aa, Severe acute respiratory syndrome-related coronavirus
  REGION 1..10: note = Table B: HLA-DQA1*03:02-B1*03:03L HLA-DRB1*04:03L HLA-DQA1*01-B1*05L HLA-DQA1*03:01-B1*03:02L HLA-DPA1*01:02-B1*04:01L HLA-DQA1*02:01-B1*03:03L
  source 1..10: note = Severe acute respiratory syndrome coronavirus 2
IEVQGYKSVN

SEQ ID NO: 8406 - protein, 10 aa, Severe acute respiratory syndrome-related coronavirus
  REGION 1..10: note = Table B: HLA-DQA1*03:02-B1*03:03L HLA-DQA1*01:02-B1*06:02L HLA-DRB1*01:02L HLA-DQA1*05:05-B1*03:19L HLA-DPA1*03:01-B1*105:01L HLA-DPA1*01:03-B1*104:01L HLA-DRB1*15:03L
  source 1..10: note = Severe acute respiratory syndrome coronavirus 2
EVQGYKSVNI

SEQ ID NO: 8407 - protein, 12 aa, Severe acute respiratory syndrome-related coronavirus
  REGION 1..12: note = Table B: HLA-DQA1*03:02-B1*03:03L HLA-DQA1*05:01-B1*03:01L HLA-DRB1*13:02L HLA-DRB1*01:02L HLA-DRB3*02:01L HLA-DPA1*01:03-B1*03:01L HLA-DPA1*03:01-B1*04:02L HLA-DRB1*14:01L HLA-DRB1*08:01L HLA-DQA1*05:05-B1*03:19L
  REGION 1..12: note = CONT. FROM ABOVE: HLA-DQA1*05:01-B1*02:01L HLA-DRB1*12:01L HLA-D QA1*05:05-B1*03:01L HLA-DRB1*14:17L HLA-DRB1*04:08L HLA-DRB1*15: 01L
  source 1..12: note = Severe acute respiratory syndrome coronavirus 2
VQGYKSVNITFE

SEQ ID NO: 8408 - protein, 10 aa, Severe acute respiratory syndrome-related coronavirus
  REGION 1..10: note = Table B: HLA-DQA1*03:02-B1*03:03L HLA-DRB1*04:03L HLA-DPA1*03:01-B1*04:02L HLA-DQA1*01-B1*05L HLA-DQA1*05:01-B1*02:01L HLA-DPA1*03:01-B1*105:01L HLA-DQA1*03:01-B1*03:02L HLA-DPA1*01:02-B1*04:01L
  REGION 1..10: note = CONT. FROM ABOVE: HLA-DRB1*16:01L HLA-DQA1*01:03-B1*06:01L HLA-D QA1*02:01-B1*03:03L HLA-DRB1*15:03L
  source 1..10: note = Severe acute respiratory syndrome coronavirus 2
ITFELDERID

SEQ ID NO: 8409 - protein, 10 aa, Severe acute respiratory syndrome-related coronavirus
  REGION 1..10: note = Table B: HLA-DQA1*03:02-B1*03:03M HLA-DQA1*05:01-B1*03:01L HLA-DRB1*13:02L HLA-DRB1*13:03L HLA-DQA1*01:02-B1*06:02L HLA-DRB1*01:02L HLA-DRB1*08:77L HLA-DPA1*03:01-B1*04:02L HLA-DRB1*03:01L HLA-DRB1*14:01L HLA-DRB1*11:02M HLA-DRB1*14:02L
  REGION 1..10: note = CONT. FROM ABOVE: HLA-DRB1*11:01L HLA-DQA1*05:05-B1*03:19H HLA-D QA1*05:01-B1*02:01L HLA-DRB4*01:01L HLA-DPA1*01:03-B1*04:01L HLA -DQA1*05:05-B1*03:116L HLA-DRB1*09:01L HLA-DPA1*01:03-B1*04:02L HLA-DPA1*02:01-B1*13:01L HLA-DPA1*03:01-B1*105:01L
  REGION 1..10: note = CONT. FROM ABOVE: HLA-DQA1*03:01-B1*03:02M HLA-DPA1*01:03-B1*104 :01M HLA-DPA1*01:02-B1*04:01L HLA-DRB1*10:01L HLA-DRB1*16:01L HL A-DQA1*01:03-B1*06:01L HLA-DRB1*08:03L HLA-DQA1*02:01-B1*03:03L HLA-DRB1*15:03L
  source 1..10: note = Severe acute respiratory syndrome coronavirus 2
FELDERIDKV

SEQ ID NO: 8410 - protein, 12 aa, Severe acute respiratory syndrome-related coronavirus
  REGION 1..12: note = Table B: HLA-DQA1*03:02-B1*03:03L HLA-DQA1*05:01-B1*03:01L HLA-DRB1*04:03L HLA-DQA1*01:02-B1*06:02L HLA-DRB1*01:02L HLA-DQA1*01-B1*05L HLA-DQA1*05:05-B1*03:19L HLA-DRB1*12:01L HLA-DQA1*03:01-B1*03:02L HLA-DQA1*05:05-B1*03:01L
  REGION 1..12: note = CONT. FROM ABOVE: HLA-DRB1*16:01L HLA-DQA1*01:03-B1*06:01L HLA-D RB1*15:03L
  source 1..12: note = Severe acute respiratory syndrome coronavirus 2
SAYTVELGTEVN

SEQ ID NO: 8411 - protein, 10 aa, Severe acute respiratory syndrome-related coronavirus
  REGION 1..10: note = Table B: HLA-DQA1*03:02-B1*03:03L HLA-DQA1*05:01-B1*03:01M HLA-DRB1*13:03L HLA-DRB1*01:03L HLA-DQA1*01:02-B1*06:02L HLA-DRB4*03:01NL HLA-DRB1*08:77M HLA-DPA1*01:03-B1*03:01L HLA-DPA1*03:01-B1*04:02M HLA-DRB1*03:01L HLA-DRB1*14:01L
  REGION 1..10: note = CONT. FROM ABOVE: HLA-DRB1*11:02L HLA-DRB1*14:02L HLA-DQA1*01-B1 *05L HLA-DQA1*05:05-B1*03:19L HLA-DQA1*05:01-B1*02:01L HLA-DRB4* 01:01M HLA-DPA1*01:03-B1*04:01M HLA-DQA1*05:05-B1*03:116L HLA-DR B1*09:01L HLA-DPA1*01:03-B1*04:02L HLA-DRB1*12:01L
  REGION 1..10: note = CONT. FROM ABOVE: HLA-DPA1*02:01-B1*13:01L HLA-DQA1*03:01-B1*03: 02L HLA-DPA1*01:03-B1*104:01L HLA-DPA1*01:02-B1*04:01L HLA-DRB1* 10:01L HLA-DRB1*16:01L HLA-DQA1*02:01-B1*03:03L HLA-DRB1*15:03M
  source 1..10: note = Severe acute respiratory syndrome coronavirus 2
VELGTEVNEF

SEQ ID NO: 8412 - protein, 10 aa, Severe acute respiratory syndrome-related coronavirus
  REGION 1..10: note = Table B: HLA-DQA1*03:02-B1*03:03L HLA-DQA1*05:05-B1*03:19M HLA-DPA1*01:03-B1*104:01L
  source 1..10: note = Severe acute respiratory syndrome coronavirus 2
TEVNEFACVV

SEQ ID NO: 8413 - protein, 12 aa, Severe acute respiratory syndrome-related coronavirus
  REGION 1..12: note = Table B: HLA-DQA1*03:02-B1*03:03L HLA-DQA1*05:01-B1*03:01L HLA-DRB1*01:03L HLA-DRB1*04:05L HLA-DRB1*01:02L HLA-DPA1*01:03-B1*03:01L HLA-DQA1*05:05-B1*03:19L HLA-DQA1*05:01-B1*02:01L HLA-DRB1*12:01L
  REGION 1..12: note = CONT. FROM ABOVE: HLA-DPA1*03:01-B1*105:01L HLA-DQA1*03:01-B1*03 :02L HLA-DQA1*05:05-B1*03:01L HLA-DRB1*16:01L HLA-DRB1*04:08L HL A-DRB1*15:03L
  source 1..12: note = Severe acute respiratory syndrome coronavirus 2
EFACVVADAVIK

SEQ ID NO: 8414 - protein, 10 aa, Severe acute respiratory syndrome-related coronavirus
  REGION 1..10: note = Table B: HLA-DQA1*03:02-B1*03:03M HLA-DQA1*05:01-B1*03:01M HLA-DRB1*04:01L HLA-DRB1*04:03L HLA-DRB1*13:02L HLA-DRB1*13:03L HLA-DRB1*01:03L HLA-DRB1*04:02L HLA-DRB1*04:04L HLA-DRB1*04:05L HLA-DQA1*01:02-B1*06:02M HLA-DRB1*01:01L HLA-DRB1*01:02L
  REGION 1..10: note = CONT. FROM ABOVE: HLA-DRB4*03:01NL HLA-DRB1*08:77L HLA-DRB3*02:0 1L HLA-DPA1*01:03-B1*03:01L HLA-DPA1*03:01-B1*04:02M HLA-DRB1*03 :01L HLA-DRB1*14:01L HLA-DRB1*11:02L HLA-DRB1*11:04L HLA-DRB1*14 :02M HLA-DRB1*08:01L HLA-DRB1*11:01L HLA-DRB5*01:01L
  REGION 1..10: note = CONT. FROM ABOVE: HLA-DQA1*01-B1*05L HLA-DQA1*05:05-B1*03:19L HL A-DQA1*05:01-B1*02:01M HLA-DRB4*01:01L HLA-DPA1*01:03-B1*04:01L HLA-DQA1*05:05-B1*03:116M HLA-DRB1*09:01L HLA-DPA1*01:03-B1*04:0 2M HLA-DRB1*12:01L HLA-DPA1*02:01-B1*13:01L
  REGION 1..10: note = CONT. FROM ABOVE: HLA-DPA1*03:01-B1*105:01M HLA-DQA1*03:01-B1*03 :02M HLA-DPA1*01:03-B1*104:01L HLA-DQA1*05:05-B1*03:01L HLA-DPA1 *01:02-B1*04:01L HLA-DRB1*07:01L HLA-DRB1*10:01L HLA-DRB1*16:01L HLA-DQA1*01:03-B1*06:01L HLA-DRB1*08:02L HLA-DRB1*08:03L
  REGION 1..10: note = CONT. FROM ABOVE: HLA-DQA1*02:01-B1*03:03M HLA-DRB1*15:03M
  source 1..10: note = Severe acute respiratory syndrome coronavirus 2
VVADAVIKTL

SEQ ID NO: 8415 - protein, 11 aa, Severe acute respiratory syndrome-related coronavirus
  REGION 1..11: note = Table B: HLA-DQA1*03:02-B1*03:03L HLA-DRB1*04:05L HLA-DQA1*01:02-B1*06:02L HLA-DRB4*03:01NL HLA-DQA1*05:01-B1*02:01L HLA-DRB1*04:10L HLA-DRB1*14:54L
  source 1..11: note = Severe acute respiratory syndrome coronavirus 2
DAVIKTLQPVS

SEQ ID NO: 8416 - protein, 10 aa, Severe acute respiratory syndrome-related coronavirus
  REGION 1..10: note = Table B: HLA-DQA1*03:02-B1*03:03L HLA-DQA1*05:01-B1*03:01L HLA-DRB1*04:03L HLA-DRB1*13:02L HLA-DRB1*13:03L HLA-DRB1*01:03L HLA-DRB1*04:02L HLA-DRB1*04:04L HLA-DRB1*04:05L HLA-DQA1*01:02-B1*06:02L HLA-DRB1*01:02L HLA-DRB4*03:01NL
  REGION 1..10: note = CONT. FROM ABOVE: HLA-DRB1*14:01L HLA-DQA1*01-B1*05L HLA-DQA1*05 :01-B1*02:01L HLA-DRB1*04:10L HLA-DRB1*12:01L HLA-DRB1*12:02L HL A-DPA1*03:01-B1*105:01L HLA-DQA1*03:01-B1*03:02L HLA-DRB1*14:54L HLA-DQA1*05:05-B1*03:01L HLA-DRB1*14:17L
  REGION 1..10: note = CONT. FROM ABOVE: HLA-DPA1*01:02-B1*04:01L HLA-DRB1*16:01L HLA-D QA1*01:03-B1*06:01L HLA-DRB1*04:08L HLA-DQA1*02:01-B1*03:03L HLA -DRB1*15:03L
  source 1..10: note = Severe acute respiratory syndrome coronavirus 2
VIKTLQPVSE

SEQ ID NO: 8417 - protein, 10 aa, Severe acute respiratory syndrome-related coronavirus
  REGION 1..10: note = Table B: HLA-DQA1*03:02-B1*03:03L HLA-DQA1*01-B1*05L HLA-DQA1*03:01-B1*03:02L
  source 1..10: note = Severe acute respiratory syndrome coronavirus 2
IKTLQPVSEL

SEQ ID NO: 8418 - protein, 10 aa, Severe acute respiratory syndrome-related coronavirus
  REGION 1..10: note = Table B: HLA-DQA1*03:02-B1*03:03L HLA-DQA1*03:01-B1*03:02L
  source 1..10: note = Severe acute respiratory syndrome coronavirus 2
KTLQPVSELL

SEQ ID NO: 8419 - protein, 12 aa, Severe acute respiratory syndrome-related coronavirus
  REGION 1..12: note = Table B: HLA-DQA1*03:02-B1*03:03L HLA-DRB1*04:02L HLA-DRB1*04:05L HLA-DQA1*01:02-B1*06:02L HLA-DRB4*03:01NL HLA-DRB1*04:10L HLA-DRB1*12:01L HLA-DPA1*03:01-B1*105:01L HLA-DRB1*14:54L HLA-DRB1*14:17L HLA-DRB1*16:01L HLA-DRB1*15:03L
  source 1..12: note = Severe acute respiratory syndrome coronavirus 2
LQPVSELLTPLG

SEQ ID NO: 8420 - protein, 10 aa, Severe acute respiratory syndrome-related coronavirus
  REGION 1..10: note = Table B: HLA-DQA1*03:02-B1*03:03L HLA-DPA1*03:01-B1*105:01L
  source 1..10: note = Severe acute respiratory syndrome coronavirus 2
ELLTPLGIDL

SEQ ID NO: 8421 - protein, 10 aa, Severe acute respiratory syndrome-related coronavirus
  REGION 1..10: note = Table B: HLA-DQA1*03:02-B1*03:03L HLA-DQA1*05:05-B1*03:19L HLA-DQA1*03:01-B1*03:02L
  source 1..10: note = Severe acute respiratory syndrome coronavirus 2
DEWSMATYYL

SEQ ID NO: 8422 - protein, 12 aa, Severe acute respiratory syndrome-related coronavirus
  REGION 1..12: note = Table B: HLA-DQA1*03:02-B1*03:03L HLA-DRB1*04:03L HLA-DPA1*03:01-B1*04:02L HLA-DRB1*14:02L HLA-DQA1*01-B1*05L HLA-DQA1*05:01-B1*02:01L HLA-DRB1*12:01L HLA-DPA1*03:01-B1*105:01L HLA-DQA1*03:01-B1*03:02L
  REGION 1..12: note = CONT. FROM ABOVE: HLA-DRB1*16:01L
  source 1..12: note = Severe acute respiratory syndrome coronavirus 2
ATYYLFDESGEF

SEQ ID NO: 8423 - protein, 10 aa, Severe acute respiratory syndrome-related coronavirus
  REGION 1..10: note = Table B: HLA-DQA1*03:02-B1*03:03L HLA-DQA1*05:01-B1*03:01L HLA-DRB1*04:01L HLA-DRB1*04:03L HLA-DRB1*13:02L HLA-DRB1*13:03L HLA-DRB1*01:03L HLA-DRB1*04:02L HLA-DRB1*04:04L HLA-DRB1*04:05L HLA-DQA1*01:02-B1*06:02L HLA-DRB1*01:01L HLA-DRB1*01:02L
  REGION 1..10: note = CONT. FROM ABOVE: HLA-DRB4*03:01NL HLA-DRB1*08:04L HLA-DRB1*08:7 7L HLA-DRB3*02:01L HLA-DPA1*01:03-B1*03:01L HLA-DPA1*03:01-B1*04 :02L HLA-DRB1*03:01L HLA-DRB1*14:01L HLA-DRB1*11:03L HLA-DRB1*11 :04L HLA-DRB1*14:02M HLA-DQA1*01:01-B1*05:01L HLA-DRB1*08:01L
  REGION 1..10: note = CONT. FROM ABOVE: HLA-DRB1*11:01L HLA-DRB5*01:01L HLA-DQA1*01-B1 *05L HLA-DQA1*05:05-B1*03:19L HLA-DQA1*05:01-B1*02:01L HLA-DRB1* 13:01L HLA-DRB4*01:01L HLA-DPA1*01:03-B1*04:01L HLA-DRB1*04:10L HLA-DRB1*09:01L HLA-DPA1*01:03-B1*04:02L HLA-DRB1*12:01L
  REGION 1..10: note = CONT. FROM ABOVE: HLA-DRB1*12:02L HLA-DRB3*01:01L HLA-DPA1*02:01 -B1*13:01L HLA-DPA1*03:01-B1*105:01L HLA-DQA1*03:01-B1*03:02L HL A-DRB1*14:54L HLA-DPA1*01:03-B1*104:01L HLA-DQA1*05:05-B1*03:01L HLA-DRB1*14:17L HLA-DPA1*01:02-B1*04:01L HLA-DRB1*07:01L
  REGION 1..10: note = CONT. FROM ABOVE: HLA-DRB1*10:01L HLA-DRB1*16:01L HLA-DQA1*01:03 -B1*06:01L HLA-DRB1*04:08L HLA-DRB1*08:02L HLA-DRB1*08:03L HLA -DQA1*02:01-B1*03:03L HLA-DRB1*15:03L
  source 1..10: note = Severe acute respiratory syndrome coronavirus 2
YLFDESGEFK

SEQ ID NO: 8424 - protein, 10 aa, Severe acute respiratory syndrome-related coronavirus
  REGION 1..10: note = Table B: HLA-DQA1*03:02-B1*03:03M HLA-DQA1*05:01-B1*03:01L HLA-DQA1*01:02-B1*06:02L HLA-DRB1*01:02L HLA-DPA1*03:01-B1*04:02L HLA-DRB1*14:01L HLA-DRB1*11:02L HLA-DRB1*14:02L HLA-DRB1*08:01L HLA-DQA1*01-B1*05L
  REGION 1..10: note = CONT. FROM ABOVE: HLA-DQA1*05:05-B1*03:19L HLA-DQA1*05:01-B1*02: 01L HLA-DRB4*01:01L HLA-DPA1*01:03-B1*04:01L HLA-DQA1*05:05-B1*0 3:116L HLA-DRB1*09:01L HLA-DPA1*01:03-B1*04:02L HLA-DRB1*12:01L HLA-DPA1*02:01-B1*13:01L HLA-DPA1*03:01-B1*105:01L
  REGION 1..10: note = CONT. FROM ABOVE: HLA-DQA1*03:01-B1*03:02M HLA-DPA1*01:03-B1*104 :01L HLA-DPA1*01:02-B1*04:01L HLA-DRB1*10:01L HLA-DRB1*16:01L HL A-DQA1*01:03-B1*06:01L HLA-DRB1*08:03L HLA-DQA1*02:01-B1*03:03L HLA-DRB1*15:03L
  source 1..10: note = Severe acute respiratory syndrome coronavirus 2
LFDESGEFKL

SEQ ID NO: 8425 - protein, 11 aa, Severe acute respiratory syndrome-related coronavirus
  REGION 1..11: note = Table B: HLA-DQA1*03:02-B1*03:03L HLA-DQA1*05:01-B1*03:01L HLA-DRB1*04:03L HLA-DRB1*01:03L HLA-DQA1*01:02-B1*06:02L HLA-DQA1*01:01-B1*05:01L HLA-DQA1*05:05-B1*03:19L HLA-DPA1*03:01-B1*105:01L HLA-DQA1*05:05-B1*03:01L
  REGION 1..11: note = CONT. FROM ABOVE: HLA-DRB1*16:01L
  source 1..11: note = Severe acute respiratory syndrome coronavirus 2
DESGEFKLASH

SEQ ID NO: 8426 - protein, 10 aa, Severe acute respiratory syndrome-related coronavirus
  REGION 1..10: note = Table B: HLA-DQA1*03:02-B1*03:03M HLA-DQA1*05:01-B1*03:01H HLA-DRB1*04:01L HLA-DRB1*13:02L HLA-DRB1*13:03L HLA-DRB1*01:03M HLA-DRB1*04:02L HLA-DRB1*04:05L HLA-DQA1*01:02-B1*06:02L HLA-DRB1*01:01L HLA-DRB4*03:01NM HLA-DRB1*08:77H
  REGION 1..10: note = CONT. FROM ABOVE: HLA-DPA1*01:03-B1*03:01M HLA-DPA1*03:01-B1*04: 02H HLA-DRB1*03:01M HLA-DRB1*14:01L HLA-DRB1*11:02L HLA-DRB1*11: 03L HLA-DRB1*11:04L HLA-DRB1*14:02L HLA-DRB1*11:01L HLA-DRB5*01: 01L HLA-DQA1*01-B1*05M HLA-DQA1*05:05-B1*03:19M
  REGION 1..10: note = CONT. FROM ABOVE: HLA-DQA1*05:01-B1*02:01M HLA-DRB4*01:01H HLA-D PA1*01:03-B1*04:01H HLA-DQA1*05:05-B1*03:116M HLA-DRB1*09:01L HL A-DPA1*01:03-B1*04:02M HLA-DRB1*12:01M HLA-DPA1*02:01-B1*13:01L HLA-DPA1*03:01-B1*105:01L HLA-DQA1*03:01-B1*03:02M
  REGION 1..10: note = CONT. FROM ABOVE: HLA-DRB1*14:54L HLA-DPA1*01:03-B1*104:01M HLA- DPA1*01:02-B1*04:01M HLA-DRB1*10:01M HLA-DRB1*16:01M HLA-DQA1*01 :03-B1*06:01L HLA-DRB1*08:02L HLA-DQA1*02:01-B1*03:03L HLA-DRB1* 15:03M
  source 1..10: note = Severe acute respiratory syndrome coronavirus 2
GEFKLASHMY

SEQ ID NO: 8427 - protein, 16 aa, Severe acute respiratory syndrome-related coronavirus
  REGION 1..16: note = Table B: HLA-DQA1*03:02-B1*03:03L
  source 1..16: note = Severe acute respiratory syndrome coronavirus 2
YPPDEDEEEGDCEEEE

SEQ ID NO: 8428 - protein, 14 aa, Severe acute respiratory syndrome-related coronavirus
  REGION 1..14: note = Table B: HLA-DQA1*03:02-B1*03:03L HLA-DQA1*01:02-B1*06:02L HLA-DQA1*01-B1*05L HLA-DQA1*03:01-B1*03:02L HLA-DQA1*01:03-B1*06:01L HLA-DQA1*02:01-B1*03:03L
  source 1..14: note = Severe acute respiratory syndrome coronavirus 2
EEEGDCEEEEFEPS

SEQ ID NO: 8429 - protein, 10 aa, Severe acute respiratory syndrome-related coronavirus
  REGION 1..10: note = Table B: HLA-DQA1*03:02-B1*03:03L HLA-DQA1*05:01-B1*03:01M HLA-DRB1*13:03L HLA-DQA1*01:02-B1*06:02L HLA-DRB4*03:01NL HLA-DRB1*08:77M HLA-DPA1*01:03-B1*03:01M HLA-DPA1*03:01-B1*04:02L HLA-DRB1*03:01M HLA-DRB1*11:02L
  REGION 1..10: note = CONT. FROM ABOVE: HLA-DQA1*01-B1*05L HLA-DQA1*05:05-B1*03:19M HL A-DQA1*05:01-B1*02:01M HLA-DRB4*01:01M HLA-DPA1*01:03-B1*04:01M HLA-DQA1*05:05-B1*03:116L HLA-DPA1*01:03-B1*04:02L HLA-DRB1*12:0 1L HLA-DQA1*03:01-B1*03:02L HLA-DPA1*01:03-B1*104:01M
  REGION 1..10: note = CONT. FROM ABOVE: HLA-DPA1*01:02-B1*04:01L HLA-DRB1*10:01M HLA-D RB1*16:01M HLA-DRB1*15:03L
  source 1..10: note = Severe acute respiratory syndrome coronavirus 2
EEEFEPSTQY

SEQ ID NO: 8430 - protein, 11 aa, Severe acute respiratory syndrome-related coronavirus
  REGION 1..11: note = Table B: HLA-DQA1*03:02-B1*03:03L HLA-DRB1*13:02L HLA-DRB4*03:01NL HLA-DRB1*14:01L HLA-DRB1*12:01L HLA-DQA1*03:01-B1*03:02L HLA-DQA1*05:05-B1*03:01L HLA-DPA1*01:02-B1*04:01L HLA-DQA1*01:03-B1*06:01L
  REGION 1..11: note = CONT. FROM ABOVE: HLA-DRB1*08:02L
  source 1..11: note = Severe acute respiratory syndrome coronavirus 2
EEFEPSTQYEY

SEQ ID NO: 8431 - protein, 13 aa, Severe acute respiratory syndrome-related coronavirus
  REGION 1..13: note = Table B: HLA-DQA1*03:02-B1*03:03L HLA-DRB1*04:03L HLA-DRB1*12:01L HLA-DQA1*01:03-B1*06:01L
  source 1..13: note = Severe acute respiratory syndrome coronavirus 2
EFEPSTQYEYGTE

SEQ ID NO: 8432 - protein, 13 aa, Severe acute respiratory syndrome-related coronavirus
  REGION 1..13: note = Table B: HLA-DQA1*03:02-B1*03:03L HLA-DQA1*01-B1*05L HLA-DQA1*05:01-B1*02:01L HLA-DQA1*01:03-B1*06:01L HLA-DQA1*02:01-B1*03:03L
  source 1..13: note = Severe acute respiratory syndrome coronavirus 2
EPSTQYEYGTEDD

SEQ ID NO: 8433 - protein, 10 aa, Severe acute respiratory syndrome-related coronavirus
  REGION 1..10: note = Table B: HLA-DQA1*03:02-B1*03:03L HLA-DRB1*04:03L HLA-DRB1*04:02L HLA-DQA1*01-B1*05L HLA-DQA1*05:01-B1*02:01L HLA-DQA1*03:01-B1*03:02L HLA-DRB1*14:17L HLA-DRB1*16:01L HLA-DQA1*02:01-B1*03:03L
  source 1..10: note = Severe acute respiratory syndrome coronavirus 2
GTEDDYQGKP

SEQ ID NO: 8434 - protein, 10 aa, Severe acute respiratory syndrome-related coronavirus
  REGION 1..10: note = Table B: HLA-DQA1*03:02-B1*03:03M HLA-DRB1*13:03L HLA-DRB1*08:77L HLA-DQA1*01-B1*05L HLA-DQA1*05:05-B1*03:19L HLA-DQA1*05:05-B1*03:116L HLA-DRB1*09:01L HLA-DPA1*01:03-B1*04:02L HLA-DQA1*03:01-B1*03:02L
  REGION 1..10: note = CONT. FROM ABOVE: HLA-DPA1*01:03-B1*104:01L HLA-DPA1*01:02-B1*04 :01L HLA-DRB1*16:01L
  source 1..10: note = Severe acute respiratory syndrome coronavirus 2
TEDDYQGKPL

SEQ ID NO: 8435 - protein, 10 aa, Severe acute respiratory syndrome-related coronavirus
  REGION 1..10: note = Table B: HLA-DQA1*03:02-B1*03:03L HLA-DQA1*05:01-B1*03:01L HLA-DRB1*04:03L HLA-DRB1*04:02L HLA-DQA1*01-B1*05L HLA-DQA1*05:05-B1*03:19L HLA-DQA1*05:01-B1*02:01L HLA-DQA1*03:01-B1*03:02L HLA-DRB1*16:01L
  REGION 1..10: note = CONT. FROM ABOVE: HLA-DQA1*01:03-B1*06:01L HLA-DQA1*02:01-B1*03: 03L
  source 1..10: note = Severe acute respiratory syndrome coronavirus 2
EDDYQGKPLE

SEQ ID NO: 8436 - protein, 10 aa, Severe acute respiratory syndrome-related coronavirus
  REGION 1..10: note = Table B: HLA-DQA1*03:02-B1*03:03L HLA-DQA1*05:01-B1*03:01L HLA-DRB1*13:03L HLA-DRB1*01:03L HLA-DRB1*04:05L HLA-DQA1*01:02-B1*06:02M HLA-DRB1*01:01L HLA-DRB1*08:77L HLA-DPA1*03:01-B1*04:02L HLA-DRB1*03:01L HLA-DRB1*14:01L
  REGION 1..10: note = CONT. FROM ABOVE: HLA-DRB1*14:02L HLA-DQA1*01-B1*05L HLA-DQA1*05 :05-B1*03:19L HLA-DQA1*05:01-B1*02:01L HLA-DRB4*01:01L HLA-DPA1* 01:03-B1*04:01L HLA-DQA1*05:05-B1*03:116L HLA-DPA1*01:03-B1*04:0 2L HLA-DPA1*02:01-B1*13:01L HLA-DPA1*03:01-B1*105:01L
  REGION 1..10: note = CONT. FROM ABOVE: HLA-DPA1*01:02-B1*04:01L HLA-DRB1*10:01L HLA-D RB1*16:01L HLA-DQA1*01:03-B1*06:01L HLA-DQA1*02:01-B1*03:03L HLA -DRB1*15:03L
  source 1..10: note = Severe acute respiratory syndrome coronavirus 2
DDYQGKPLEF

SEQ ID NO: 8437 - protein, 10 aa, Severe acute respiratory syndrome-related coronavirus
  REGION 1..10: note = Table B: HLA-DQA1*03:02-B1*03:03M HLA-DQA1*05:05-B1*03:19L HLA-DRB1*09:01L HLA-DQA1*03:01-B1*03:02L
  source 1..10: note = Severe acute respiratory syndrome coronavirus 2
LEFGATSAAL

SEQ ID NO: 8438 - protein, 12 aa, Severe acute respiratory syndrome-related coronavirus
  REGION 1..12: note = Table B: HLA-DQA1*03:02-B1*03:03L HLA-DQA1*05:05-B1*03:19L HLA-DQA1*03:01-B1*03:02L HLA-DQA1*05:05-B1*03:01L HLA-DQA1*02:01-B1*03:03L
  source 1..12: note = Severe acute respiratory syndrome coronavirus 2
EFGATSAALQPE

SEQ ID NO: 8439 - protein, 12 aa, Severe acute respiratory syndrome-related coronavirus
  REGION 1..12: note = Table B: HLA-DQA1*03:02-B1*03:03L HLA-DQA1*05:01-B1*03:01L HLA-DQA1*01:02-B1*06:02L HLA-DQA1*05:05-B1*03:19L HLA-DQA1*05:01-B1*02:01L HLA-DQA1*05:05-B1*03:01L
  source 1..12: note = Severe acute respiratory syndrome coronavirus 2
FGATSAALQPEE

SEQ ID NO: 8440 - protein, 10 aa, Severe acute respiratory syndrome-related coronavirus
  REGION 1..10: note = Table B: HLA-DQA1*03:02-B1*03:03L HLA-DQA1*01:02-B1*06:02L HLA-DQA1*05:01-B1*02:01L HLA-DQA1*03:01-B1*03:02L HLA-DQA1*01:03-B1*06:01L HLA-DQA1*02:01-B1*03:03L
  source 1..10: note = Severe acute respiratory syndrome coronavirus 2
TSAALQPEEE

SEQ ID NO: 8441 - protein, 10 aa, Severe acute respiratory syndrome-related coronavirus
  REGION 1..10: note = Table B: HLA-DQA1*03:02-B1*03:03L HLA-DQA1*05:01-B1*02:01L HLA-DQA1*03:01-B1*03:02L HLA-DQA1*01:03-B1*06:01L HLA-DQA1*02:01-B1*03:03L
  source 1..10: note = Severe acute respiratory syndrome coronavirus 2
SAALQPEEEQ

SEQ ID NO: 8442 - protein, 12 aa, Severe acute respiratory syndrome-related coronavirus
  REGION 1..12: note = Table B: HLA-DQA1*03:02-B1*03:03L HLA-DRB1*04:05L HLA-DQA1*01:01-B1*05:01L HLA-DRB1*04:10L HLA-DRB1*16:01L
  source 1..12: note = Severe acute respiratory syndrome coronavirus 2
AALQPEEEQEED

SEQ ID NO: 8443 - protein, 12 aa, Severe acute respiratory syndrome-related coronavirus
  REGION 1..12: note = Table B: HLA-DQA1*03:02-B1*03:03L HLA-DQA1*01-B1*05L HLA-DQA1*01:03-B1*06:01L
  source 1..12: note = Severe acute respiratory syndrome coronavirus 2
ALQPEEEQEEDW

SEQ ID NO: 8444 - protein, 11 aa, Severe acute respiratory syndrome-related coronavirus
  REGION 1..11: note = Table B: HLA-DQA1*03:02-B1*03:03L HLA-DQA1*01-B1*05L HLA-DQA1*05:01-B1*02:01L HLA-DQA1*03:01-B1*03:02L
  source 1..11: note = Severe acute respiratory syndrome coronavirus 2
QPEEEQEEDWL

SEQ ID NO: 8445 - protein, 14 aa, Severe acute respiratory syndrome-related coronavirus
  REGION 1..14: note = Table B: HLA-DQA1*03:02-B1*03:03L HLA-DRB1*04:05L HLA-DPA1*02:01-B1*13:01L
  source 1..14: note = Severe acute respiratory syndrome coronavirus 2
EEQEEDWLDDDSQQ

SEQ ID NO: 8446 - protein, 10 aa, Severe acute respiratory syndrome-related coronavirus
  REGION 1..10: note = Table B: HLA-DQA1*03:02-B1*03:03M HLA-DQA1*05:01-B1*03:01L HLA-DRB1*04:04L HLA-DPA1*03:01-B1*04:02L HLA-DRB1*14:01L HLA-DRB1*11:02L HLA-DRB1*14:02L HLA-DQA1*05:05-B1*03:19M HLA-DQA1*05:05-B1*03:116L HLA-DRB1*09:01L
  REGION 1..10: note = CONT. FROM ABOVE: HLA-DQA1*03:01-B1*03:02L HLA-DPA1*01:03-B1*104 :01L HLA-DPA1*01:02-B1*04:01L HLA-DRB1*10:01L HLA-DRB1*16:01L HL A-DRB1*08:03L HLA-DQA1*02:01-B1*03:03L HLA-DRB1*15:03L
  source 1..10: note = Severe acute respiratory syndrome coronavirus 2
WLDDDSQQTV

SEQ ID NO: 8447 - protein, 12 aa, Severe acute respiratory syndrome-related coronavirus
  REGION 1..12: note = Table B: HLA-DQA1*03:02-B1*03:03L HLA-DQA1*03:01-B1*03:02L
  source 1..12: note = Severe acute respiratory syndrome coronavirus 2
DDDSQQTVGQQD

SEQ ID NO: 8448 - protein, 12 aa, Severe acute respiratory syndrome-related coronavirus
  REGION 1..12: note = Table B: HLA-DQA1*03:02-B1*03:03L HLA-DQA1*05:01-B1*03:01L HLA-DRB1*04:03L HLA-DQA1*01:01-B1*05:01L HLA-DQA1*05:01-B1*02:01L HLA-DQA1*05:05-B1*03:01L HLA-DQA1*01:03-B1*06:01L
  source 1..12: note = Severe acute respiratory syndrome coronavirus 2
DDSQQTVGQQDG

SEQ ID NO: 8449 - protein, 13 aa, Severe acute respiratory syndrome-related coronavirus
  REGION 1..13: note = Table B: HLA-DQA1*03:02-B1*03:03L HLA-DQA1*05:01-B1*02:01L HLA-DQA1*01:03-B1*06:01L
  source 1..13: note = Severe acute respiratory syndrome coronavirus 2
DSQQTVGQQDGSE

SEQ ID NO: 8450 - protein, 14 aa, Severe acute respiratory syndrome-related coronavirus
  REGION 1..14: note = Table B: HLA-DQA1*03:02-B1*03:03L HLA-DQA1*05:01-B1*03:01L HLA-DRB1*04:03L HLA-DRB1*04:02L HLA-DRB1*04:05L HLA-DQA1*01:02-B1*06:02L HLA-DQA1*01:01-B1*05:01L HLA-DQA1*05:05-B1*03:19L HLA-DQA1*05:01-B1*02:01L
  REGION 1..14: note = CONT. FROM ABOVE: HLA-DRB1*04:10L HLA-DQA1*05:05-B1*03:01L HLA-D RB1*14:17L HLA-DRB1*16:01L
  source 1..14: note = Severe acute respiratory syndrome coronavirus 2
SQQTVGQQDGSEDN

SEQ ID NO: 8451 - protein, 14 aa, Severe acute respiratory syndrome-related coronavirus
  REGION 1..14: note = Table B: HLA-DQA1*03:02-B1*03:03L HLA-DQA1*05:01-B1*02:01L HLA-DQA1*03:01-B1*03:02L
  source 1..14: note = Severe acute respiratory syndrome coronavirus 2
VGQQDGSEDNQTTT

SEQ ID NO: 8452 - protein, 15 aa, Severe acute respiratory syndrome-related coronavirus
  REGION 1..15: note = Table B: HLA-DQA1*03:02-B1*03:03L HLA-DQA1*03:01-B1*03:02L
  source 1..15: note = Severe acute respiratory syndrome coronavirus 2
GQQDGSEDNQTTTIQ

SEQ ID NO: 8453 - protein, 13 aa, Severe acute respiratory syndrome-related coronavirus
  REGION 1..13: note = Table B: HLA-DQA1*03:02-B1*03:03L HLA-DQA1*05:01-B1*03:01L HLA-DQA1*05:01-B1*02:01L HLA-DPA1*03:01-B1*105:01L HLA-DQA1*03:01-B1*03:02L
  source 1..13: note = Severe acute respiratory syndrome coronavirus 2
SEDNQTTTIQTIV

SEQ ID NO: 8454 - protein, 11 aa, Severe acute respiratory syndrome-related coronavirus
  REGION 1..11: note = Table B: HLA-DQA1*03:02-B1*03:03L HLA-DQA1*05:01-B1*03:01L HLA-DQA1*05:05-B1*03:19L HLA-DQA1*05:01-B1*02:01L HLA-DPA1*03:01-B1*105:01L HLA-DQA1*05:05-B1*03:01L
  source 1..11: note = Severe acute respiratory syndrome coronavirus 2
NQTTTIQTIVE

SEQ ID NO: 8455 - protein, 10 aa, Severe acute respiratory syndrome-related coronavirus
  REGION 1..10: note = Table B: HLA-DQA1*03:02-B1*03:03L
  source 1..10: note = Severe acute respiratory syndrome coronavirus 2
TTTIQTIVEV

SEQ ID NO: 8456 - protein, 10 aa, Severe acute respiratory syndrome-related coronavirus
  REGION 1..10: note = Table B: HLA-DQA1*03:02-B1*03:03L HLA-DQA1*03:01-B1*03:02L HLA-DQA1*02:01-B1*03:03L
  source 1..10: note = Severe acute respiratory syndrome coronavirus 2
QTIVEVQPQL

SEQ ID NO: 8457 - protein, 10 aa, Severe acute respiratory syndrome-related coronavirus
  REGION 1..10: note = Table B: HLA-DQA1*03:02-B1*03:03L HLA-DRB1*04:03L HLA-DQA1*01:02-B1*06:02L HLA-DQA1*05:01-B1*02:01L HLA-DQA1*03:01-B1*03:02L HLA-DRB1*14:17L HLA-DQA1*01:03-B1*06:01L HLA-DQA1*02:01-B1*03:03L
  source 1..10: note = Severe acute respiratory syndrome coronavirus 2
TIVEVQPQLE

SEQ ID NO: 8458 - protein, 10 aa, Severe acute respiratory syndrome-related coronavirus
  REGION 1..10: note = Table B: HLA-DQA1*03:02-B1*03:03L HLA-DQA1*05:01-B1*03:01L HLA-DRB1*04:03L HLA-DRB1*04:02L HLA-DQA1*01-B1*05L HLA-DQA1*05:05-B1*03:19L HLA-DQA1*05:01-B1*02:01L HLA-DRB1*12:01L HLA-DQA1*03:01-B1*03:02L HLA-DRB1*14:17L
  REGION 1..10: note = CONT. FROM ABOVE: HLA-DRB1*16:01L HLA-DQA1*01:03-B1*06:01L HLA-D QA1*02:01-B1*03:03L
  source 1..10: note = Severe acute respiratory syndrome coronavirus 2
IVEVQPQLEM

SEQ ID NO: 8459 - protein, 10 aa, Severe acute respiratory syndrome-related coronavirus
  REGION 1..10: note = Table B: HLA-DQA1*03:02-B1*03:03L HLA-DQA1*01:02-B1*06:02L HLA-DPA1*03:01-B1*105:01L HLA-DRB1*15:03L
  source 1..10: note = Severe acute respiratory syndrome coronavirus 2
EVQPQLEMEL

SEQ ID NO: 8460 - protein, 13 aa, Severe acute respiratory syndrome-related coronavirus
  REGION 1..13: note = Table B: HLA-DQA1*03:02-B1*03:03L HLA-DQA1*05:01-B1*03:01L HLA-DRB1*13:02L HLA-DRB1*13:03L HLA-DRB1*01:03L HLA-DRB1*04:02L HLA-DRB1*04:04L HLA-DRB1*04:05L HLA-DQA1*01:02-B1*06:02L HLA-DRB1*01:02L HLA-DRB4*03:01NL HLA-DRB1*08:04L HLA-DRB1*08:77L
  REGION 1..13: note = CONT. FROM ABOVE: HLA-DRB3*02:01L HLA-DRB1*14:01L HLA-DRB1*11:03 L HLA-DRB1*11:04L HLA-DRB1*14:02L HLA-DQA1*01-B1*05L HLA-DRB1*04 :10L HLA-DRB1*12:01L HLA-DRB1*12:02L HLA-DPA1*03:01-B1*105:01L H LA-DRB1*14:54L HLA-DQA1*05:05-B1*03:01L HLA-DRB1*10:01L
  REGION 1..13: note = CONT. FROM ABOVE: HLA-DRB1*16:01L HLA-DRB1*04:08L HLA-DRB1*08:03 L HLA-DQA1*02:01-B1*03:03L HLA-DRB1*15:03L
  source 1..13: note = Severe acute respiratory syndrome coronavirus 2
QPQLEMELTPVVQ

SEQ ID NO: 8461 - protein, 10 aa, Severe acute respiratory syndrome-related coronavirus
  REGION 1..10: note = Table B: HLA-DQA1*03:02-B1*03:03M HLA-DQA1*05:01-B1*03:01L HLA-DQA1*01:02-B1*06:02L HLA-DRB1*08:77L HLA-DPA1*03:01-B1*04:02L HLA-DRB1*11:02H HLA-DRB1*14:02L HLA-DRB1*11:01L HLA-DQA1*05:05-B1*03:19H
  REGION 1..10: note = CONT. FROM ABOVE: HLA-DQA1*05:01-B1*02:01M HLA-DRB4*01:01L HLA-D PA1*01:03-B1*04:01L HLA-DQA1*05:05-B1*03:116L HLA-DRB1*09:01L HL A-DPA1*01:03-B1*04:02L HLA-DPA1*02:01-B1*13:01L HLA-DQA1*03:01-B 1*03:02M HLA-DPA1*01:03-B1*104:01H HLA-DPA1*01:02-B1*04:01L
  REGION 1..10: note = CONT. FROM ABOVE: HLA-DRB1*10:01L HLA-DRB1*16:01L HLA-DQA1*01:03 -B1*06:01L HLA-DRB1*08:03L HLA-DQA1*02:01-B1*03:03L HLA-DRB1*15: 03L
  source 1..10: note = Severe acute respiratory syndrome coronavirus 2
MELTPVVQTI

SEQ ID NO: 8462 - protein, 11 aa, Severe acute respiratory syndrome-related coronavirus
  REGION 1..11: note = Table B: HLA-DQA1*03:02-B1*03:03L HLA-DQA1*05:05-B1*03:19L
  source 1..11: note = Severe acute respiratory syndrome coronavirus 2
ELTPVVQTIEV

SEQ ID NO: 8463 - protein, 11 aa, Severe acute respiratory syndrome-related coronavirus
  REGION 1..11: note = Table B: HLA-DQA1*03:02-B1*03:03L HLA-DQA1*05:01-B1*03:01L HLA-DRB1*04:03L HLA-DRB1*13:03L HLA-DRB1*08:77L HLA-DPA1*03:01-B1*04:02L HLA-DRB1*14:01L HLA-DQA1*05:05-B1*03:19L HLA-DQA1*05:01-B1*02:01L
  REGION 1..11: note = CONT. FROM ABOVE: HLA-DRB4*01:01L HLA-DPA1*01:03-B1*04:01L HLA-D RB1*12:01L HLA-DQA1*03:01-B1*03:02L HLA-DPA1*01:02-B1*04:01L HLA -DRB1*16:01L
  source 1..11: note = Severe acute respiratory syndrome coronavirus 2
PVVQTIEVNSF

SEQ ID NO: 8464 - protein, 11 aa, Severe acute respiratory syndrome-related coronavirus
  REGION 1..11: note = Table B: HLA-DQA1*03:02-B1*03:03L HLA-DRB1*13:02L HLA-DRB1*14:01L HLA-DPA1*02:01-B1*13:01L HLA-DQA1*01:03-B1*06:01L HLA-DRB1*08:02L
  source 1..11: note = Severe acute respiratory syndrome coronavirus 2
QTIEVNSFSGY

SEQ ID NO: 8465 - protein, 10 aa, Severe acute respiratory syndrome-related coronavirus
  REGION 1..10: note = Table B: HLA-DQA1*03:02-B1*03:03L HLA-DQA1*05:05-B1*03:19L HLA-DQA1*03:01-B1*03:02L HLA-DPA1*01:03-B1*104:01L
  source 1..10: note = Severe acute respiratory syndrome coronavirus 2
IEVNSFSGYL

SEQ ID NO: 8466 - protein, 11 aa, Severe acute respiratory syndrome-related coronavirus
  REGION 1..11: note = Table B: HLA-DQA1*03:02-B1*03:03L HLA-DQA1*05:01-B1*03:01L HLA-DRB1*01:02L HLA-DRB1*14:02L HLA-DQA1*05:05-B1*03:19L HLA-DRB1*15:03L
  source 1..11: note = Severe acute respiratory syndrome coronavirus 2
EVNSFSGYLKL

SEQ ID NO: 8467 - protein, 11 aa, Severe acute respiratory syndrome-related coronavirus
  REGION 1..11: note = Table B: HLA-DQA1*03:02-B1*03:03L HLA-DQA1*05:01-B1*03:01L HLA-DRB1*01:03L HLA-DQA1*01:02-B1*06:02L HLA-DRB1*08:04L HLA-DPA1*03:01-B1*04:02L HLA-DRB1*08:01L HLA-DQA1*05:05-B1*03:19L HLA-DPA1*01:03-B1*04:01L
  REGION 1..11: note = CONT. FROM ABOVE: HLA-DPA1*01:03-B1*04:02L HLA-DQA1*05:05-B1*03: 01L HLA-DRB1*16:01L HLA-DRB1*04:08L
  source 1..11: note = Severe acute respiratory syndrome coronavirus 2
SFSGYLKLTDN

SEQ ID NO: 8468 - protein, 10 aa, Severe acute respiratory syndrome-related coronavirus
  REGION 1..10: note = Table B: HLA-DQA1*03:02-B1*03:03L HLA-DQA1*05:01-B1*03:01L HLA-DRB1*04:03L HLA-DRB1*13:02L HLA-DRB1*13:03L HLA-DRB1*01:03L HLA-DRB1*04:05L HLA-DQA1*01:02-B1*06:02M HLA-DRB1*01:01L HLA-DRB1*08:77L HLA-DPA1*01:03-B1*03:01L
  REGION 1..10: note = CONT. FROM ABOVE: HLA-DPA1*03:01-B1*04:02L HLA-DRB1*03:01L HLA-D RB1*14:01L HLA-DRB1*11:02L HLA-DRB1*14:02L HLA-DQA1*01:01-B1*05: 01L HLA-DRB1*11:01L HLA-DQA1*01-B1*05L HLA-DQA1*05:05-B1*03:19M HLA-DQA1*05:01-B1*02:01L HLA-DRB4*01:01L
  REGION 1..10: note = CONT. FROM ABOVE: HLA-DPA1*01:03-B1*04:01L HLA-DQA1*05:05-B1*03: 116L HLA-DPA1*01:03-B1*04:02L HLA-DRB1*12:01L HLA-DPA1*02:01-B1* 13:01M HLA-DPA1*03:01-B1*105:01L HLA-DQA1*03:01-B1*03:02L HLA-DP A1*01:03-B1*104:01L HLA-DQA1*05:05-B1*03:01L
  REGION 1..10: note = CONT. FROM ABOVE: HLA-DPA1*01:02-B1*04:01L HLA-DRB1*10:01L HLA-D RB1*16:01L HLA-DQA1*01:03-B1*06:01M HLA-DRB1*08:02L HLA-DQA1*02: 01-B1*03:03L HLA-DRB1*15:03L
  source 1..10: note = Severe acute respiratory syndrome coronavirus 2
GYLKLTDNVY

SEQ ID NO: 8469 - protein, 13 aa, Severe acute respiratory syndrome-related coronavirus
  REGION 1..13: note = Table B: HLA-DQA1*03:02-B1*03:03L HLA-DQA1*05:01-B1*03:01L HLA-DQA1*01:02-B1*06:02L HLA-DQA1*05:05-B1*03:19L HLA-DPA1*03:01-B1*105:01L
  source 1..13: note = Severe acute respiratory syndrome coronavirus 2
LTDNVYIKNADIV

SEQ ID NO: 8470 - protein, 11 aa, Severe acute respiratory syndrome-related coronavirus
  REGION 1..11: note = Table B: HLA-DQA1*03:02-B1*03:03L HLA-DRB1*13:03L HLA-DRB4*03:01NL HLA-DRB1*14:01L HLA-DRB1*08:01L HLA-DRB1*04:10L HLA-DRB1*14:54L HLA-DRB1*04:08L
  source 1..11: note = Severe acute respiratory syndrome coronavirus 2
NVYIKNADIVE

SEQ ID NO: 8471 - protein, 11 aa, Severe acute respiratory syndrome-related coronavirus
  REGION 1..11: note = Table B: HLA-DQA1*03:02-B1*03:03L HLA-DQA1*05:01-B1*03:01L HLA-DRB1*13:03L HLA-DRB4*03:01NL HLA-DRB1*14:01L HLA-DRB1*04:10L HLA-DRB1*14:54L HLA-DRB1*04:08L
  source 1..11: note = Severe acute respiratory syndrome coronavirus 2
VYIKNADIVEE

SEQ ID NO: 8472 - protein, 11 aa, Severe acute respiratory syndrome-related coronavirus
  REGION 1..11: note = Table B: HLA-DQA1*03:02-B1*03:03L HLA-DQA1*05:01-B1*03:01L HLA-DRB1*04:03L HLA-DQA1*01:02-B1*06:02L HLA-DQA1*01:01-B1*05:01L HLA-DQA1*05:01-B1*02:01L HLA-DPA1*03:01-B1*105:01L HLA-DQA1*05:05-B1*03:01L
  REGION 1..11: note = CONT. FROM ABOVE: HLA-DRB1*16:01L HLA-DQA1*01:03-B1*06:01L
  source 1..11: note = Severe acute respiratory syndrome coronavirus 2
IKNADIVEEAK

SEQ ID NO: 8473 - protein, 10 aa, Severe acute respiratory syndrome-related coronavirus
  REGION 1..10: note = Table B: HLA-DQA1*03:02-B1*03:03M HLA-DQA1*05:01-B1*03:01L HLA-DQA1*01:02-B1*06:02L HLA-DRB1*11:02L HLA-DQA1*05:05-B1*03:19M HLA-DQA1*05:01-B1*02:01L HLA-DRB1*09:01L HLA-DPA1*01:03-B1*04:02L
  REGION 1..10: note = CONT. FROM ABOVE: HLA-DQA1*03:01-B1*03:02L HLA-DPA1*01:03-B1*104 :01M HLA-DRB1*16:01L HLA-DQA1*01:03-B1*06:01L HLA-DQA1*02:01-B1* 03:03L
  source 1..10: note = Severe acute respiratory syndrome coronavirus 2
EEAKKVKPTV

SEQ ID NO: 8474 - protein, 11 aa, Severe acute respiratory syndrome-related coronavirus
  REGION 1..11: note = Table B: HLA-DQA1*03:02-B1*03:03L HLA-DQA1*05:01-B1*03:01L HLA-DRB1*04:03L HLA-DRB1*04:02L HLA-DQA1*01:02-B1*06:02L HLA-DRB4*03:01NL HLA-DQA1*05:01-B1*02:01L HLA-DQA1*03:01-B1*03:02L HLA-DQA1*05:05-B1*03:01L
  REGION 1..11: note = CONT. FROM ABOVE: HLA-DRB1*14:17L HLA-DQA1*01:03-B1*06:01L HLA-D QA1*02:01-B1*03:03L
  source 1..11: note = Severe acute respiratory syndrome coronavirus 2
VKPTVVVNAAN

SEQ ID NO: 8475 - protein, 11 aa, Severe acute respiratory syndrome-related coronavirus
  REGION 1..11: note = Table B: HLA-DQA1*03:02-B1*03:03L HLA-DQA1*05:01-B1*03:01L HLA-DRB1*04:03L HLA-DRB1*13:02L HLA-DRB1*01:03L HLA-DRB4*03:01NL HLA-DRB3*02:01L HLA-DPA1*01:03-B1*03:01L HLA-DPA1*03:01-B1*04:02L HLA-DRB1*03:01L HLA-DRB1*14:01L
  REGION 1..11: note = CONT. FROM ABOVE: HLA-DRB1*11:02L HLA-DQA1*01-B1*05L HLA-DRB4*01 :01L HLA-DPA1*01:03-B1*04:01L HLA-DPA1*01:03-B1*04:02L HLA-DRB1* 12:01L HLA-DRB1*12:02L HLA-DPA1*02:01-B1*13:01L HLA-DQA1*03:01-B 1*03:02L HLA-DRB1*14:54L HLA-DPA1*01:03-B1*104:01L
  REGION 1..11: note = CONT. FROM ABOVE: HLA-DQA1*05:05-B1*03:01L HLA-DPA1*01:02-B1*04: 01L HLA-DRB1*10:01L HLA-DRB1*16:01L HLA-DQA1*01:03-B1*06:01L HLA -DRB1*15:03L
  source 1..11: note = Severe acute respiratory syndrome coronavirus 2
PTVVVNAANVY

SEQ ID NO: 8476 - protein, 10 aa, Severe acute respiratory syndrome-related coronavirus
  REGION 1..10: note = Table B: HLA-DQA1*03:02-B1*03:03L HLA-DQA1*05:01-B1*03:01L HLA-DRB1*04:03L HLA-DRB1*13:02L HLA-DRB1*13:03L HLA-DRB1*04:02L HLA-DRB1*01:02L HLA-DRB1*08:77L HLA-DRB3*02:01L HLA-DPA1*03:01-B1*04:02L HLA-DRB1*14:01L HLA-DRB1*14:02L
  REGION 1..10: note = CONT. FROM ABOVE: HLA-DQA1*05:05-B1*03:19L HLA-DQA1*05:01-B1*02: 01L HLA-DRB1*09:01L HLA-DRB1*12:01L HLA-DPA1*03:01-B1*105:01L HL A-DQA1*03:01-B1*03:02L HLA-DPA1*01:02-B1*04:01L HLA-DRB1*16:01L HLA-DQA1*02:01-B1*03:03L HLA-DRB1*15:03L
  source 1..10: note = Severe acute respiratory syndrome coronavirus 2
VVVNAANVYL

SEQ ID NO: 8477 - protein, 12 aa, Severe acute respiratory syndrome-related coronavirus
  REGION 1..12: note = Table B: HLA-DQA1*03:02-B1*03:03L HLA-DQA1*05:01-B1*03:01L HLA-DRB1*04:03L HLA-DRB1*04:02L HLA-DQA1*01:02-B1*06:02L HLA-DQA1*05:05-B1*03:19L HLA-DQA1*05:05-B1*03:01L HLA-DRB1*14:17L HLA-DQA1*01:03-B1*06:01L
  source 1..12: note = Severe acute respiratory syndrome coronavirus 2
NAANVYLKHGGG

SEQ ID NO: 8478 - protein, 12 aa, Severe acute respiratory syndrome-related coronavirus
  REGION 1..12: note = Table B: HLA-DQA1*03:02-B1*03:03L HLA-DQA1*05:01-B1*03:01L HLA-DRB1*13:02L HLA-DRB1*04:05L HLA-DQA1*01:02-B1*06:02L HLA-DRB1*01:02L HLA-DRB1*08:04L HLA-DRB1*14:01L HLA-DRB1*08:01L HLA-DRB1*12:01L HLA-DRB1*12:02L HLA-DRB1*14:54L HLA-DRB1*04:08L
  REGION 1..12: note = CONT. FROM ABOVE: HLA-DRB1*15:03L
  source 1..12: note = Severe acute respiratory syndrome coronavirus 2
ANVYLKHGGGVA

SEQ ID NO: 8479 - protein, 11 aa, Severe acute respiratory syndrome-related coronavirus
  REGION 1..11: note = Table B: HLA-DQA1*03:02-B1*03:03L HLA-DQA1*05:01-B1*03:01L HLA-DRB1*04:03L HLA-DRB1*04:02L HLA-DRB1*01:02L HLA-DRB4*03:01NL HLA-DRB1*14:01L HLA-DQA1*05:05-B1*03:19L HLA-DRB1*12:01L HLA-DQA1*05:05-B1*03:01L HLA-DRB1*14:17L HLA-DRB1*16:01L
  source 1..11: note = Severe acute respiratory syndrome coronavirus 2
VYLKHGGGVAG

SEQ ID NO: 8480 - protein, 10 aa, Severe acute respiratory syndrome-related coronavirus
  REGION 1..10: note = Table B: HLA-DQA1*03:02-B1*03:03L HLA-DQA1*05:01-B1*03:01L HLA-DRB1*01:03L HLA-DQA1*01:02-B1*06:02L HLA-DQA1*05:05-B1*03:19L HLA-DQA1*03:01-B1*03:02L HLA-DQA1*05:05-B1*03:01L HLA-DQA1*01:03-B1*06:01L
  REGION 1..10: note = CONT. FROM ABOVE: HLA-DQA1*02:01-B1*03:03L
  source 1..10: note = Severe acute respiratory syndrome coronavirus 2
HGGGVAGALN

SEQ ID NO: 8481 - protein, 10 aa, Severe acute respiratory syndrome-related coronavirus
  REGION 1..10: note = Table B: HLA-DQA1*03:02-B1*03:03L HLA-DQA1*05:01-B1*03:01L HLA-DRB1*13:03L HLA-DRB1*01:03L HLA-DRB4*03:01NL HLA-DQA1*05:05-B1*03:19L HLA-DQA1*03:01-B1*03:02L HLA-DQA1*05:05-B1*03:01L HLA-DQA1*01:03-B1*06:01L
  REGION 1..10: note = CONT. FROM ABOVE: HLA-DQA1*02:01-B1*03:03L
  source 1..10: note = Severe acute respiratory syndrome coronavirus 2
GGGVAGALNK

SEQ ID NO: 8482 - protein, 10 aa, Severe acute respiratory syndrome-related coronavirus
  REGION 1..10: note = Table B: HLA-DQA1*03:02-B1*03:03L HLA-DQA1*05:01-B1*03:01L HLA-DRB1*04:03L HLA-DRB1*13:03L HLA-DRB1*01:03L HLA-DRB1*04:02L HLA-DQA1*01:02-B1*06:02L HLA-DRB4*03:01NL HLA-DRB1*08:04L HLA-DRB1*14:02L HLA-DQA1*05:05-B1*03:19L
  REGION 1..10: note = CONT. FROM ABOVE: HLA-DQA1*05:01-B1*02:01L HLA-DRB1*12:01L HLA-D PA1*03:01-B1*105:01L HLA-DQA1*03:01-B1*03:02L HLA-DQA1*05:05-B1* 03:01L HLA-DRB1*14:17L HLA-DRB1*16:01L HLA-DQA1*01:03-B1*06:01L HLA-DRB1*04:08L HLA-DQA1*02:01-B1*03:03L
  source 1..10: note = Severe acute respiratory syndrome coronavirus 2
VAGALNKATN

SEQ ID NO: 8483 - protein, 10 aa, Severe acute respiratory syndrome-related coronavirus
  REGION 1..10: note = Table B: HLA-DQA1*03:02-B1*03:03L HLA-DQA1*05:01-B1*03:01L HLA-DRB1*04:01L HLA-DRB1*04:03L HLA-DRB1*13:02L HLA-DRB1*13:03L HLA-DRB1*01:03L HLA-DRB1*04:02L HLA-DRB1*04:04L HLA-DRB1*04:05L HLA-DQA1*01:02-B1*06:02L HLA-DRB1*01:02L HLA-DRB4*03:01NL
  REGION 1..10: note = CONT. FROM ABOVE: HLA-DRB1*08:04L HLA-DRB1*08:77L HLA-DRB3*02:01 L HLA-DPA1*01:03-B1*03:01L HLA-DPA1*03:01-B1*04:02L HLA-DRB1*03: 01L HLA-DRB1*14:01L HLA-DRB1*11:03L HLA-DRB1*11:04L HLA-DRB1*14: 02L HLA-DQA1*01:01-B1*05:01L HLA-DRB1*08:01L HLA-DRB1*11:01L
  REGION 1..10: note = CONT. FROM ABOVE: HLA-DRB5*01:01L HLA-DQA1*01-B1*05L HLA-DQA1*05 :05-B1*03:19L HLA-DQA1*05:01-B1*02:01L HLA-DRB4*01:01L HLA-DPA1* 01:03-B1*04:01L HLA-DQA1*05:05-B1*03:116L HLA-DRB1*09:01L HLA-DP A1*01:03-B1*04:02L HLA-DRB1*12:01L HLA-DRB1*12:02L
  REGION 1..10: note = CONT. FROM ABOVE: HLA-DRB3*01:01L HLA-DPA1*02:01-B1*13:01L HLA-D PA1*03:01-B1*105:01L HLA-DQA1*03:01-B1*03:02L HLA-DRB1*14:54L HL A-DQA1*05:05-B1*03:01L HLA-DRB1*14:17L HLA-DPA1*01:02-B1*04:01L HLA-DRB1*07:01L HLA-DRB1*10:01L HLA-DRB1*16:01L
  REGION 1..10: note = CONT. FROM ABOVE: HLA-DQA1*01:03-B1*06:01L HLA-DRB1*04:08L HLA -DRB1*08:02L HLA-DRB1*08:03L HLA-DQA1*02:01-B1*03:03L HLA-DRB1* 15:03L
  source 1..10: note = Severe acute respiratory syndrome coronavirus 2
ALNKATNNAM

SEQ ID NO: 8484 - protein, 14 aa, Severe acute respiratory syndrome-related coronavirus
  REGION 1..14: note = Table B: HLA-DQA1*03:02-B1*03:03L HLA-DRB1*13:02L HLA-DPA1*01:03-B1*03:01L HLA-DQA1*05:05-B1*03:19L HLA-DPA1*02:01-B1*13:01L HLA-DQA1*05:05-B1*03:01L
  source 1..14: note = Severe acute respiratory syndrome coronavirus 2
LNKATNNAMQVESD

SEQ ID NO: 8485 - protein, 12 aa, Severe acute respiratory syndrome-related coronavirus
  REGION 1..12: note = Table B: HLA-DQA1*03:02-B1*03:03L HLA-DQA1*05:01-B1*03:01L HLA-DRB1*04:03L HLA-DQA1*01:02-B1*06:02L HLA-DQA1*05:05-B1*03:19L HLA-DQA1*05:01-B1*02:01L HLA-DQA1*05:05-B1*03:01L
  source 1..12: note = Severe acute respiratory syndrome coronavirus 2
ATNNAMQVESDD

SEQ ID NO: 8486 - protein, 10 aa, Severe acute respiratory syndrome-related coronavirus
  REGION 1..10: note = Table B: HLA-DQA1*03:02-B1*03:03L HLA-DQA1*05:01-B1*03:01L HLA-DRB1*13:03L HLA-DQA1*01:02-B1*06:02L HLA-DRB1*08:77L HLA-DPA1*01:03-B1*03:01L HLA-DQA1*01-B1*05L HLA-DQA1*05:05-B1*03:19L HLA-DQA1*05:01-B1*02:01L
  REGION 1..10: note = CONT. FROM ABOVE: HLA-DPA1*01:03-B1*04:01L HLA-DPA1*03:01-B1*105 :01L HLA-DQA1*03:01-B1*03:02L HLA-DPA1*01:03-B1*104:01L HLA-DRB1 *16:01L HLA-DQA1*01:03-B1*06:01L HLA-DQA1*02:01-B1*03:03L HLA-DR B1*15:03L
  source 1..10: note = Severe acute respiratory syndrome coronavirus 2
NAMQVESDDY

SEQ ID NO: 8487 - protein, 13 aa, Severe acute respiratory syndrome-related coronavirus
  REGION 1..13: note = Table B: HLA-DQA1*03:02-B1*03:03L HLA-DQA1*01-B1*05L HLA-DQA1*03:01-B1*03:02L
  source 1..13: note = Severe acute respiratory syndrome coronavirus 2
VESDDYIATNGPL

SEQ ID NO: 8488 - protein, 10 aa, Severe acute respiratory syndrome-related coronavirus
  REGION 1..10: note = Table B: HLA-DQA1*03:02-B1*03:03L HLA-DQA1*05:01-B1*03:01L HLA-DRB1*04:03L HLA-DRB1*13:02L HLA-DRB1*13:03L HLA-DRB1*01:03L HLA-DRB1*04:02L HLA-DRB1*04:05L HLA-DQA1*01:02-B1*06:02L HLA-DRB1*01:01L HLA-DRB1*01:02L HLA-DRB4*03:01NL HLA-DRB1*08:04L
  REGION 1..10: note = CONT. FROM ABOVE: HLA-DRB1*08:77L HLA-DRB3*02:01L HLA-DPA1*01:03 -B1*03:01L HLA-DRB1*14:01L HLA-DRB1*11:03L HLA-DRB1*11:04L HLA-D RB1*14:02L HLA-DQA1*01:01-B1*05:01L HLA-DRB1*08:01L HLA-DRB5*01: 01L HLA-DQA1*01-B1*05L HLA-DQA1*05:05-B1*03:19L
  REGION 1..10: note = CONT. FROM ABOVE: HLA-DQA1*05:01-B1*02:01L HLA-DRB1*04:10L HLA-D PA1*01:03-B1*04:02L HLA-DRB1*12:01L HLA-DRB1*12:02L HLA-DPA1*03: 01-B1*105:01L HLA-DQA1*03:01-B1*03:02L HLA-DRB1*14:54L HLA-DQA1* 05:05-B1*03:01L HLA-DRB1*14:17L HLA-DPA1*01:02-B1*04:01L
  REGION 1..10: note = CONT. FROM ABOVE: HLA-DRB1*07:01L HLA-DRB1*10:01L HLA-DRB1*16:01 L HLA-DQA1*01:03-B1*06:01L HLA-DRB1*04:08L HLA-DRB1*08:03L HLA-D QA1*02:01-B1*03:03L HLA-DRB1*15:03L
  source 1..10: note = Severe acute respiratory syndrome coronavirus 2
DYIATNGPLK

SEQ ID NO: 8489 - protein, 10 aa, Severe acute respiratory syndrome-related coronavirus
  REGION 1..10: note = Table B: HLA-DQA1*03:02-B1*03:03L HLA-DQA1*05:01-B1*03:01L HLA-DQA1*01:02-B1*06:02L HLA-DRB1*01:02L HLA-DRB1*08:77L HLA-DPA1*03:01-B1*04:02L HLA-DRB1*14:01L HLA-DRB1*14:02L HLA-DQA1*05:05-B1*03:19L HLA-DQA1*05:01-B1*02:01L
  REGION 1..10: note = CONT. FROM ABOVE: HLA-DQA1*05:05-B1*03:116L HLA-DRB1*09:01L HLA- DRB1*12:01L HLA-DPA1*02:01-B1*13:01L HLA-DPA1*03:01-B1*105:01L H LA-DQA1*03:01-B1*03:02L HLA-DPA1*01:03-B1*104:01L HLA-DPA1*01:02 -B1*04:01L HLA-DRB1*10:01L HLA-DRB1*16:01L
  REGION 1..10: note = CONT. FROM ABOVE: HLA-DQA1*01:03-B1*06:01L HLA-DRB1*08:03L HLA-D QA1*02:01-B1*03:03L HLA-DRB1*15:03L
  source 1..10: note = Severe acute respiratory syndrome coronavirus 2
YIATNGPLKV

SEQ ID NO: 8490 - protein, 10 aa, Severe acute respiratory syndrome-related coronavirus
  REGION 1..10: note = Table B: HLA-DQA1*03:02-B1*03:03L HLA-DQA1*05:01-B1*03:01L HLA-DRB1*04:03L HLA-DRB1*13:02L HLA-DRB1*13:03L HLA-DRB1*01:03L HLA-DRB1*04:02L HLA-DRB1*01:02L HLA-DRB4*03:01NL HLA-DRB1*08:04L HLA-DRB1*08:77L HLA-DRB3*02:01L HLA-DPA1*01:03-B1*03:01L
  REGION 1..10: note = CONT. FROM ABOVE: HLA-DPA1*03:01-B1*04:02L HLA-DRB1*14:01L HLA-D RB1*11:03L HLA-DRB1*11:04L HLA-DRB1*14:02L HLA-DQA1*05:05-B1*03: 19L HLA-DQA1*05:01-B1*02:01L HLA-DRB1*12:01L HLA-DRB1*12:02L HLA -DPA1*03:01-B1*105:01L HLA-DQA1*03:01-B1*03:02L HLA-DRB1*14:54L
  REGION 1..10: note = CONT. FROM ABOVE: HLA-DQA1*05:05-B1*03:01L HLA-DRB1*14:17L HLA-D PA1*01:02-B1*04:01L HLA-DRB1*07:01L HLA-DRB1*16:01L HLA-DQA1*01: 03-B1*06:01L HLA-DQA1*02:01-B1*03:03L HLA-DRB1*15:03L
  source 1..10: note = Severe acute respiratory syndrome coronavirus 2
IATNGPLKVG

SEQ ID NO: 8491 - protein, 10 aa, Severe acute respiratory syndrome-related coronavirus
  REGION 1..10: note = Table B: HLA-DQA1*03:02-B1*03:03L HLA-DRB1*04:03L HLA-DRB1*13:03L HLA-DRB1*01:03L HLA-DRB1*04:02L HLA-DRB1*04:05L HLA-DRB1*01:02L HLA-DRB4*03:01NL HLA-DRB1*14:01L HLA-DRB1*11:04L HLA-DRB1*12:01L HLA-DQA1*03:01-B1*03:02L HLA-DRB1*14:17L
  REGION 1..10: note = CONT. FROM ABOVE: HLA-DRB1*16:01L HLA-DRB1*04:08L HLA-DQA1*02:01 -B1*03:03L
  source 1..10: note = Severe acute respiratory syndrome coronavirus 2
TNGPLKVGGS

SEQ ID NO: 8492 - protein, 11 aa, Severe acute respiratory syndrome-related coronavirus
  REGION 1..11: note = Table B: HLA-DQA1*03:02-B1*03:03L HLA-DQA1*05:01-B1*03:01L HLA-DQA1*01:02-B1*06:02L HLA-DQA1*05:05-B1*03:19L HLA-DQA1*03:01-B1*03:02L HLA-DQA1*05:05-B1*03:01L HLA-DQA1*02:01-B1*03:03L
  source 1..11: note = Severe acute respiratory syndrome coronavirus 2
VGGSCVLSGHN

SEQ ID NO: 8493 - protein, 11 aa, Severe acute respiratory syndrome-related coronavirus
  REGION 1..11: note = Table B: HLA-DQA1*03:02-B1*03:03L HLA-DQA1*05:01-B1*03:01L HLA-DRB1*04:03L HLA-DRB1*13:03L HLA-DRB1*01:03L HLA-DRB1*04:02L HLA-DRB1*04:05L HLA-DRB4*03:01NL HLA-DQA1*05:01-B1*02:01L HLA-DRB1*14:54L HLA-DQA1*05:05-B1*03:01L HLA-DRB1*14:17L
  REGION 1..11: note = CONT. FROM ABOVE: HLA-DRB1*16:01L HLA-DQA1*01:03-B1*06:01L HLA-D QA1*02:01-B1*03:03L
  source 1..11: note = Severe acute respiratory syndrome coronavirus 2
VVGPNVNKGED

SEQ ID NO: 8494 - protein, 11 aa, Severe acute respiratory syndrome-related coronavirus
  REGION 1..11: note = Table B: HLA-DQA1*03:02-B1*03:03L HLA-DQA1*05:01-B1*03:01L HLA-DRB1*04:03L HLA-DRB1*13:03L HLA-DRB1*04:02L HLA-DQA1*01:01-B1*05:01L HLA-DQA1*01-B1*05L HLA-DQA1*05:05-B1*03:19L HLA-DQA1*05:01-B1*02:01L
  REGION 1..11: note = CONT. FROM ABOVE: HLA-DQA1*05:05-B1*03:01L HLA-DRB1*16:01L HLA-D QA1*01:03-B1*06:01L HLA-DQA1*02:01-B1*03:03L
  source 1..11: note = Severe acute respiratory syndrome coronavirus 2
GPNVNKGEDIQ

SEQ ID NO: 8495 - protein, 10 aa, Severe acute respiratory syndrome-related coronavirus
  REGION 1..10: note = Table B: HLA-DQA1*03:02-B1*03:03L HLA-DQA1*05:01-B1*03:01L HLA-DQA1*03:01-B1*03:02L HLA-DQA1*02:01-B1*03:03L
  source 1..10: note = Severe acute respiratory syndrome coronavirus 2
NVNKGEDIQL

SEQ ID NO: 8496 - protein, 10 aa, Severe acute respiratory syndrome-related coronavirus
  REGION 1..10: note = Table B: HLA-DQA1*03:02-B1*03:03L HLA-DQA1*05:05-B1*03:19L HLA-DQA1*03:01-B1*03:02L
  source 1..10: note = Severe acute respiratory syndrome coronavirus 2
GEDIQLLKSA

SEQ ID NO: 8497 - protein, 11 aa, Severe acute respiratory syndrome-related coronavirus
  REGION 1..11: note = Table B: HLA-DQA1*03:02-B1*03:03L HLA-DQA1*01:02-B1*06:02L HLA-DQA1*05:01-B1*02:01L HLA-DRB1*12:01L HLA-DRB1*14:54L HLA-DRB1*16:01L HLA-DRB1*04:08L HLA-DRB1*15:03L
  source 1..11: note = Severe acute respiratory syndrome coronavirus 2
DIQLLKSAYEN

SEQ ID NO: 8498 - protein, 12 aa, Severe acute respiratory syndrome-related coronavirus
  REGION 1..12: note = Table B: HLA-DQA1*03:02-B1*03:03L HLA-DQA1*05:01-B1*03:01L HLA-DRB1*13:02L HLA-DRB1*01:03L HLA-DRB1*01:02L HLA-DRB1*08:04L HLA-DRB3*02:01L HLA-DPA1*01:03-B1*03:01L HLA-DRB1*14:01L HLA-DQA1*05:05-B1*03:19L HLA-DPA1*01:03-B1*04:01L
  REGION 1..12: note = CONT. FROM ABOVE: HLA-DPA1*01:03-B1*04:02L HLA-DPA1*02:01-B1*13: 01L HLA-DQA1*05:05-B1*03:01L HLA-DRB1*16:01L HLA-DRB1*04:08L
  source 1..12: note = Severe acute respiratory syndrome coronavirus 2
IQLLKSAYENFN

SEQ ID NO: 8499 - protein, 10 aa, Severe acute respiratory syndrome-related coronavirus
  REGION 1..10: note = Table B: HLA-DQA1*03:02-B1*03:03L HLA-DRB1*04:03L HLA-DRB1*13:03L HLA-DRB1*04:02L HLA-DRB4*03:01NL HLA-DQA1*01-B1*05L HLA-DQA1*05:01-B1*02:01L HLA-DPA1*03:01-B1*105:01L HLA-DQA1*03:01-B1*03:02L
  REGION 1..10: note = CONT. FROM ABOVE: HLA-DRB1*14:17L HLA-DPA1*01:02-B1*04:01L HLA-D RB1*16:01L HLA-DQA1*01:03-B1*06:01L HLA-DQA1*02:01-B1*03:03L
  source 1..10: note = Severe acute respiratory syndrome coronavirus 2
SAYENFNQHE

SEQ ID NO: 8500 - protein, 10 aa, Severe acute respiratory syndrome-related coronavirus
  REGION 1..10: note = Table B: HLA-DQA1*03:02-B1*03:03L HLA-DQA1*05:01-B1*03:01L HLA-DRB1*04:05L HLA-DQA1*01:02-B1*06:02L HLA-DRB1*01:02L HLA-DPA1*03:01-B1*04:02L HLA-DRB1*11:02L HLA-DQA1*01-B1*05L HLA-DQA1*05:05-B1*03:19L HLA-DQA1*05:01-B1*02:01L
  REGION 1..10: note = CONT. FROM ABOVE: HLA-DQA1*05:05-B1*03:116L HLA-DPA1*02:01-B1*13 :01L HLA-DPA1*03:01-B1*105:01L HLA-DQA1*03:01-B1*03:02L HLA-DPA1 *01:03-B1*104:01L HLA-DPA1*01:02-B1*04:01L HLA-DRB1*16:01L HLA-D QA1*01:03-B1*06:01L HLA-DQA1*02:01-B1*03:03L HLA-DRB1*15:03L
  source 1..10: note = Severe acute respiratory syndrome coronavirus 2
AYENFNQHEV

SEQ ID NO: 8501 - protein, 10 aa, Severe acute respiratory syndrome-related coronavirus
  REGION 1..10: note = Table B: HLA-DQA1*03:02-B1*03:03M HLA-DQA1*05:01-B1*03:01L HLA-DRB1*13:03L HLA-DRB1*08:77L HLA-DPA1*03:01-B1*04:02L HLA-DRB1*11:02L HLA-DQA1*01-B1*05L HLA-DQA1*05:05-B1*03:19M HLA-DQA1*05:01-B1*02:01L HLA-DPA1*01:03-B1*04:01L
  REGION 1..10: note = CONT. FROM ABOVE: HLA-DQA1*05:05-B1*03:116L HLA-DRB1*09:01L HLA- DPA1*01:03-B1*04:02L HLA-DPA1*02:01-B1*13:01L HLA-DQA1*03:01-B1* 03:02M HLA-DPA1*01:03-B1*104:01L HLA-DPA1*01:02-B1*04:01L HLA-DR B1*16:01L HLA-DQA1*01:03-B1*06:01L HLA-DQA1*02:01-B1*03:03L
  REGION 1..10: note = CONT. FROM ABOVE: HLA-DRB1*15:03L
  source 1..10: note = Severe acute respiratory syndrome coronavirus 2
YENFNQHEVL

SEQ ID NO: 8502 - protein, 10 aa, Severe acute respiratory syndrome-related coronavirus
  REGION 1..10: note = Table B: HLA-DQA1*03:02-B1*03:03L HLA-DQA1*05:01-B1*03:01L HLA-DQA1*01:02-B1*06:02L HLA-DQA1*01-B1*05L HLA-DQA1*05:05-B1*03:19L HLA-DQA1*05:01-B1*02:01L HLA-DPA1*03:01-B1*105:01L HLA-DQA1*03:01-B1*03:02L
  REGION 1..10: note = CONT. FROM ABOVE: HLA-DPA1*01:02-B1*04:01L HLA-DQA1*01:03-B1*06: 01L HLA-DQA1*02:01-B1*03:03L HLA-DRB1*15:03L
  source 1..10: note = Severe acute respiratory syndrome coronavirus 2
ENFNQHEVLL

SEQ ID NO: 8503 - protein, 10 aa, Severe acute respiratory syndrome-related coronavirus
  REGION 1..10: note = Table B: HLA-DQA1*03:02-B1*03:03L HLA-DQA1*03:01-B1*03:02L HLA-DPA1*01:02-B1*04:01L HLA-DRB1*16:01L HLA-DQA1*02:01-B1*03:03L
  source 1..10: note = Severe acute respiratory syndrome coronavirus 2
NQHEVLLAPL

SEQ ID NO: 8504 - protein, 11 aa, Severe acute respiratory syndrome-related coronavirus
  REGION 1..11: note = Table B: HLA-DQA1*03:02-B1*03:03L
  source 1..11: note = Severe acute respiratory syndrome coronavirus 2
HEVLLAPLLSA

SEQ ID NO: 8505 - protein, 10 aa, Severe acute respiratory syndrome-related coronavirus
  REGION 1..10: note = Table B: HLA-DQA1*03:02-B1*03:03L HLA-DQA1*05:05-B1*03:19L
  source 1..10: note = Severe acute respiratory syndrome coronavirus 2
LLAPLLSAGI

SEQ ID NO: 8506 - protein, 13 aa, Severe acute respiratory syndrome-related coronavirus
  REGION 1..13: note = Table B: HLA-DQA1*03:02-B1*03:03L HLA-DQA1*05:01-B1*03:01L HLA-DQA1*01:02-B1*06:02L HLA-DQA1*05:05-B1*03:19L HLA-DQA1*05:01-B1*02:01L HLA-DPA1*03:01-B1*105:01L HLA-DQA1*03:01-B1*03:02L HLA-DQA1*05:05-B1*03:01L
  REGION 1..13: note = CONT. FROM ABOVE: HLA-DQA1*01:03-B1*06:01L HLA-DQA1*02:01-B1*03: 03L
  source 1..13: note = Severe acute respiratory syndrome coronavirus 2
APLLSAGIFGADP

SEQ ID NO: 8507 - protein, 11 aa, Severe acute respiratory syndrome-related coronavirus
  REGION 1..11: note = Table B: HLA-DQA1*03:02-B1*03:03L HLA-DQA1*01-B1*05L HLA-DQA1*05:01-B1*02:01L HLA-DQA1*01:03-B1*06:01L
  source 1..11: note = Severe acute respiratory syndrome coronavirus 2
SAGIFGADPIH

SEQ ID NO: 8508 - protein, 10 aa, Severe acute respiratory syndrome-related coronavirus
  REGION 1..10: note = Table B: HLA-DQA1*03:02-B1*03:03L HLA-DQA1*05:01-B1*03:01L HLA-DRB1*04:03L HLA-DRB1*13:03L HLA-DRB1*01:03L HLA-DRB1*04:02L HLA-DRB1*04:05L HLA-DRB1*01:02L HLA-DRB4*03:01NL HLA-DRB1*14:01L HLA-DQA1*01-B1*05L HLA-DQA1*05:05-B1*03:19L
  REGION 1..10: note = CONT. FROM ABOVE: HLA-DQA1*05:01-B1*02:01L HLA-DRB1*12:01L HLA-D QA1*03:01-B1*03:02L HLA-DQA1*05:05-B1*03:01L HLA-DRB1*14:17L HLA -DPA1*01:02-B1*04:01L HLA-DRB1*16:01L HLA-DQA1*01:03-B1*06:01L H LA-DQA1*02:01-B1*03:03L
  source 1..10: note = Severe acute respiratory syndrome coronavirus 2
GIFGADPIHS

SEQ ID NO: 8509 - protein, 10 aa, Severe acute respiratory syndrome-related coronavirus
  REGION 1..10: note = Table B: HLA-DQA1*03:02-B1*03:03M HLA-DQA1*05:01-B1*03:01L HLA-DRB1*04:01L HLA-DRB1*04:03L HLA-DRB1*13:02L HLA-DRB1*13:03L HLA-DRB1*01:03L HLA-DRB1*04:02L HLA-DRB1*04:05L HLA-DQA1*01:02-B1*06:02M HLA-DRB1*01:01L HLA-DRB1*01:02L
  REGION 1..10: note = CONT. FROM ABOVE: HLA-DRB4*03:01NL HLA-DRB1*08:77L HLA-DRB3*02:0 1L HLA-DPA1*01:03-B1*03:01L HLA-DPA1*03:01-B1*04:02L HLA-DRB1*03 :01L HLA-DRB1*14:01L HLA-DRB1*11:02L HLA-DRB1*11:03L HLA-DRB1*11 :04L HLA-DRB1*14:02L HLA-DQA1*01:01-B1*05:01L HLA-DRB1*08:01L
  REGION 1..10: note = CONT. FROM ABOVE: HLA-DRB1*11:01L HLA-DQA1*01-B1*05L HLA-DQA1*05 :05-B1*03:19L HLA-DQA1*05:01-B1*02:01L HLA-DRB4*01:01L HLA-DPA1* 01:03-B1*04:01L HLA-DQA1*05:05-B1*03:116L HLA-DRB1*09:01L HLA-DP A1*01:03-B1*04:02L HLA-DRB1*12:01L HLA-DPA1*02:01-B1*13:01M
  REGION 1..10: note = CONT. FROM ABOVE: HLA-DPA1*03:01-B1*105:01M HLA-DQA1*03:01-B1*03 :02L HLA-DPA1*01:03-B1*104:01L HLA-DQA1*05:05-B1*03:01L HLA-DPA1 *01:02-B1*04:01L HLA-DRB1*07:01L HLA-DRB1*10:01L HLA-DRB1*16:01L HLA-DQA1*01:03-B1*06:01M HLA-DRB1*04:08L HLA-DRB1*08:03L
  REGION 1..10: note = CONT. FROM ABOVE: HLA-DQA1*02:01-B1*03:03L HLA-DRB1*15:03L
  source 1..10: note = Severe acute respiratory syndrome coronavirus 2
IFGADPIHSL

SEQ ID NO: 8510 - protein, 10 aa, Severe acute respiratory syndrome-related coronavirus
  REGION 1..10: note = Table B: HLA-DQA1*03:02-B1*03:03L HLA-DQA1*05:01-B1*03:01L HLA-DQA1*01:02-B1*06:02L HLA-DPA1*03:01-B1*04:02L HLA-DQA1*01-B1*05L HLA-DQA1*05:05-B1*03:19L HLA-DQA1*05:01-B1*02:01L HLA-DQA1*05:05-B1*03:116L
  REGION 1..10: note = CONT. FROM ABOVE: HLA-DPA1*03:01-B1*105:01L HLA-DQA1*03:01-B1*03 :02L HLA-DPA1*01:03-B1*104:01L HLA-DPA1*01:02-B1*04:01L HLA-DRB1 *16:01L HLA-DQA1*01:03-B1*06:01L HLA-DQA1*02:01-B1*03:03L HLA-DR B1*15:03L
  source 1..10: note = Severe acute respiratory syndrome coronavirus 2
GADPIHSLRV

SEQ ID NO: 8511 - protein, 10 aa, Severe acute respiratory syndrome-related coronavirus
  REGION 1..10: note = Table B: HLA-DQA1*03:02-B1*03:03L HLA-DQA1*05:01-B1*03:01L HLA-DPA1*03:01-B1*04:02L HLA-DQA1*01-B1*05L HLA-DQA1*05:05-B1*03:19L HLA-DQA1*05:01-B1*02:01L HLA-DQA1*03:01-B1*03:02L HLA-DPA1*01:02-B1*04:01L
  REGION 1..10: note = CONT. FROM ABOVE: HLA-DRB1*16:01L HLA-DQA1*02:01-B1*03:03L
  source 1..10: note = Severe acute respiratory syndrome coronavirus 2
VDTVRTNVYL

SEQ ID NO: 8512 - protein, 10 aa, Severe acute respiratory syndrome-related coronavirus
  REGION 1..10: note = Table B: HLA-DQA1*03:02-B1*03:03L HLA-DQA1*01-B1*05L HLA-DPA1*03:01-B1*105:01L HLA-DQA1*03:01-B1*03:02L HLA-DQA1*01:03-B1*06:01L HLA-DQA1*02:01-B1*03:03L
  source 1..10: note = Severe acute respiratory syndrome coronavirus 2
NVYLAVFDKN

SEQ ID NO: 8513 - protein, 10 aa, Severe acute respiratory syndrome-related coronavirus
  REGION 1..10: note = Table B: HLA-DQA1*03:02-B1*03:03L HLA-DRB1*04:03L HLA-DRB1*04:05L HLA-DQA1*01:02-B1*06:02L HLA-DRB1*01:02L HLA-DPA1*03:01-B1*04:02L HLA-DQA1*01-B1*05L HLA-DQA1*05:01-B1*02:01L HLA-DPA1*01:03-B1*04:01L
  REGION 1..10: note = CONT. FROM ABOVE: HLA-DRB1*12:01L HLA-DPA1*02:01-B1*13:01L HLA-D PA1*03:01-B1*105:01L HLA-DQA1*03:01-B1*03:02L HLA-DPA1*01:02-B1* 04:01L HLA-DRB1*16:01L HLA-DQA1*01:03-B1*06:01L HLA-DQA1*02:01-B 1*03:03L HLA-DRB1*15:03L
  source 1..10: note = Severe acute respiratory syndrome coronavirus 2
VYLAVFDKNL

SEQ ID NO: 8514 - protein, 10 aa, Severe acute respiratory syndrome-related coronavirus
  REGION 1..10: note = Table B: HLA-DQA1*03:02-B1*03:03L HLA-DQA1*05:01-B1*03:01L HLA-DQA1*01:02-B1*06:02L HLA-DPA1*01:03-B1*03:01L HLA-DPA1*03:01-B1*04:02L HLA-DRB1*14:01L HLA-DRB1*14:02L HLA-DQA1*01-B1*05L HLA-DQA1*05:05-B1*03:19L
  REGION 1..10: note = CONT. FROM ABOVE: HLA-DQA1*05:01-B1*02:01L HLA-DPA1*01:03-B1*04: 01L HLA-DPA1*02:01-B1*13:01L HLA-DPA1*03:01-B1*105:01L HLA-DQA1* 03:01-B1*03:02L HLA-DPA1*01:03-B1*104:01L HLA-DPA1*01:02-B1*04:0 1L HLA-DRB1*16:01L HLA-DQA1*01:03-B1*06:01L
  REGION 1..10: note = CONT. FROM ABOVE: HLA-DQA1*02:01-B1*03:03L HLA-DRB1*15:03L
  source 1..10: note = Severe acute respiratory syndrome coronavirus 2
VFDKNLYDKL

SEQ ID NO: 8515 - protein, 10 aa, Severe acute respiratory syndrome-related coronavirus
  REGION 1..10: note = Table B: HLA-DQA1*03:02-B1*03:03M HLA-DQA1*05:01-B1*03:01M HLA-DRB1*04:01L HLA-DRB1*04:03L HLA-DRB1*13:02L HLA-DRB1*13:03M HLA-DRB1*01:03M HLA-DRB1*04:02L HLA-DRB1*04:05M HLA-DQA1*01:02-B1*06:02H HLA-DRB1*01:01M HLA-DRB1*01:02L
  REGION 1..10: note = CONT. FROM ABOVE: HLA-DRB4*03:01NL HLA-DRB1*08:77M HLA-DPA1*01:0 3-B1*03:01L HLA-DPA1*03:01-B1*04:02M HLA-DRB1*03:01L HLA-DRB1*14 :01L HLA-DRB1*11:03L HLA-DRB1*11:04L HLA-DRB1*14:02M HLA-DQA1*01 :01-B1*05:01L HLA-DRB1*08:01L HLA-DRB1*11:01L HLA-DRB5*01:01L
  REGION 1..10: note = CONT. FROM ABOVE: HLA-DQA1*01-B1*05L HLA-DQA1*05:05-B1*03:19L HL A-DQA1*05:01-B1*02:01M HLA-DRB4*01:01L HLA-DPA1*01:03-B1*04:01M HLA-DQA1*05:05-B1*03:116M HLA-DRB1*09:01L HLA-DPA1*01:03-B1*04:0 2M HLA-DRB1*12:01L HLA-DPA1*02:01-B1*13:01M
  REGION 1..10: note = CONT. FROM ABOVE: HLA-DPA1*03:01-B1*105:01M HLA-DQA1*03:01-B1*03 :02L HLA-DPA1*01:03-B1*104:01L HLA-DQA1*05:05-B1*03:01L HLA-DPA1 *01:02-B1*04:01L HLA-DRB1*07:01L HLA-DRB1*10:01L HLA-DRB1*16:01M HLA-DQA1*01:03-B1*06:01M HLA-DRB1*08:02L HLA-DRB1*08:03L
  REGION 1..10: note = CONT. FROM ABOVE: HLA-DQA1*02:01-B1*03:03M HLA-DRB1*15:01L HLA -DRB1*15:03M
  source 1..10: note = Severe acute respiratory syndrome coronavirus 2
NLYDKLVSSF

SEQ ID NO: 8516 - protein, 10 aa, Severe acute respiratory syndrome-related coronavirus
  REGION 1..10: note = Table B: HLA-DQA1*03:02-B1*03:03L HLA-DQA1*05:01-B1*02:01L HLA-DPA1*02:01-B1*13:01L HLA-DPA1*03:01-B1*105:01L HLA-DRB1*16:01L HLA-DQA1*01:03-B1*06:01L HLA-DRB1*15:03L
  source 1..10: note = Severe acute respiratory syndrome coronavirus 2
LYDKLVSSFL

SEQ ID NO: 8517 - protein, 13 aa, Severe acute respiratory syndrome-related coronavirus
  REGION 1..13: note = Table B: HLA-DQA1*03:02-B1*03:03L HLA-DQA1*05:01-B1*03:01L HLA-DRB1*04:03L HLA-DRB1*13:02L HLA-DRB1*04:05L HLA-DRB1*01:02L HLA-DQA1*05:01-B1*02:01L HLA-DPA1*02:01-B1*13:01L HLA-DPA1*01:03-B1*104:01L HLA-DQA1*05:05-B1*03:01L
  REGION 1..13: note = CONT. FROM ABOVE: HLA-DRB1*15:03L
  source 1..13: note = Severe acute respiratory syndrome coronavirus 2
DKLVSSFLEMKSE

SEQ ID NO: 8518 - protein, 12 aa, Severe acute respiratory syndrome-related coronavirus
  REGION 1..12: note = Table B: HLA-DQA1*03:02-B1*03:03L HLA-DQA1*05:01-B1*03:01L HLA-DRB1*04:01L HLA-DRB1*13:02L HLA-DQA1*01:02-B1*06:02L HLA-DRB1*08:04L HLA-DRB1*08:77L HLA-DPA1*01:03-B1*03:01L HLA-DPA1*03:01-B1*04:02L HLA-DRB1*11:03L HLA-DRB1*11:04L
  REGION 1..12: note = CONT. FROM ABOVE: HLA-DQA1*01:01-B1*05:01L HLA-DRB1*11:01L HLA-D RB5*01:01L HLA-DQA1*05:01-B1*02:01L HLA-DRB1*09:01L HLA-DPA1*01: 03-B1*04:02L HLA-DRB1*12:02L HLA-DRB3*01:01L HLA-DPA1*02:01-B1*1 3:01L HLA-DPA1*03:01-B1*105:01L HLA-DPA1*01:03-B1*02:01L
  REGION 1..12: note = CONT. FROM ABOVE: HLA-DQA1*05:05-B1*03:01L HLA-DPA1*01:02-B1*04: 01L HLA-DRB1*07:01L HLA-DQA1*01:03-B1*06:01L HLA-DRB1*15:03L
  source 1..12: note = Severe acute respiratory syndrome coronavirus 2
VSSFLEMKSEKQ

SEQ ID NO: 8519 - protein, 12 aa, Severe acute respiratory syndrome-related coronavirus
  REGION 1..12: note = Table B: HLA-DQA1*03:02-B1*03:03L HLA-DQA1*05:01-B1*03:01L HLA-DRB1*13:02L HLA-DRB1*01:01L HLA-DPA1*01:03-B1*03:01L HLA-DRB1*11:03L HLA-DRB1*14:02L HLA-DRB1*08:01L HLA-DRB1*11:01L HLA-DQA1*01-B1*05L HLA-DQA1*05:05-B1*03:19L
  REGION 1..12: note = CONT. FROM ABOVE: HLA-DQA1*05:01-B1*02:01L HLA-DRB1*04:10L HLA-D RB3*01:01L HLA-DPA1*02:01-B1*13:01L HLA-DQA1*05:05-B1*03:01L HLA -DRB1*08:03L
  source 1..12: note = Severe acute respiratory syndrome coronavirus 2
FLEMKSEKQVEQ

SEQ ID NO: 8520 - protein, 10 aa, Severe acute respiratory syndrome-related coronavirus
  REGION 1..10: note = Table B: HLA-DQA1*03:02-B1*03:03L HLA-DQA1*05:05-B1*03:19L
  source 1..10: note = Severe acute respiratory syndrome coronavirus 2
KQVEQKIAEI

SEQ ID NO: 8521 - protein, 12 aa, Severe acute respiratory syndrome-related coronavirus
  REGION 1..12: note = Table B: HLA-DQA1*03:02-B1*03:03L HLA-DQA1*05:01-B1*03:01L HLA-DRB1*13:02L HLA-DRB1*13:03L HLA-DRB1*01:03L HLA-DRB1*04:02L HLA-DRB1*04:05L HLA-DQA1*01:02-B1*06:02L HLA-DRB1*01:02L HLA-DPA1*01:03-B1*03:01L HLA-DQA1*01:01-B1*05:01L
  REGION 1..12: note = CONT. FROM ABOVE: HLA-DRB1*08:01L HLA-DQA1*01-B1*05L HLA-DQA1*05 :05-B1*03:19L HLA-DQA1*05:01-B1*02:01L HLA-DRB1*04:10L HLA-DRB1* 12:01L HLA-DPA1*02:01-B1*13:01L HLA-DPA1*03:01-B1*105:01L HLA-DR B1*14:54L HLA-DPA1*01:03-B1*104:01L HLA-DQA1*05:05-B1*03:01L
  REGION 1..12: note = CONT. FROM ABOVE: HLA-DRB1*14:17L HLA-DPA1*01:02-B1*04:01L HLA-D RB1*16:01L HLA-DQA1*01:03-B1*06:01L HLA-DRB1*04:08L HLA-DRB1*15: 03L
  source 1..12: note = Severe acute respiratory syndrome coronavirus 2
VEQKIAEIPKEE

SEQ ID NO: 8522 - protein, 10 aa, Severe acute respiratory syndrome-related coronavirus
  REGION 1..10: note = Table B: HLA-DQA1*03:02-B1*03:03L HLA-DQA1*05:01-B1*03:01L HLA-DQA1*01:02-B1*06:02L HLA-DRB1*01:02L HLA-DPA1*03:01-B1*04:02L HLA-DRB1*14:01L HLA-DRB1*14:02L HLA-DQA1*05:05-B1*03:19L HLA-DQA1*05:01-B1*02:01L
  REGION 1..10: note = CONT. FROM ABOVE: HLA-DQA1*05:05-B1*03:116L HLA-DRB1*09:01L HLA- DPA1*02:01-B1*13:01L HLA-DPA1*03:01-B1*105:01L HLA-DQA1*03:01-B1 *03:02L HLA-DPA1*01:03-B1*104:01L HLA-DPA1*01:02-B1*04:01L HLA-D RB1*16:01L HLA-DQA1*01:03-B1*06:01L HLA-DQA1*02:01-B1*03:03L
  REGION 1..10: note = CONT. FROM ABOVE: HLA-DRB1*15:03L
  source 1..10: note = Severe acute respiratory syndrome coronavirus 2
KIAEIPKEEV

SEQ ID NO: 8523 - protein, 10 aa, Severe acute respiratory syndrome-related coronavirus
  REGION 1..10: note = Table B: HLA-DQA1*03:02-B1*03:03L
  source 1..10: note = Severe acute respiratory syndrome coronavirus 2
AEIPKEEVKP

SEQ ID NO: 8524 - protein, 10 aa, Severe acute respiratory syndrome-related coronavirus
  REGION 1..10: note = Table B: HLA-DQA1*03:02-B1*03:03L HLA-DQA1*05:01-B1*03:01L HLA-DRB1*13:03L HLA-DRB1*01:03L HLA-DQA1*01:02-B1*06:02L HLA-DPA1*01:03-B1*03:01L HLA-DRB1*14:01L HLA-DRB1*14:02L HLA-DQA1*05:05-B1*03:19L HLA-DQA1*05:01-B1*02:01L
  REGION 1..10: note = CONT. FROM ABOVE: HLA-DPA1*01:03-B1*04:01L HLA-DPA1*03:01-B1*105 :01L HLA-DQA1*03:01-B1*03:02L HLA-DPA1*01:02-B1*04:01L HLA-DRB1* 16:01L HLA-DQA1*01:03-B1*06:01L HLA-DQA1*02:01-B1*03:03L HLA-DRB 1*15:03L
  source 1..10: note = Severe acute respiratory syndrome coronavirus 2
EIPKEEVKPF

SEQ ID NO: 8525 - protein, 12 aa, Severe acute respiratory syndrome-related coronavirus
  REGION 1..12: note = Table B: HLA-DQA1*03:02-B1*03:03L HLA-DQA1*05:01-B1*03:01L HLA-DRB1*04:03L HLA-DRB1*04:02L HLA-DQA1*01:02-B1*06:02L HLA-DRB1*01:02L HLA-DQA1*01-B1*05L HLA-DQA1*05:01-B1*02:01L HLA-DRB1*14:17L HLA-DRB1*16:01L HLA-DQA1*01:03-B1*06:01L
  REGION 1..12: note = CONT. FROM ABOVE: HLA-DRB1*04:08L HLA-DQA1*02:01-B1*03:03L HLA-D RB1*15:03L
  source 1..12: note = Severe acute respiratory syndrome coronavirus 2
EEVKPFITESKP

SEQ ID NO: 8526 - protein, 13 aa, Severe acute respiratory syndrome-related coronavirus
  REGION 1..13: note = Table B: HLA-DQA1*03:02-B1*03:03L HLA-DRB1*04:04L HLA-DRB4*03:01NL HLA-DRB1*08:77L HLA-DRB3*02:01L HLA-DPA1*01:03-B1*03:01L HLA-DPA1*03:01-B1*04:02L HLA-DRB1*11:03L HLA-DRB1*14:02L HLA-DQA1*01:01-B1*05:01L
  REGION 1..13: note = CONT. FROM ABOVE: HLA-DRB1*11:01L HLA-DQA1*05:05-B1*03:19L HLA-D QA1*05:05-B1*03:116L HLA-DRB1*04:10L HLA-DRB1*09:01L HLA-DPA1*01 :03-B1*04:02L HLA-DRB1*12:02L HLA-DRB3*01:01L HLA-DPA1*02:01-B1* 13:01L HLA-DPA1*03:01-B1*105:01L HLA-DQA1*05:05-B1*03:01L
  REGION 1..13: note = CONT. FROM ABOVE: HLA-DPA1*01:02-B1*04:01L HLA-DRB1*07:01L HLA-D RB1*10:01L HLA-DQA1*01:03-B1*06:01L HLA-DRB1*08:02L
  source 1..13: note = Severe acute respiratory syndrome coronavirus 2
VKPFITESKPSVE

SEQ ID NO: 8527 - protein, 10 aa, Severe acute respiratory syndrome-related coronavirus
  REGION 1..10: note = Table B: HLA-DQA1*03:02-B1*03:03L HLA-DQA1*05:01-B1*03:01L HLA-DRB1*04:03L HLA-DRB1*04:02L HLA-DRB4*03:01NL HLA-DQA1*05:05-B1*03:19L HLA-DQA1*05:01-B1*02:01L HLA-DQA1*03:01-B1*03:02L HLA-DQA1*05:05-B1*03:01L
  REGION 1..10: note = CONT. FROM ABOVE: HLA-DRB1*14:17L HLA-DRB1*16:01L HLA-DQA1*01:03 -B1*06:01L HLA-DQA1*02:01-B1*03:03L
  source 1..10: note = Severe acute respiratory syndrome coronavirus 2
ITESKPSVEQ

SEQ ID NO: 8528 - protein, 15 aa, Severe acute respiratory syndrome-related coronavirus
  REGION 1..15: note = Table B: HLA-DQA1*03:02-B1*03:03L HLA-DRB1*04:02L HLA-DRB1*04:04L HLA-DRB1*08:04L HLA-DPA1*03:01-B1*04:02L HLA-DQA1*05:05-B1*03:19L HLA-DQA1*05:01-B1*02:01L HLA-DPA1*01:03-B1*04:02L HLA-DPA1*01:02-B1*04:01L
  source 1..15: note = Severe acute respiratory syndrome coronavirus 2
DDKKIKACVEEVTTT

SEQ ID NO: 8529 - protein, 10 aa, Severe acute respiratory syndrome-related coronavirus
  REGION 1..10: note = Table B: HLA-DQA1*03:02-B1*03:03L HLA-DQA1*05:01-B1*03:01L HLA-DRB1*13:02L HLA-DRB1*13:03M HLA-DRB1*01:03L HLA-DRB1*04:02L HLA-DQA1*01:02-B1*06:02L HLA-DRB1*01:01L HLA-DRB4*03:01NL HLA-DRB3*02:01L HLA-DRB1*14:01L HLA-DRB1*11:04L HLA-DRB1*14:02L
  REGION 1..10: note = CONT. FROM ABOVE: HLA-DRB1*08:01L HLA-DRB5*01:01L HLA-DQA1*05:01 -B1*02:01L HLA-DPA1*01:03-B1*04:01L HLA-DPA1*01:03-B1*04:02L HLA -DRB1*12:01M HLA-DRB1*12:02L HLA-DPA1*03:01-B1*105:01L HLA-DQA1* 03:01-B1*03:02M HLA-DQA1*05:05-B1*03:01M HLA-DRB1*14:17L
  REGION 1..10: note = CONT. FROM ABOVE: HLA-DRB1*16:01L HLA-DQA1*01:03-B1*06:01L HLA-D RB1*08:03L HLA-DQA1*02:01-B1*03:03L HLA-DRB1*15:01L
  source 1..10: note = Severe acute respiratory syndrome coronavirus 2
EVTTTLEETK

SEQ ID NO: 8530 - protein, 10 aa, Severe acute respiratory syndrome-related coronavirus
  REGION 1..10: note = Table B: HLA-DQA1*03:02-B1*03:03L HLA-DQA1*05:01-B1*03:01L HLA-DRB1*04:03L HLA-DRB1*13:03L HLA-DRB1*01:03L HLA-DRB1*04:05L HLA-DQA1*01:02-B1*06:02L HLA-DRB4*03:01NL HLA-DRB1*08:77L HLA-DRB3*02:01L HLA-DPA1*01:03-B1*03:01L
  REGION 1..10: note = CONT. FROM ABOVE: HLA-DPA1*03:01-B1*04:02L HLA-DRB1*14:01L HLA-D RB1*14:02L HLA-DQA1*01-B1*05L HLA-DQA1*05:05-B1*03:19L HLA-DQA1* 05:01-B1*02:01L HLA-DRB4*01:01L HLA-DPA1*01:03-B1*04:01L HLA-DQA 1*05:05-B1*03:116L HLA-DPA1*01:03-B1*04:02L HLA-DRB1*12:01L
  REGION 1..10: note = CONT. FROM ABOVE: HLA-DPA1*02:01-B1*13:01L HLA-DPA1*03:01-B1*105 :01L HLA-DQA1*03:01-B1*03:02L HLA-DPA1*01:03-B1*104:01L HLA-DQA1 *05:05-B1*03:01L HLA-DPA1*01:02-B1*04:01L HLA-DRB1*07:01L HLA-DR B1*10:01L HLA-DRB1*16:01L HLA-DQA1*01:03-B1*06:01L
  REGION 1..10: note = CONT. FROM ABOVE: HLA-DQA1*02:01-B1*03:03L HLA-DRB1*15:03L
  source 1..10: note = Severe acute respiratory syndrome coronavirus 2
VTTTLEETKF

SEQ ID NO: 8531 - protein, 10 aa, Severe acute respiratory syndrome-related coronavirus
  REGION 1..10: note = Table B: HLA-DQA1*03:02-B1*03:03L HLA-DQA1*05:01-B1*03:01L HLA-DRB1*04:03L HLA-DRB1*01:03L HLA-DQA1*01:02-B1*06:02L HLA-DRB1*01:02L HLA-DPA1*01:03-B1*03:01L HLA-DPA1*03:01-B1*04:02L HLA-DRB1*14:01L HLA-DRB1*08:01L
  REGION 1..10: note = CONT. FROM ABOVE: HLA-DQA1*01-B1*05L HLA-DQA1*05:01-B1*02:01L HL A-DPA1*01:03-B1*04:01L HLA-DPA1*01:03-B1*04:02L HLA-DRB1*12:01L HLA-DPA1*03:01-B1*105:01L HLA-DQA1*03:01-B1*03:02L HLA-DPA1*01:0 3-B1*02:01L HLA-DPA1*01:02-B1*04:01M HLA-DRB1*16:01L
  REGION 1..10: note = CONT. FROM ABOVE: HLA-DQA1*01:03-B1*06:01L HLA-DRB1*04:08L HLA-D QA1*02:01-B1*03:03L HLA-DRB1*15:03L
  source 1..10: note = Severe acute respiratory syndrome coronavirus 2
LEETKFLTEN

SEQ ID NO: 8532 - protein, 10 aa, Severe acute respiratory syndrome-related coronavirus
  REGION 1..10: note = Table B: HLA-DQA1*03:02-B1*03:03M HLA-DQA1*05:01-B1*03:01L HLA-DRB1*13:03L HLA-DRB1*08:77L HLA-DPA1*03:01-B1*04:02L HLA-DRB1*11:02L HLA-DQA1*05:05-B1*03:19M HLA-DQA1*05:01-B1*02:01L HLA-DRB4*01:01L
  REGION 1..10: note = CONT. FROM ABOVE: HLA-DPA1*01:03-B1*04:01L HLA-DQA1*05:05-B1*03: 116L HLA-DRB1*09:01L HLA-DPA1*01:03-B1*04:02L HLA-DQA1*03:01-B1* 03:02M HLA-DPA1*01:03-B1*104:01M HLA-DPA1*01:02-B1*04:01L HLA-DR B1*16:01L HLA-DQA1*01:03-B1*06:01L HLA-DQA1*02:01-B1*03:03L
  REGION 1..10: note = CONT. FROM ABOVE: HLA-DRB1*15:03L
  source 1..10: note = Severe acute respiratory syndrome coronavirus 2
EETKFLTENL

SEQ ID NO: 8533 - protein, 10 aa, Severe acute respiratory syndrome-related coronavirus
  REGION 1..10: note = Table B: HLA-DQA1*03:02-B1*03:03L HLA-DQA1*01:02-B1*06:02L HLA-DQA1*01-B1*05L HLA-DQA1*05:01-B1*02:01L HLA-DPA1*03:01-B1*105:01L HLA-DQA1*03:01-B1*03:02L HLA-DPA1*01:02-B1*04:01L HLA-DQA1*01:03-B1*06:01L
  REGION 1..10: note = CONT. FROM ABOVE: HLA-DQA1*02:01-B1*03:03L HLA-DRB1*15:03L
  source 1..10: note = Severe acute respiratory syndrome coronavirus 2
ETKFLTENLL

SEQ ID NO: 8534 - protein, 10 aa, Severe acute respiratory syndrome-related coronavirus
  REGION 1..10: note = Table B: HLA-DQA1*03:02-B1*03:03L HLA-DQA1*05:01-B1*03:01L HLA-DRB1*04:03L HLA-DRB1*01:03L HLA-DRB1*04:05L HLA-DQA1*01:02-B1*06:02M HLA-DRB1*01:01L HLA-DRB1*08:77L HLA-DPA1*01:03-B1*03:01L HLA-DPA1*03:01-B1*04:02L
  REGION 1..10: note = CONT. FROM ABOVE: HLA-DRB1*03:01L HLA-DRB1*11:02L HLA-DRB1*14:02 L HLA-DQA1*01-B1*05L HLA-DQA1*05:05-B1*03:19M HLA-DQA1*05:01-B1* 02:01M HLA-DRB4*01:01M HLA-DPA1*01:03-B1*04:01M HLA-DQA1*05:05-B 1*03:116L HLA-DPA1*01:03-B1*04:02L HLA-DRB1*12:01L
  REGION 1..10: note = CONT. FROM ABOVE: HLA-DPA1*02:01-B1*13:01M HLA-DPA1*03:01-B1*105 :01L HLA-DPA1*01:03-B1*104:01L HLA-DQA1*05:05-B1*03:01L HLA-DPA1 *01:02-B1*04:01L HLA-DRB1*10:01L HLA-DRB1*16:01L HLA-DQA1*01:03- B1*06:01M HLA-DRB1*08:02L HLA-DQA1*02:01-B1*03:03L
  REGION 1..10: note = CONT. FROM ABOVE: HLA-DRB1*15:03L
  source 1..10: note = Severe acute respiratory syndrome coronavirus 2
KFLTENLLLY

SEQ ID NO: 8535 - protein, 10 aa, Severe acute respiratory syndrome-related coronavirus
  REGION 1..10: note = Table B: HLA-DQA1*03:02-B1*03:03L HLA-DRB1*04:03L HLA-DRB1*13:03L HLA-DRB1*01:03L HLA-DRB1*04:02L HLA-DRB1*04:05L HLA-DRB4*03:01NL HLA-DQA1*01-B1*05L HLA-DQA1*05:01-B1*02:01L HLA-DRB1*12:01L HLA-DQA1*03:01-B1*03:02L HLA-DRB1*14:54L
  REGION 1..10: note = CONT. FROM ABOVE: HLA-DRB1*14:17L HLA-DPA1*01:02-B1*04:01L HLA-D RB1*16:01L HLA-DQA1*02:01-B1*03:03L
  source 1..10: note = Severe acute respiratory syndrome coronavirus 2
IDINGNLHPD

SEQ ID NO: 8536 - protein, 12 aa, Severe acute respiratory syndrome-related coronavirus
  REGION 1..12: note = Table B: HLA-DQA1*03:02-B1*03:03L HLA-DRB1*04:02L HLA-DQA1*01:02-B1*06:02L HLA-DQA1*05:01-B1*02:01L HLA-DQA1*05:05-B1*03:01L HLA-DQA1*01:03-B1*06:01L
  source 1..12: note = Severe acute respiratory syndrome coronavirus 2
DINGNLHPDSAT

SEQ ID NO: 8537 - protein, 10 aa, Severe acute respiratory syndrome-related coronavirus
  REGION 1..10: note = Table B: HLA-DQA1*03:02-B1*03:03L HLA-DQA1*05:01-B1*03:01L HLA-DRB1*13:03L HLA-DRB1*04:02L HLA-DPA1*03:01-B1*04:02L HLA-DRB1*14:01L HLA-DRB1*08:01L HLA-DQA1*01-B1*05L HLA-DQA1*05:01-B1*02:01L HLA-DQA1*05:05-B1*03:116L
  REGION 1..10: note = CONT. FROM ABOVE: HLA-DQA1*03:01-B1*03:02L HLA-DPA1*01:02-B1*04: 01L HLA-DRB1*16:01L HLA-DQA1*02:01-B1*03:03L
  source 1..10: note = Severe acute respiratory syndrome coronavirus 2
GNLHPDSATL

SEQ ID NO: 8538 - protein, 10 aa, Severe acute respiratory syndrome-related coronavirus
  REGION 1..10: note = Table B: HLA-DQA1*03:02-B1*03:03L
  source 1..10: note = Severe acute respiratory syndrome coronavirus 2
NLHPDSATLV

SEQ ID NO: 8539 - protein, 12 aa, Severe acute respiratory syndrome-related coronavirus
  REGION 1..12: note = Table B: HLA-DQA1*03:02-B1*03:03L HLA-DQA1*05:01-B1*03:01L HLA-DRB1*04:03L HLA-DQA1*01:02-B1*06:02L HLA-DPA1*01:03-B1*03:01L HLA-DQA1*01:01-B1*05:01L HLA-DQA1*01-B1*05L HLA-DQA1*05:05-B1*03:19L
  REGION 1..12: note = CONT. FROM ABOVE: HLA-DQA1*05:01-B1*02:01L HLA-DPA1*03:01-B1*105 :01L HLA-DQA1*03:01-B1*03:02L HLA-DQA1*05:05-B1*03:01L HLA-DRB1* 16:01L HLA-DQA1*02:01-B1*03:03L
  source 1..12: note = Severe acute respiratory syndrome coronavirus 2
HPDSATLVSDID

SEQ ID NO: 8540 - protein, 12 aa, Severe acute respiratory syndrome-related coronavirus
  REGION 1..12: note = Table B: HLA-DQA1*03:02-B1*03:03L HLA-DQA1*03:01-B1*03:02L
  source 1..12: note = Severe acute respiratory syndrome coronavirus 2
DSATLVSDIDIT

SEQ ID NO: 8541 - protein, 10 aa, Severe acute respiratory syndrome-related coronavirus
  REGION 1..10: note = Table B: HLA-DQA1*03:02-B1*03:03L HLA-DQA1*01:02-B1*06:02L HLA-DRB1*14:02L HLA-DQA1*05:05-B1*03:19L HLA-DRB4*01:01L HLA-DPA1*02:01-B1*13:01L HLA-DPA1*03:01-B1*105:01L HLA-DQA1*01:03-B1*06:01L HLA-DQA1*02:01-B1*03:03L
  REGION 1..10: note = CONT. FROM ABOVE: HLA-DRB1*15:03L
  source 1..10: note = Severe acute respiratory syndrome coronavirus 2
TLVSDIDITF

SEQ ID NO: 8542 - protein, 10 aa, Severe acute respiratory syndrome-related coronavirus
  REGION 1..10: note = Table B: HLA-DQA1*03:02-B1*03:03L HLA-DPA1*03:01-B1*04:02L HLA-DRB1*14:02L HLA-DQA1*03:01-B1*03:02L HLA-DRB1*15:03L
  source 1..10: note = Severe acute respiratory syndrome coronavirus 2
LVSDIDITFL

SEQ ID NO: 8543 - protein, 13 aa, Severe acute respiratory syndrome-related coronavirus
  REGION 1..13: note = Table B: HLA-DQA1*03:02-B1*03:03L HLA-DRB1*04:03L HLA-DRB1*13:02L HLA-DRB1*04:05L HLA-DRB1*01:02L HLA-DRB3*02:01L HLA-DPA1*01:03-B1*03:01L HLA-DPA1*03:01-B1*04:02L HLA-DRB1*11:04L HLA-DRB1*14:02L HLA-DQA1*01:01-B1*05:01L
  REGION 1..13: note = CONT. FROM ABOVE: HLA-DRB1*11:01L HLA-DQA1*01-B1*05L HLA-DPA1*01 :03-B1*04:01L HLA-DPA1*01:03-B1*04:02L HLA-DRB3*01:01L HLA-DRB1* 14:54L HLA-DPA1*01:03-B1*104:01L HLA-DQA1*05:05-B1*03:01L HLA-DR B1*14:17L HLA-DRB1*08:03L
  source 1..13: note = Severe acute respiratory syndrome coronavirus 2
DIDITFLKKDAPY

SEQ ID NO: 8544 - protein, 13 aa, Severe acute respiratory syndrome-related coronavirus
  REGION 1..13: note = Table B: HLA-DQA1*03:02-B1*03:03L HLA-DRB1*01:01L HLA-DRB4*03:01NL HLA-DRB1*08:77L HLA-DRB3*02:01L HLA-DPA1*03:01-B1*04:02L HLA-DRB1*11:02L HLA-DRB1*11:03L HLA-DRB1*11:04L HLA-DRB1*11:01L HLA-DRB5*01:01L
  REGION 1..13: note = CONT. FROM ABOVE: HLA-DQA1*01-B1*05L HLA-DRB1*13:01L HLA-DRB4*01 :01L HLA-DPA1*01:03-B1*04:01L HLA-DRB1*04:10L HLA-DRB1*09:01L HL A-DPA1*01:03-B1*04:02L HLA-DRB1*12:02L HLA-DPA1*02:01-B1*13:01L HLA-DQA1*05:05-B1*03:01L HLA-DRB1*07:01L HLA-DRB1*10:01L
  REGION 1..13: note = CONT. FROM ABOVE: HLA-DRB1*08:03L
  source 1..13: note = Severe acute respiratory syndrome coronavirus 2
ITFLKKDAPYIVG

SEQ ID NO: 8545 - protein, 12 aa, Severe acute respiratory syndrome-related coronavirus
  REGION 1..12: note = Table B: HLA-DQA1*03:02-B1*03:03L HLA-DRB1*04:03L HLA-DQA1*05:01-B1*02:01L
  source 1..12: note = Severe acute respiratory syndrome coronavirus 2
DAPYIVGDVVQE

SEQ ID NO: 8546 - protein, 12 aa, Severe acute respiratory syndrome-related coronavirus
  REGION 1..12: note = Table B: HLA-DQA1*03:02-B1*03:03L HLA-DRB1*13:02L HLA-DRB1*13:03L HLA-DRB1*01:03L HLA-DRB1*04:02L HLA-DRB1*04:04L HLA-DRB1*04:05L HLA-DRB4*03:01NL HLA-DRB1*08:77L HLA-DRB1*11:04L HLA-DQA1*05:01-B1*02:01L HLA-DRB1*04:10L HLA-DRB1*12:01L
  REGION 1..12: note = CONT. FROM ABOVE: HLA-DRB1*12:02L HLA-DPA1*03:01-B1*105:01L HLA- DRB1*14:54L HLA-DRB1*10:01L HLA-DRB1*16:01L HLA-DRB1*04:08L HLA- DQA1*02:01-B1*03:03L
  source 1..12: note = Severe acute respiratory syndrome coronavirus 2
APYIVGDVVQEG

SEQ ID NO: 8547 - protein, 10 aa, Severe acute respiratory syndrome-related coronavirus
  REGION 1..10: note = Table B: HLA-DQA1*03:02-B1*03:03L
  source 1..10: note = Severe acute respiratory syndrome coronavirus 2
IVGDVVQEGV

SEQ ID NO: 8548 - protein, 10 aa, Severe acute respiratory syndrome-related coronavirus
  REGION 1..10: note = Table B: HLA-DQA1*03:02-B1*03:03L HLA-DRB1*13:03L HLA-DQA1*01:02-B1*06:02L HLA-DRB1*01:02L HLA-DQA1*05:01-B1*02:01L HLA-DPA1*03:01-B1*105:01L HLA-DQA1*03:01-B1*03:02L HLA-DPA1*01:02-B1*04:01L
  REGION 1..10: note = CONT. FROM ABOVE: HLA-DRB1*15:03L
  source 1..10: note = Severe acute respiratory syndrome coronavirus 2
DVVQEGVLTA

SEQ ID NO: 8549 - protein, 10 aa, Severe acute respiratory syndrome-related coronavirus
  REGION 1..10: note = Table B: HLA-DQA1*03:02-B1*03:03M HLA-DQA1*05:01-B1*03:01L HLA-DRB1*13:03L HLA-DQA1*01:02-B1*06:02L HLA-DRB1*01:02L HLA-DPA1*03:01-B1*04:02L HLA-DRB1*14:01L HLA-DRB1*14:02L HLA-DQA1*05:05-B1*03:19L HLA-DQA1*05:05-B1*03:116L
  REGION 1..10: note = CONT. FROM ABOVE: HLA-DRB1*09:01L HLA-DPA1*02:01-B1*13:01L HLA-D PA1*03:01-B1*105:01L HLA-DQA1*03:01-B1*03:02L HLA-DPA1*01:03-B1* 104:01L HLA-DPA1*01:02-B1*04:01L HLA-DRB1*10:01L HLA-DRB1*16:01L HLA-DRB1*08:03L HLA-DQA1*02:01-B1*03:03L HLA-DRB1*15:03L
  source 1..10: note = Severe acute respiratory syndrome coronavirus 2
VVQEGVLTAV

SEQ ID NO: 8550 - protein, 10 aa, Severe acute respiratory syndrome-related coronavirus
  REGION 1..10: note = Table B: HLA-DQA1*03:02-B1*03:03L HLA-DQA1*05:01-B1*03:01L HLA-DRB1*04:03L HLA-DRB1*13:02L HLA-DRB1*13:03L HLA-DRB1*01:03L HLA-DRB1*04:02L HLA-DQA1*01:02-B1*06:02L HLA-DRB1*01:02L HLA-DRB4*03:01NL HLA-DRB1*08:01L HLA-DQA1*05:05-B1*03:19L
  REGION 1..10: note = CONT. FROM ABOVE: HLA-DQA1*05:01-B1*02:01L HLA-DPA1*01:03-B1*04: 02L HLA-DRB1*12:01L HLA-DPA1*03:01-B1*105:01L HLA-DQA1*03:01-B1* 03:02L HLA-DQA1*05:05-B1*03:01M HLA-DRB1*14:17L HLA-DPA1*01:02-B 1*04:01L HLA-DRB1*16:01L HLA-DQA1*01:03-B1*06:01M
  REGION 1..10: note = CONT. FROM ABOVE: HLA-DRB1*04:08L HLA-DQA1*02:01-B1*03:03L
  source 1..10: note = Severe acute respiratory syndrome coronavirus 2
VLTAVVIPTK

SEQ ID NO: 8551 - protein, 12 aa, Severe acute respiratory syndrome-related coronavirus
  REGION 1..12: note = Table B: HLA-DQA1*03:02-B1*03:03L HLA-DQA1*05:01-B1*03:01L HLA-DRB1*13:02L HLA-DRB1*04:04L HLA-DRB1*04:05L HLA-DQA1*01:02-B1*06:02L HLA-DRB1*01:02L HLA-DRB1*08:04L HLA-DRB1*11:03L HLA-DRB1*14:02L HLA-DRB1*08:01L HLA-DRB1*11:01L
  REGION 1..12: note = CONT. FROM ABOVE: HLA-DQA1*05:05-B1*03:19L HLA-DRB1*04:10L HLA-D RB1*12:01L HLA-DRB3*01:01L HLA-DQA1*05:05-B1*03:01L HLA-DRB1*16: 01L HLA-DQA1*01:03-B1*06:01L HLA-DRB1*08:02L HLA-DRB1*08:03L HLA -DQA1*02:01-B1*03:03L HLA-DRB1*15:03L
  source 1..12: note = Severe acute respiratory syndrome coronavirus 2
VVIPTKKAGGTT

SEQ ID NO: 8552 - protein, 12 aa, Severe acute respiratory syndrome-related coronavirus
  REGION 1..12: note = Table B: HLA-DQA1*03:02-B1*03:03L HLA-DQA1*05:01-B1*03:01L HLA-DRB1*04:05L HLA-DQA1*01:02-B1*06:02L HLA-DRB1*01:02L HLA-DRB1*08:04L HLA-DRB1*08:01L HLA-DRB1*11:01L HLA-DQA1*05:05-B1*03:19L HLA-DRB1*12:01L
  REGION 1..12: note = CONT. FROM ABOVE: HLA-DQA1*05:05-B1*03:01L HLA-DRB1*16:01L HLA-D QA1*02:01-B1*03:03L
  source 1..12: note = Severe acute respiratory syndrome coronavirus 2
VIPTKKAGGTTE

SEQ ID NO: 8553 - protein, 11 aa, Severe acute respiratory syndrome-related coronavirus
  REGION 1..11: note = Table B: HLA-DQA1*03:02-B1*03:03L HLA-DQA1*05:01-B1*03:01L
  source 1..11: note = Severe acute respiratory syndrome coronavirus 2
AGGTTEMLAKA

SEQ ID NO: 8554 - protein, 10 aa, Severe acute respiratory syndrome-related coronavirus
  REGION 1..10: note = Table B: HLA-DQA1*03:02-B1*03:03L HLA-DQA1*05:01-B1*03:01L HLA-DQA1*01:02-B1*06:02L HLA-DQA1*05:05-B1*03:19L HLA-DQA1*05:01-B1*02:01L HLA-DPA1*03:01-B1*105:01L HLA-DQA1*03:01-B1*03:02L HLA-DPA1*01:03-B1*104:01L
  REGION 1..10: note = CONT. FROM ABOVE: HLA-DPA1*01:02-B1*04:01L HLA-DQA1*01:03-B1*06: 01L HLA-DQA1*02:01-B1*03:03L
  source 1..10: note = Severe acute respiratory syndrome coronavirus 2
GTTEMLAKAL

SEQ ID NO: 8555 - protein, 10 aa, Severe acute respiratory syndrome-related coronavirus
  REGION 1..10: note = Table B: HLA-DQA1*03:02-B1*03:03L HLA-DRB1*04:03L HLA-DRB1*04:02L HLA-DRB1*04:05L HLA-DRB4*03:01NL HLA-DQA1*01-B1*05L HLA-DQA1*05:01-B1*02:01L HLA-DRB1*04:10L HLA-DQA1*03:01-B1*03:02L HLA-DRB1*14:54L HLA-DRB1*14:17L
  REGION 1..10: note = CONT. FROM ABOVE: HLA-DRB1*16:01L HLA-DRB1*04:08L HLA-DQA1*02:01 -B1*03:03L
  source 1..10: note = Severe acute respiratory syndrome coronavirus 2
NYITTYPGQG

SEQ ID NO: 8556 - protein, 10 aa, Severe acute respiratory syndrome-related coronavirus
  REGION 1..10: note = Table B: HLA-DQA1*03:02-B1*03:03L HLA-DQA1*05:01-B1*03:01L HLA-DRB1*04:03L HLA-DRB1*04:02L HLA-DQA1*01:02-B1*06:02L HLA-DRB1*01:02L HLA-DRB3*02:01L HLA-DPA1*03:01-B1*04:02L HLA-DQA1*01-B1*05L HLA-DQA1*05:05-B1*03:19L
  REGION 1..10: note = CONT. FROM ABOVE: HLA-DQA1*05:01-B1*02:01L HLA-DRB1*12:01L HLA-D PA1*03:01-B1*105:01L HLA-DQA1*03:01-B1*03:02L HLA-DPA1*01:02-B1* 04:01L HLA-DRB1*16:01L HLA-DQA1*01:03-B1*06:01L HLA-DQA1*02:01-B 1*03:03L HLA-DRB1*15:03L
  source 1..10: note = Severe acute respiratory syndrome coronavirus 2
YITTYPGQGL

SEQ ID NO: 8557 - protein, 10 aa, Severe acute respiratory syndrome-related coronavirus
  REGION 1..10: note = Table B: HLA-DQA1*03:02-B1*03:03L HLA-DQA1*05:01-B1*03:01L HLA-DRB1*04:03L HLA-DRB1*13:03L HLA-DRB1*01:03L HLA-DRB1*04:02L HLA-DQA1*01:02-B1*06:02L HLA-DRB1*01:02L HLA-DRB3*02:01L HLA-DRB1*14:01L HLA-DQA1*01-B1*05L HLA-DQA1*05:05-B1*03:19L
  REGION 1..10: note = CONT. FROM ABOVE: HLA-DQA1*05:01-B1*02:01L HLA-DRB1*12:01L HLA-D PA1*03:01-B1*105:01L HLA-DQA1*03:01-B1*03:02L HLA-DQA1*05:05-B1* 03:01L HLA-DRB1*14:17L HLA-DRB1*16:01L HLA-DQA1*01:03-B1*06:01L HLA-DRB1*04:08L HLA-DQA1*02:01-B1*03:03L HLA-DRB1*15:01L
  REGION 1..10: note = CONT. FROM ABOVE: HLA-DRB1*15:03L
  source 1..10: note = Severe acute respiratory syndrome coronavirus 2
ITTYPGQGLN

SEQ ID NO: 8558 - protein, 10 aa, Severe acute respiratory syndrome-related coronavirus
  REGION 1..10: note = Table B: HLA-DQA1*03:02-B1*03:03L HLA-DQA1*05:01-B1*03:01L HLA-DRB1*04:01L HLA-DRB1*04:03L HLA-DRB1*13:02L HLA-DRB1*13:03L HLA-DRB1*01:03L HLA-DRB1*04:05L HLA-DQA1*01:02-B1*06:02M HLA-DRB1*01:01L HLA-DRB4*03:01NL HLA-DRB1*08:77L
  REGION 1..10: note = CONT. FROM ABOVE: HLA-DPA1*01:03-B1*03:01L HLA-DPA1*03:01-B1*04: 02L HLA-DRB1*03:01L HLA-DRB1*14:01L HLA-DRB1*11:02L HLA-DRB1*11: 03L HLA-DRB1*14:02M HLA-DRB1*11:01L HLA-DQA1*01-B1*05L HLA-DQA1* 05:05-B1*03:19M HLA-DQA1*05:01-B1*02:01L HLA-DRB4*01:01L
  REGION 1..10: note = CONT. FROM ABOVE: HLA-DPA1*01:03-B1*04:01M HLA-DQA1*05:05-B1*03: 116L HLA-DPA1*01:03-B1*04:02L HLA-DRB1*12:01L HLA-DPA1*02:01-B1* 13:01M HLA-DPA1*03:01-B1*105:01M HLA-DPA1*01:03-B1*104:01L HLA-D QA1*05:05-B1*03:01L HLA-DPA1*01:02-B1*04:01L HLA-DRB1*10:01L
  REGION 1..10: note = CONT. FROM ABOVE: HLA-DRB1*16:01L HLA-DQA1*01:03-B1*06:01L HLA-D RB1*08:02L HLA-DRB1*08:03L HLA-DQA1*02:01-B1*03:03L HLA-DRB1*15: 03L
  source 1..10: note = Severe acute respiratory syndrome coronavirus 2
TYPGQGLNGY

SEQ ID NO: 8559 - protein, 13 aa, Severe acute respiratory syndrome-related coronavirus
  REGION 1..13: note = Table B: HLA-DQA1*03:02-B1*03:03L HLA-DQA1*05:01-B1*03:01L HLA-DQA1*05:05-B1*03:19L HLA-DQA1*03:01-B1*03:02L HLA-DQA1*02:01-B1*03:03L
  source 1..13: note = Severe acute respiratory syndrome coronavirus 2
YPGQGLNGYTVEE

SEQ ID NO: 8560 - protein, 10 aa, Severe acute respiratory syndrome-related coronavirus
  REGION 1..10: note = Table B: HLA-DQA1*03:02-B1*03:03L HLA-DRB1*04:03L HLA-DRB1*04:02L HLA-DQA1*01-B1*05L HLA-DQA1*05:01-B1*02:01L HLA-DQA1*03:01-B1*03:02L HLA-DQA1*01:03-B1*06:01L HLA-DQA1*02:01-B1*03:03L
  source 1..10: note = Severe acute respiratory syndrome coronavirus 2
NGYTVEEAKT

SEQ ID NO: 8561 - protein, 10 aa, Severe acute respiratory syndrome-related coronavirus
  REGION 1..10: note = Table B: HLA-DQA1*03:02-B1*03:03L HLA-DQA1*01-B1*05L HLA-DQA1*05:05-B1*03:19L HLA-DQA1*05:01-B1*02:01L HLA-DPA1*02:01-B1*13:01L HLA-DQA1*03:01-B1*03:02L HLA-DRB1*16:01L HLA-DQA1*01:03-B1*06:01L
  REGION 1..10: note = CONT. FROM ABOVE: HLA-DQA1*02:01-B1*03:03L HLA-DRB1*15:03L
  source 1..10: note = Severe acute respiratory syndrome coronavirus 2
GYTVEEAKTV

SEQ ID NO: 8562 - protein, 10 aa, Severe acute respiratory syndrome-related coronavirus
  REGION 1..10: note = Table B: HLA-DQA1*03:02-B1*03:03M HLA-DQA1*05:01-B1*03:01L HLA-DRB1*04:01L HLA-DRB1*04:03L HLA-DRB1*13:02L HLA-DRB1*13:03L HLA-DRB1*01:03L HLA-DRB1*04:02L HLA-DRB1*04:05L HLA-DQA1*01:02-B1*06:02L HLA-DRB1*01:01L HLA-DRB1*01:02L
  REGION 1..10: note = CONT. FROM ABOVE: HLA-DRB4*03:01NL HLA-DRB1*08:77L HLA-DRB3*02:0 1L HLA-DPA1*01:03-B1*03:01L HLA-DPA1*03:01-B1*04:02L HLA-DRB1*14 :01L HLA-DRB1*14:02L HLA-DRB1*08:01L HLA-DRB1*11:01L HLA-DQA1*01 -B1*05L HLA-DQA1*05:05-B1*03:19L HLA-DQA1*05:01-B1*02:01L
  REGION 1..10: note = CONT. FROM ABOVE: HLA-DRB4*01:01L HLA-DPA1*01:03-B1*04:01L HLA-D QA1*05:05-B1*03:116L HLA-DRB1*09:01L HLA-DPA1*01:03-B1*04:02L HL A-DRB1*12:01L HLA-DPA1*02:01-B1*13:01L HLA-DPA1*03:01-B1*105:01L HLA-DQA1*03:01-B1*03:02M HLA-DPA1*01:03-B1*104:01L
  REGION 1..10: note = CONT. FROM ABOVE: HLA-DQA1*05:05-B1*03:01L HLA-DPA1*01:02-B1*04: 01L HLA-DRB1*07:01L HLA-DRB1*10:01L HLA-DRB1*16:01L HLA-DQA1*01: 03-B1*06:01L HLA-DRB1*08:03L HLA-DQA1*02:01-B1*03:03M HLA-DRB1*1 5:03M
  source 1..10: note = Severe acute respiratory syndrome coronavirus 2
YTVEEAKTVL

SEQ ID NO: 8563 - protein, 12 aa, Severe acute respiratory syndrome-related coronavirus
  REGION 1..12: note = Table B: HLA-DQA1*03:02-B1*03:03L HLA-DRB1*13:03L HLA-DRB1*01:03L HLA-DRB1*04:02L HLA-DRB1*04:04L HLA-DQA1*01:02-B1*06:02L HLA-DRB1*01:02L HLA-DRB4*03:01NL HLA-DPA1*01:03-B1*03:01L HLA-DPA1*03:01-B1*04:02L
  REGION 1..12: note = CONT. FROM ABOVE: HLA-DRB1*14:01L HLA-DRB1*08:01L HLA-DQA1*05:01 -B1*02:01L HLA-DRB1*04:10L HLA-DRB1*12:01L HLA-DRB1*12:02L HLA-D PA1*02:01-B1*13:01L HLA-DPA1*03:01-B1*105:01L HLA-DQA1*03:01-B1* 03:02L HLA-DRB1*14:54L HLA-DRB1*10:01L HLA-DRB1*16:01L
  REGION 1..12: note = CONT. FROM ABOVE: HLA-DRB1*04:08L HLA-DQA1*02:01-B1*03:03L HLA-D RB1*15:03L
  source 1..12: note = Severe acute respiratory syndrome coronavirus 2
KSAFYILPSIIS

SEQ ID NO: 8564 - protein, 10 aa, Severe acute respiratory syndrome-related coronavirus
  REGION 1..10: note = Table B: HLA-DQA1*03:02-B1*03:03L HLA-DRB1*04:03L HLA-DRB1*13:03L HLA-DRB1*01:03L HLA-DRB1*04:02L HLA-DRB1*04:05L HLA-DRB1*01:02L HLA-DRB4*03:01NL HLA-DQA1*01-B1*05L HLA-DQA1*05:01-B1*02:01L HLA-DRB1*04:10L HLA-DRB1*12:01L
  REGION 1..10: note = CONT. FROM ABOVE: HLA-DPA1*03:01-B1*105:01L HLA-DQA1*03:01-B1*03 :02L HLA-DRB1*14:54L HLA-DQA1*05:05-B1*03:01L HLA-DRB1*14:17L HL A-DRB1*10:01L HLA-DRB1*16:01L HLA-DRB1*04:08L HLA-DQA1*02:01-B1* 03:03L HLA-DRB1*15:03L
  source 1..10: note = Severe acute respiratory syndrome coronavirus 2
FYILPSIISN

SEQ ID NO: 8565 - protein, 11 aa, Severe acute respiratory syndrome-related coronavirus
  REGION 1..11: note = Table B: HLA-DQA1*03:02-B1*03:03L HLA-DQA1*05:01-B1*03:01L HLA-DRB1*13:03L HLA-DRB1*01:03L HLA-DRB1*04:05L HLA-DQA1*01:02-B1*06:02L HLA-DRB1*01:02L HLA-DRB4*03:01NL HLA-DRB1*12:01L HLA-DPA1*03:01-B1*105:01L
  REGION 1..11: note = CONT. FROM ABOVE: HLA-DPA1*01:02-B1*04:01L HLA-DRB1*16:01L HLA-D RB1*04:08L
  source 1..11: note = Severe acute respiratory syndrome coronavirus 2
YILPSIISNEK

SEQ ID NO: 8566 - protein, 11 aa, Severe acute respiratory syndrome-related coronavirus
  REGION 1..11: note = Table B: HLA-DQA1*03:02-B1*03:03L HLA-DQA1*01:02-B1*06:02L HLA-DQA1*05:01-B1*02:01L
  source 1..11: note = Severe acute respiratory syndrome coronavirus 2
ILPSIISNEKQ

SEQ ID NO: 8567 - protein, 10 aa, Severe acute respiratory syndrome-related coronavirus
  REGION 1..10: note = Table B: HLA-DQA1*03:02-B1*03:03L HLA-DRB1*04:03L HLA-DRB1*04:02L HLA-DQA1*05:01-B1*02:01L HLA-DQA1*03:01-B1*03:02L HLA-DRB1*14:17L HLA-DQA1*01:03-B1*06:01L HLA-DQA1*02:01-B1*03:03L
  source 1..10: note = Severe acute respiratory syndrome coronavirus 2
PSIISNEKQE

SEQ ID NO: 8568 - protein, 10 aa, Severe acute respiratory syndrome-related coronavirus
  REGION 1..10: note = Table B: HLA-DQA1*03:02-B1*03:03L HLA-DQA1*05:05-B1*03:19L HLA-DPA1*01:03-B1*104:01L
  source 1..10: note = Severe acute respiratory syndrome coronavirus 2
SIISNEKQEI

SEQ ID NO: 8569 - protein, 10 aa, Severe acute respiratory syndrome-related coronavirus
  REGION 1..10: note = Table B: HLA-DQA1*03:02-B1*03:03L HLA-DQA1*05:01-B1*03:01L HLA-DRB1*04:03L HLA-DRB1*04:02L HLA-DRB3*02:01L HLA-DPA1*03:01-B1*04:02L HLA-DRB1*14:01L HLA-DQA1*05:01-B1*02:01L HLA-DRB1*12:01L
  REGION 1..10: note = CONT. FROM ABOVE: HLA-DQA1*03:01-B1*03:02L HLA-DRB1*14:54L HLA-D PA1*01:02-B1*04:01L HLA-DRB1*16:01L HLA-DQA1*02:01-B1*03:03L HLA -DRB1*15:03L
  source 1..10: note = Severe acute respiratory syndrome coronavirus 2
IISNEKQEIL

SEQ ID NO: 8570 - protein, 10 aa, Severe acute respiratory syndrome-related coronavirus
  REGION 1..10: note = Table B: HLA-DQA1*03:02-B1*03:03M HLA-DRB1*11:02L HLA-DQA1*05:05-B1*03:19M HLA-DRB1*09:01L HLA-DQA1*03:01-B1*03:02L HLA-DPA1*01:03-B1*104:01L
  source 1..10: note = Severe acute respiratory syndrome coronavirus 2
NEKQEILGTV

SEQ ID NO: 8571 - protein, 10 aa, Severe acute respiratory syndrome-related coronavirus
  REGION 1..10: note = Table B: HLA-DQA1*03:02-B1*03:03L HLA-DQA1*01:02-B1*06:02L HLA-DRB1*09:01L HLA-DPA1*03:01-B1*105:01L HLA-DQA1*02:01-B1*03:03L HLA-DRB1*15:03L
  source 1..10: note = Severe acute respiratory syndrome coronavirus 2
EILGTVSWNL

SEQ ID NO: 8572 - protein, 10 aa, Severe acute respiratory syndrome-related coronavirus
  REGION 1..10: note = Table B: HLA-DQA1*03:02-B1*03:03L HLA-DQA1*05:01-B1*03:01L HLA-DQA1*01:02-B1*06:02L HLA-DQA1*05:05-B1*03:19L HLA-DQA1*05:01-B1*02:01L HLA-DPA1*03:01-B1*105:01L HLA-DQA1*03:01-B1*03:02L HLA-DPA1*01:02-B1*04:01L
  REGION 1..10: note = CONT. FROM ABOVE: HLA-DQA1*01:03-B1*06:01L HLA-DQA1*02:01-B1*03: 03L
  source 1..10: note = Severe acute respiratory syndrome coronavirus 2
GTVSWNLREM

SEQ ID NO: 8573 - protein, 10 aa, Severe acute respiratory syndrome-related coronavirus
  REGION 1..10: note = Table B: HLA-DQA1*03:02-B1*03:03L HLA-DQA1*05:05-B1*03:19L
  source 1..10: note = Severe acute respiratory syndrome coronavirus 2
AEETRKLMPV

SEQ ID NO: 8574 - protein, 10 aa, Severe acute respiratory syndrome-related coronavirus
  REGION 1..10: note = Table B: HLA-DQA1*03:02-B1*03:03M HLA-DQA1*05:01-B1*03:01L HLA-DRB1*08:77L HLA-DRB1*11:02M HLA-DQA1*05:05-B1*03:19H HLA-DQA1*05:01-B1*02:01L HLA-DRB4*01:01L HLA-DPA1*01:03-B1*04:01L HLA-DQA1*05:05-B1*03:116L
  REGION 1..10: note = CONT. FROM ABOVE: HLA-DRB1*09:01L HLA-DQA1*03:01-B1*03:02L HLA-D PA1*01:03-B1*104:01M HLA-DRB1*10:01L HLA-DRB1*16:01L HLA-DQA1*01 :03-B1*06:01L HLA-DQA1*02:01-B1*03:03L HLA-DRB1*15:03L
  source 1..10: note = Severe acute respiratory syndrome coronavirus 2
VETKAIVSTI

SEQ ID NO: 8575 - protein, 10 aa, Severe acute respiratory syndrome-related coronavirus
  REGION 1..10: note = Table B: HLA-DQA1*03:02-B1*03:03L HLA-DQA1*05:01-B1*03:01L HLA-DRB1*04:01L HLA-DRB1*04:03L HLA-DRB1*13:02L HLA-DRB1*13:03L HLA-DRB1*01:03L HLA-DRB1*04:02L HLA-DRB1*04:05L HLA-DQA1*01:02-B1*06:02M HLA-DRB1*01:01L HLA-DRB1*01:02L
  REGION 1..10: note = CONT. FROM ABOVE: HLA-DRB4*03:01NL HLA-DRB1*08:77L HLA-DRB3*02:0 1L HLA-DPA1*01:03-B1*03:01L HLA-DPA1*03:01-B1*04:02L HLA-DRB1*03 :01L HLA-DRB1*14:01L HLA-DRB1*11:02L HLA-DRB1*11:03L HLA-DRB1*11 :04L HLA-DRB1*14:02M HLA-DRB1*08:01L HLA-DRB1*11:01L
  REGION 1..10: note = CONT. FROM ABOVE: HLA-DQA1*01-B1*05L HLA-DQA1*05:05-B1*03:19L HL A-DQA1*05:01-B1*02:01M HLA-DRB4*01:01L HLA-DPA1*01:03-B1*04:01M HLA-DQA1*05:05-B1*03:116L HLA-DPA1*01:03-B1*04:02L HLA-DRB1*12:0 1L HLA-DRB1*12:02L HLA-DPA1*02:01-B1*13:01L
  REGION 1..10: note = CONT. FROM ABOVE: HLA-DPA1*03:01-B1*105:01L HLA-DQA1*03:01-B1*03 :02L HLA-DRB1*14:54L HLA-DPA1*01:03-B1*104:01L HLA-DQA1*05:05-B1 *03:01L HLA-DRB1*14:17L HLA-DPA1*01:02-B1*04:01L HLA-DRB1*07:01L HLA-DRB1*10:01L HLA-DRB1*16:01L HLA-DQA1*01:03-B1*06:01L
  REGION 1..10: note = CONT. FROM ABOVE: HLA-DRB1*08:02L HLA-DQA1*02:01-B1*03:03M HLA -DRB1*15:03L
  source 1..10: note = Severe acute respiratory syndrome coronavirus 2
AIVSTIQRKY

SEQ ID NO: 8576 - protein, 10 aa, Severe acute respiratory syndrome-related coronavirus
  REGION 1..10: note = Table B: HLA-DQA1*03:02-B1*03:03L HLA-DQA1*05:01-B1*03:01L HLA-DRB1*04:03L HLA-DRB1*04:02L HLA-DQA1*01:02-B1*06:02L HLA-DQA1*05:01-B1*02:01L HLA-DPA1*03:01-B1*105:01L HLA-DQA1*03:01-B1*03:02L HLA-DQA1*05:05-B1*03:01L
  REGION 1..10: note = CONT. FROM ABOVE: HLA-DQA1*01:03-B1*06:01L HLA-DQA1*02:01-B1*03: 03L
  source 1..10: note = Severe acute respiratory syndrome coronavirus 2
GIKIQEGVVD

SEQ ID NO: 8577 - protein, 11 aa, Severe acute respiratory syndrome-related coronavirus
  REGION 1..11: note = Table B: HLA-DQA1*03:02-B1*03:03L HLA-DRB1*04:03L HLA-DRB1*04:02L HLA-DRB1*04:05L HLA-DRB1*01:02L HLA-DRB4*03:01NL HLA-DRB1*14:01L HLA-DQA1*01-B1*05L HLA-DRB1*04:10L HLA-DRB1*12:01L HLA-DPA1*03:01-B1*105:01L
  REGION 1..11: note = CONT. FROM ABOVE: HLA-DQA1*03:01-B1*03:02L HLA-DRB1*14:54L HLA-D RB1*14:17L HLA-DRB1*04:08L HLA-DRB1*15:03L
  source 1..11: note = Severe acute respiratory syndrome coronavirus 2
IKIQEGVVDYG

SEQ ID NO: 8578 - protein, 10 aa, Severe acute respiratory syndrome-related coronavirus
  REGION 1..10: note = Table B: HLA-DQA1*03:02-B1*03:03L HLA-DQA1*03:01-B1*03:02L HLA-DQA1*01:03-B1*06:01L HLA-DQA1*02:01-B1*03:03L
  source 1..10: note = Severe acute respiratory syndrome coronavirus 2
QEGVVDYGAR

SEQ ID NO: 8579 - protein, 10 aa, Severe acute respiratory syndrome-related coronavirus
  REGION 1..10: note = Table B: HLA-DQA1*03:02-B1*03:03L HLA-DQA1*05:01-B1*03:01L HLA-DQA1*01:02-B1*06:02L HLA-DQA1*05:05-B1*03:19L HLA-DQA1*05:01-B1*02:01L HLA-DPA1*03:01-B1*105:01L HLA-DQA1*03:01-B1*03:02L HLA-DPA1*01:02-B1*04:01L
  REGION 1..10: note = CONT. FROM ABOVE: HLA-DQA1*01:03-B1*06:01L HLA-DQA1*02:01-B1*03: 03L HLA-DRB1*15:03L
  source 1..10: note = Severe acute respiratory syndrome coronavirus 2
EGVVDYGARF

SEQ ID NO: 8580 - protein, 10 aa, Severe acute respiratory syndrome-related coronavirus
  REGION 1..10: note = Table B: HLA-DQA1*03:02-B1*03:03L HLA-DQA1*05:01-B1*03:01M HLA-DRB1*04:01L HLA-DRB1*04:03L HLA-DRB1*13:02L HLA-DRB1*13:03M HLA-DRB1*01:03M HLA-DRB1*04:02L HLA-DRB1*04:05L HLA-DQA1*01:02-B1*06:02M HLA-DRB1*01:01L HLA-DRB4*03:01NL
  REGION 1..10: note = CONT. FROM ABOVE: HLA-DRB1*08:77M HLA-DPA1*01:03-B1*03:01M HLA-D PA1*03:01-B1*04:02L HLA-DRB1*03:01M HLA-DRB1*14:01L HLA-DRB1*11: 02L HLA-DRB1*11:03L HLA-DRB1*11:04L HLA-DRB1*14:02M HLA-DRB1*11: 01L HLA-DRB5*01:01L HLA-DQA1*01-B1*05M HLA-DQA1*05:05-B1*03:19M
  REGION 1..10: note = CONT. FROM ABOVE: HLA-DQA1*05:01-B1*02:01M HLA-DRB4*01:01M HLA-D PA1*01:03-B1*04:01M HLA-DQA1*05:05-B1*03:116L HLA-DRB1*09:01L HL A-DPA1*01:03-B1*04:02M HLA-DRB1*12:01L HLA-DRB1*12:02L HLA-DPA1* 02:01-B1*13:01L HLA-DPA1*03:01-B1*105:01M
  REGION 1..10: note = CONT. FROM ABOVE: HLA-DQA1*03:01-B1*03:02L HLA-DRB1*14:54L HLA-D PA1*01:03-B1*104:01M HLA-DQA1*05:05-B1*03:01L HLA-DRB1*14:17L HL A-DPA1*01:02-B1*04:01L HLA-DRB1*10:01M HLA-DRB1*16:01M HLA-DQA1* 01:03-B1*06:01L HLA-DRB1*08:02M HLA-DRB1*08:03L
  REGION 1..10: note = CONT. FROM ABOVE: HLA-DQA1*02:01-B1*03:03M HLA-DRB1*15:01L HLA -DRB1*15:03M
  source 1..10: note = Severe acute respiratory syndrome coronavirus 2
GVVDYGARFY

SEQ ID NO: 8581 - protein, 10 aa, Severe acute respiratory syndrome-related coronavirus
  REGION 1..10: note = Table B: HLA-DQA1*03:02-B1*03:03L HLA-DRB1*04:05L HLA-DQA1*01:02-B1*06:02L HLA-DRB1*01:02L HLA-DRB1*11:02L HLA-DQA1*05:05-B1*03:19L HLA-DQA1*05:05-B1*03:116L HLA-DPA1*02:01-B1*13:01L HLA-DPA1*03:01-B1*105:01L
  REGION 1..10: note = CONT. FROM ABOVE: HLA-DPA1*01:03-B1*104:01L HLA-DRB1*16:01L HLA- DQA1*01:03-B1*06:01L HLA-DQA1*02:01-B1*03:03L HLA-DRB1*15:03L
  source 1..10: note = Severe acute respiratory syndrome coronavirus 2
FYFYTSKTTV

SEQ ID NO: 8582 - protein, 10 aa, Severe acute respiratory syndrome-related coronavirus
  REGION 1..10: note = Table B: HLA-DQA1*03:02-B1*03:03L HLA-DQA1*05:01-B1*03:01L HLA-DRB1*04:03L HLA-DRB1*13:03L HLA-DRB1*01:03L HLA-DRB1*04:02L HLA-DRB1*04:05L HLA-DRB1*01:02L HLA-DRB4*03:01NL HLA-DQA1*01-B1*05L HLA-DQA1*05:01-B1*02:01L HLA-DRB1*04:10L
  REGION 1..10: note = CONT. FROM ABOVE: HLA-DRB1*12:01L HLA-DPA1*03:01-B1*105:01L HLA- DQA1*03:01-B1*03:02L HLA-DRB1*14:54L HLA-DRB1*14:17L HLA-DPA1*01 :02-B1*04:01L HLA-DRB1*16:01L HLA-DRB1*04:08L HLA-DQA1*02:01-B1* 03:03L HLA-DRB1*15:03L
  source 1..10: note = Severe acute respiratory syndrome coronavirus 2
FYTSKTTVAS

SEQ ID NO: 8583 - protein, 10 aa, Severe acute respiratory syndrome-related coronavirus
  REGION 1..10: note = Table B: HLA-DQA1*03:02-B1*03:03L HLA-DQA1*05:01-B1*03:01L HLA-DRB1*13:02L HLA-DRB1*13:03L HLA-DRB1*01:03L HLA-DRB1*04:02L HLA-DQA1*01:02-B1*06:02L HLA-DRB1*01:02L HLA-DRB1*08:77L HLA-DPA1*01:03-B1*03:01L HLA-DPA1*03:01-B1*04:02L
  REGION 1..10: note = CONT. FROM ABOVE: HLA-DRB1*14:01L HLA-DRB1*14:02L HLA-DRB1*08:01 L HLA-DRB5*01:01L HLA-DQA1*01-B1*05L HLA-DQA1*05:05-B1*03:19L HL A-DQA1*05:01-B1*02:01L HLA-DPA1*01:03-B1*04:01L HLA-DQA1*05:05-B 1*03:116L HLA-DRB1*09:01L HLA-DPA1*01:03-B1*04:02L
  REGION 1..10: note = CONT. FROM ABOVE: HLA-DPA1*03:01-B1*105:01L HLA-DQA1*03:01-B1*03 :02L HLA-DPA1*01:02-B1*04:01L HLA-DRB1*10:01L HLA-DRB1*16:01L HL A-DQA1*02:01-B1*03:03L HLA-DRB1*15:03L
  source 1..10: note = Severe acute respiratory syndrome coronavirus 2
YTSKTTVASL

SEQ ID NO: 8584 - protein, 11 aa, Severe acute respiratory syndrome-related coronavirus
  REGION 1..11: note = Table B: HLA-DQA1*03:02-B1*03:03L HLA-DQA1*05:01-B1*02:01L HLA-DQA1*03:01-B1*03:02L HLA-DQA1*02:01-B1*03:03L
  source 1..11: note = Severe acute respiratory syndrome coronavirus 2
TSKTTVASLIN

SEQ ID NO: 8585 - protein, 10 aa, Severe acute respiratory syndrome-related coronavirus
  REGION 1..10: note = Table B: HLA-DQA1*03:02-B1*03:03M HLA-DQA1*05:01-B1*03:01L HLA-DRB1*13:03L HLA-DQA1*01:02-B1*06:02L HLA-DRB1*01:02L HLA-DPA1*03:01-B1*04:02L HLA-DRB1*14:01L HLA-DRB1*14:02L HLA-DRB1*08:01L HLA-DQA1*05:05-B1*03:19L
  REGION 1..10: note = CONT. FROM ABOVE: HLA-DQA1*05:01-B1*02:01L HLA-DPA1*01:03-B1*04: 01L HLA-DQA1*05:05-B1*03:116L HLA-DRB1*09:01L HLA-DPA1*01:03-B1* 04:02L HLA-DRB1*12:01L HLA-DPA1*03:01-B1*105:01M HLA-DQA1*03:01- B1*03:02L HLA-DPA1*01:02-B1*04:01L HLA-DQA1*01:03-B1*06:01L
  REGION 1..10: note = CONT. FROM ABOVE: HLA-DRB1*08:03L HLA-DQA1*02:01-B1*03:03L HLA-D RB1*15:03L
  source 1..10: note = Severe acute respiratory syndrome coronavirus 2
TTVASLINTL

SEQ ID NO: 8586 - protein, 12 aa, Severe acute respiratory syndrome-related coronavirus
  REGION 1..12: note = Table B: HLA-DQA1*03:02-B1*03:03L HLA-DQA1*05:01-B1*03:01L HLA-DRB1*04:03L HLA-DRB1*04:02L HLA-DQA1*01:02-B1*06:02L HLA-DQA1*01-B1*05L HLA-DQA1*05:05-B1*03:19L HLA-DQA1*05:01-B1*02:01L HLA-DPA1*03:01-B1*105:01L
  REGION 1..12: note = CONT. FROM ABOVE: HLA-DQA1*03:01-B1*03:02L HLA-DQA1*05:05-B1*03: 01L HLA-DRB1*14:17L HLA-DQA1*01:03-B1*06:01L HLA-DQA1*02:01-B1*0 3:03L
  source 1..12: note = Severe acute respiratory syndrome coronavirus 2
VASLINTLNDLN

SEQ ID NO: 8587 - protein, 11 aa, Severe acute respiratory syndrome-related coronavirus
  REGION 1..11: note = Table B: HLA-DQA1*03:02-B1*03:03L HLA-DRB1*13:03L HLA-DRB1*01:03L HLA-DRB1*04:04L HLA-DRB1*12:01L HLA-DQA1*01:03-B1*06:01L HLA-DRB1*04:08L HLA-DQA1*02:01-B1*03:03L
  source 1..11: note = Severe acute respiratory syndrome coronavirus 2
LINTLNDLNET

SEQ ID NO: 8588 - protein, 10 aa, Severe acute respiratory syndrome-related coronavirus
  REGION 1..10: note = Table B: HLA-DQA1*03:02-B1*03:03M HLA-DQA1*05:01-B1*03:01L HLA-DRB1*13:03L HLA-DQA1*01:02-B1*06:02L HLA-DPA1*03:01-B1*04:02L HLA-DRB1*14:01L HLA-DRB1*14:02L HLA-DQA1*05:05-B1*03:19L HLA-DQA1*05:01-B1*02:01L
  REGION 1..10: note = CONT. FROM ABOVE: HLA-DQA1*05:05-B1*03:116L HLA-DRB1*09:01L HLA- DPA1*03:01-B1*105:01L HLA-DQA1*03:01-B1*03:02L HLA-DPA1*01:02-B1 *04:01L HLA-DRB1*08:03L HLA-DQA1*02:01-B1*03:03L HLA-DRB1*15:03L
  source 1..10: note = Severe acute respiratory syndrome coronavirus 2
NTLNDLNETL

SEQ ID NO: 8589 - protein, 10 aa, Severe acute respiratory syndrome-related coronavirus
  REGION 1..10: note = Table B: HLA-DQA1*03:02-B1*03:03L
  source 1..10: note = Severe acute respiratory syndrome coronavirus 2
TLNDLNETLV

SEQ ID NO: 8590 - protein, 10 aa, Severe acute respiratory syndrome-related coronavirus
  REGION 1..10: note = Table B: HLA-DQA1*03:02-B1*03:03L HLA-DQA1*05:01-B1*03:01L HLA-DRB1*13:03M HLA-DRB1*01:03L HLA-DQA1*01:02-B1*06:02M HLA-DRB4*03:01NL HLA-DRB1*08:77M HLA-DPA1*01:03-B1*03:01L HLA-DPA1*03:01-B1*04:02L HLA-DRB1*03:01L HLA-DRB1*14:01L
  REGION 1..10: note = CONT. FROM ABOVE: HLA-DRB1*11:02L HLA-DRB1*14:02L HLA-DRB5*01:01 L HLA-DQA1*01-B1*05L HLA-DQA1*05:05-B1*03:19M HLA-DQA1*05:01-B1* 02:01M HLA-DRB4*01:01L HLA-DPA1*01:03-B1*04:01M HLA-DQA1*05:05-B 1*03:116L HLA-DPA1*01:03-B1*04:02L HLA-DRB1*12:01L
  REGION 1..10: note = CONT. FROM ABOVE: HLA-DPA1*02:01-B1*13:01L HLA-DPA1*03:01-B1*105 :01L HLA-DPA1*01:03-B1*104:01L HLA-DQA1*05:05-B1*03:01L HLA-DRB1 *10:01L HLA-DRB1*16:01M HLA-DRB1*08:02L HLA-DQA1*02:01-B1*03:03L HLA-DRB1*15:03L
  source 1..10: note = Severe acute respiratory syndrome coronavirus 2
ETLVTMPLGY

SEQ ID NO: 8591 - protein, 10 aa, Severe acute respiratory syndrome-related coronavirus
  REGION 1..10: note = Table B: HLA-DQA1*03:02-B1*03:03L HLA-DQA1*05:01-B1*03:01M HLA-DRB1*13:03L HLA-DRB1*04:05L HLA-DQA1*01:02-B1*06:02L HLA-DRB1*01:02L HLA-DPA1*01:03-B1*03:01L HLA-DPA1*03:01-B1*04:02L HLA-DRB1*14:01L HLA-DRB1*14:02L
  REGION 1..10: note = CONT. FROM ABOVE: HLA-DRB1*08:01L HLA-DRB5*01:01L HLA-DQA1*01-B1 *05L HLA-DQA1*05:01-B1*02:01L HLA-DPA1*01:03-B1*04:01L HLA-DQA1* 05:05-B1*03:116L HLA-DPA1*02:01-B1*13:01L HLA-DPA1*03:01-B1*105: 01L HLA-DQA1*03:01-B1*03:02L HLA-DPA1*01:02-B1*04:01L
  REGION 1..10: note = CONT. FROM ABOVE: HLA-DRB1*16:01L HLA-DQA1*01:03-B1*06:01L HLA-D RB1*08:03L HLA-DQA1*02:01-B1*03:03L HLA-DRB1*15:03L
  source 1..10: note = Severe acute respiratory syndrome coronavirus 2
MPLGYVTHGL

SEQ ID NO: 8592 - protein, 10 aa, Severe acute respiratory syndrome-related coronavirus
  REGION 1..10: note = Table B: HLA-DQA1*03:02-B1*03:03L HLA-DQA1*03:01-B1*03:02L HLA-DQA1*02:01-B1*03:03L
  source 1..10: note = Severe acute respiratory syndrome coronavirus 2
VTHGLNLEEA

SEQ ID NO: 8593 - protein, 10 aa, Severe acute respiratory syndrome-related coronavirus
  REGION 1..10: note = Table B: HLA-DQA1*03:02-B1*03:03L HLA-DQA1*05:01-B1*03:01L HLA-DQA1*01:02-B1*06:02L HLA-DQA1*05:05-B1*03:19L HLA-DQA1*05:01-B1*02:01L HLA-DQA1*03:01-B1*03:02L HLA-DQA1*01:03-B1*06:01L HLA-DQA1*02:01-B1*03:03L
  source 1..10: note = Severe acute respiratory syndrome coronavirus 2
EEAARYMRSL

SEQ ID NO: 8594 - protein, 12 aa, Severe acute respiratory syndrome-related coronavirus
  REGION 1..12: note = Table B: HLA-DQA1*03:02-B1*03:03L HLA-DRB1*13:02L HLA-DRB1*04:04L HLA-DRB1*04:05L HLA-DQA1*01:02-B1*06:02L HLA-DPA1*01:03-B1*03:01L HLA-DRB1*11:01L HLA-DQA1*05:05-B1*03:19L HLA-DPA1*01:03-B1*04:02L
  REGION 1..12: note = CONT. FROM ABOVE: HLA-DPA1*02:01-B1*13:01L HLA-DPA1*03:01-B1*105 :01L HLA-DPA1*01:03-B1*104:01L HLA-DQA1*05:05-B1*03:01L HLA-DRB1 *10:01L HLA-DQA1*01:03-B1*06:01L HLA-DRB1*15:03L
  source 1..12: note = Severe acute respiratory syndrome coronavirus 2
YMRSLKVPATVS

SEQ ID NO: 8595 - protein, 10 aa, Severe acute respiratory syndrome-related coronavirus
  REGION 1..10: note = Table B: HLA-DQA1*03:02-B1*03:03L HLA-DQA1*05:01-B1*03:01L HLA-DQA1*01:02-B1*06:02L HLA-DRB1*01:02L HLA-DPA1*03:01-B1*04:02L HLA-DRB1*14:01L HLA-DRB1*14:02L HLA-DQA1*05:05-B1*03:19L HLA-DQA1*05:05-B1*03:116L
  REGION 1..10: note = CONT. FROM ABOVE: HLA-DPA1*02:01-B1*13:01L HLA-DPA1*03:01-B1*105 :01L HLA-DQA1*03:01-B1*03:02L HLA-DPA1*01:02-B1*04:01L HLA-DRB1* 16:01L HLA-DQA1*01:03-B1*06:01L HLA-DQA1*02:01-B1*03:03L HLA-DRB 1*15:03L
  source 1..10: note = Severe acute respiratory syndrome coronavirus 2
SLKVPATVSV

SEQ ID NO: 8596 - protein, 12 aa, Severe acute respiratory syndrome-related coronavirus
  REGION 1..12: note = Table B: HLA-DQA1*03:02-B1*03:03L HLA-DRB1*04:03L HLA-DRB1*14:17L HLA-DQA1*02:01-B1*03:03L
  source 1..12: note = Severe acute respiratory syndrome coronavirus 2
KVPATVSVSSPD

SEQ ID NO: 8597 - protein, 12 aa, Severe acute respiratory syndrome-related coronavirus
  REGION 1..12: note = Table B: HLA-DQA1*03:02-B1*03:03L HLA-DQA1*05:01-B1*03:01L HLA-DRB1*04:03L HLA-DQA1*01:01-B1*05:01L HLA-DQA1*05:05-B1*03:19L HLA-DQA1*05:01-B1*02:01L HLA-DQA1*05:05-B1*03:01L HLA-DQA1*02:01-B1*03:03L
  source 1..12: note = Severe acute respiratory syndrome coronavirus 2
VPATVSVSSPDA

SEQ ID NO: 8598 - protein, 13 aa, Severe acute respiratory syndrome-related coronavirus
  REGION 1..13: note = Table B: HLA-DQA1*03:02-B1*03:03L HLA-DQA1*05:05-B1*03:01L HLA-DQA1*01:03-B1*06:01L
  source 1..13: note = Severe acute respiratory syndrome coronavirus 2
VSVSSPDAVTAYN

SEQ ID NO: 8599 - protein, 13 aa, Severe acute respiratory syndrome-related coronavirus
  REGION 1..13: note = Table B: HLA-DQA1*03:02-B1*03:03L HLA-DPA1*03:01-B1*04:02L HLA-DQA1*05:05-B1*03:01L HLA-DQA1*01:03-B1*06:01L
  source 1..13: note = Severe acute respiratory syndrome coronavirus 2
VSSPDAVTAYNGY

SEQ ID NO: 8600 - protein, 12 aa, Severe acute respiratory syndrome-related coronavirus
  REGION 1..12: note = Table B: HLA-DQA1*03:02-B1*03:03L HLA-DQA1*03:01-B1*03:02L HLA-DQA1*01:03-B1*06:01L
  source 1..12: note = Severe acute respiratory syndrome coronavirus 2
SPDAVTAYNGYL

SEQ ID NO: 8601 - protein, 13 aa, Severe acute respiratory syndrome-related coronavirus
  REGION 1..13: note = Table B: HLA-DQA1*03:02-B1*03:03L HLA-DQA1*05:01-B1*03:01L HLA-DRB1*04:01L HLA-DRB1*13:02L HLA-DRB1*04:04L HLA-DQA1*01:02-B1*06:02L HLA-DRB1*14:01L HLA-DRB1*11:03L HLA-DRB1*11:04L HLA-DQA1*05:05-B1*03:19L
  REGION 1..13: note = CONT. FROM ABOVE: HLA-DQA1*05:01-B1*02:01L HLA-DRB1*12:02L HLA-D PA1*03:01-B1*105:01L HLA-DQA1*01:03-B1*06:01L HLA-DRB1*08:03L
  source 1..13: note = Severe acute respiratory syndrome coronavirus 2
VTAYNGYLTSSSK

SEQ ID NO: 8602 - protein, 13 aa, Severe acute respiratory syndrome-related coronavirus
  REGION 1..13: note = Table B: HLA-DQA1*03:02-B1*03:03L HLA-DQA1*05:01-B1*03:01L HLA-DQA1*01:02-B1*06:02L HLA-DPA1*03:01-B1*105:01L HLA-DQA1*05:05-B1*03:01L
  source 1..13: note = Severe acute respiratory syndrome coronavirus 2
AYNGYLTSSSKTP

SEQ ID NO: 8603 - protein, 10 aa, Severe acute respiratory syndrome-related coronavirus
  REGION 1..10: note = Table B: HLA-DQA1*03:02-B1*03:03L HLA-DQA1*05:01-B1*03:01L HLA-DRB1*04:03L HLA-DRB1*13:02L HLA-DRB1*13:03L HLA-DRB1*01:03L HLA-DRB1*04:02L HLA-DRB1*04:05L HLA-DRB1*01:02L HLA-DRB4*03:01NL HLA-DRB1*08:04L HLA-DRB1*08:77L HLA-DRB1*14:01L HLA-DRB1*11:03L
  REGION 1..10: note = CONT. FROM ABOVE: HLA-DRB1*11:04L HLA-DRB1*14:02L HLA-DQA1*01-B1 *05L HLA-DQA1*05:01-B1*02:01L HLA-DRB1*04:10L HLA-DRB1*12:01L HL A-DRB1*12:02L HLA-DQA1*03:01-B1*03:02L HLA-DRB1*14:54L HLA-DQA1* 05:05-B1*03:01L HLA-DRB1*14:17L HLA-DPA1*01:02-B1*04:01L
  REGION 1..10: note = CONT. FROM ABOVE: HLA-DRB1*10:01L HLA-DRB1*16:01L HLA-DRB1*04:08 L HLA-DRB1*08:03L HLA-DQA1*02:01-B1*03:03L HLA-DRB1*15:03L
  source 1..10: note = Severe acute respiratory syndrome coronavirus 2
YLTSSSKTPE

SEQ ID NO: 8604 - protein, 11 aa, Severe acute respiratory syndrome-related coronavirus
  REGION 1..11: note = Table B: HLA-DQA1*03:02-B1*03:03L HLA-DQA1*05:01-B1*03:01L HLA-DRB1*01:03L HLA-DRB1*04:05L HLA-DQA1*01:02-B1*06:02L HLA-DQA1*01:01-B1*05:01L
  source 1..11: note = Severe acute respiratory syndrome coronavirus 2
LTSSSKTPEEH

SEQ ID NO: 8605 - protein, 10 aa, Severe acute respiratory syndrome-related coronavirus
  REGION 1..10: note = Table B: HLA-DQA1*03:02-B1*03:03L HLA-DQA1*05:01-B1*03:01L HLA-DRB1*01:03L HLA-DQA1*01:02-B1*06:02L HLA-DRB1*08:77L HLA-DPA1*01:03-B1*03:01L HLA-DRB1*14:02L HLA-DQA1*05:05-B1*03:19L HLA-DQA1*05:01-B1*02:01L
  REGION 1..10: note = CONT. FROM ABOVE: HLA-DPA1*01:03-B1*04:01L HLA-DPA1*03:01-B1*105 :01L HLA-DQA1*03:01-B1*03:02L HLA-DRB1*16:01L HLA-DQA1*01:03-B1* 06:01L HLA-DQA1*02:01-B1*03:03L HLA-DRB1*15:03L
  source 1..10: note = Severe acute respiratory syndrome coronavirus 2
SSSKTPEEHF

SEQ ID NO: 8606 - protein, 10 aa, Severe acute respiratory syndrome-related coronavirus
  REGION 1..10: note = Table B: HLA-DQA1*03:02-B1*03:03M HLA-DQA1*05:05-B1*03:19M HLA-DQA1*05:05-B1*03:116L HLA-DRB1*09:01L HLA-DPA1*01:03-B1*04:02L HLA-DQA1*03:01-B1*03:02M HLA-DPA1*01:03-B1*104:01L
  source 1..10: note = Severe acute respiratory syndrome coronavirus 2
EEHFIETISL

SEQ ID NO: 8607 - protein, 12 aa, Severe acute respiratory syndrome-related coronavirus
  REGION 1..12: note = Table B: HLA-DQA1*03:02-B1*03:03L HLA-DRB1*04:03L HLA-DRB1*01:02L HLA-DPA1*03:01-B1*04:02L HLA-DRB1*14:02L HLA-DPA1*01:03-B1*04:02L HLA-DRB1*12:01L HLA-DPA1*03:01-B1*105:01L HLA-DQA1*03:01-B1*03:02L
  REGION 1..12: note = CONT. FROM ABOVE: HLA-DQA1*05:05-B1*03:01L HLA-DQA1*01:03-B1*06: 01L HLA-DQA1*02:01-B1*03:03L HLA-DRB1*15:03L
  source 1..12: note = Severe acute respiratory syndrome coronavirus 2
HFIETISLAGSY

SEQ ID NO: 8608 - protein, 11 aa, Severe acute respiratory syndrome-related coronavirus
  REGION 1..11: note = Table B: HLA-DQA1*03:02-B1*03:03L HLA-DRB1*04:03L HLA-DRB1*04:02L HLA-DRB1*01:02L HLA-DQA1*05:01-B1*02:01L HLA-DRB1*14:54L
  source 1..11: note = Severe acute respiratory syndrome coronavirus 2
IETISLAGSYK

SEQ ID NO: 8609 - protein, 12 aa, Severe acute respiratory syndrome-related coronavirus
  REGION 1..12: note = Table B: HLA-DQA1*03:02-B1*03:03L HLA-DQA1*05:01-B1*03:01L HLA-DPA1*01:03-B1*03:01L HLA-DPA1*03:01-B1*04:02L HLA-DQA1*01-B1*05L HLA-DRB1*16:01L
  source 1..12: note = Severe acute respiratory syndrome coronavirus 2
ETISLAGSYKDW

SEQ ID NO: 8610 - protein, 12 aa, Severe acute respiratory syndrome-related coronavirus
  REGION 1..12: note = Table B: HLA-DQA1*03:02-B1*03:03L HLA-DQA1*05:01-B1*03:01L HLA-DPA1*03:01-B1*04:02L HLA-DRB1*14:01L HLA-DRB1*12:01L HLA-DPA1*02:01-B1*13:01L HLA-DQA1*05:05-B1*03:01L
  source 1..12: note = Severe acute respiratory syndrome coronavirus 2
ISLAGSYKDWSY

SEQ ID NO: 8611 - protein, 13 aa, Severe acute respiratory syndrome-related coronavirus
  REGION 1..13: note = Table B: HLA-DQA1*03:02-B1*03:03L HLA-DRB1*01:03L HLA-DRB1*04:05L HLA-DQA1*01:02-B1*06:02L HLA-DRB1*08:04L HLA-DPA1*03:01-B1*04:02L HLA-DPA1*02:01-B1*13:01L HLA-DPA1*03:01-B1*105:01L HLA-DRB1*14:17L
  REGION 1..13: note = CONT. FROM ABOVE: HLA-DPA1*01:02-B1*04:01L HLA-DRB1*04:08L HLA-D QA1*02:01-B1*03:03L
  source 1..13: note = Severe acute respiratory syndrome coronavirus 2
AGSYKDWSYSGQS

SEQ ID NO: 8612 - protein, 12 aa, Severe acute respiratory syndrome-related coronavirus
  REGION 1..12: note = Table B: HLA-DQA1*03:02-B1*03:03L HLA-DQA1*05:01-B1*03:01L HLA-DRB1*04:03L HLA-DRB1*13:03L HLA-DRB1*04:02L HLA-DRB1*04:05L HLA-DQA1*01:02-B1*06:02L HLA-DQA1*05:05-B1*03:19L HLA-DQA1*05:01-B1*02:01L HLA-DPA1*03:01-B1*105:01L
  REGION 1..12: note = CONT. FROM ABOVE: HLA-DQA1*05:05-B1*03:01L HLA-DRB1*14:17L HLA-D RB1*16:01L HLA-DQA1*02:01-B1*03:03L
  source 1..12: note = Severe acute respiratory syndrome coronavirus 2
YKDWSYSGQSTQ

SEQ ID NO: 8613 - protein, 10 aa, Severe acute respiratory syndrome-related coronavirus
  REGION 1..10: note = Table B: HLA-DQA1*03:02-B1*03:03L HLA-DQA1*05:01-B1*03:01L HLA-DQA1*01:02-B1*06:02L HLA-DQA1*05:05-B1*03:19L HLA-DQA1*05:05-B1*03:116L HLA-DPA1*02:01-B1*13:01L HLA-DPA1*03:01-B1*105:01L HLA-DQA1*03:01-B1*03:02L
  REGION 1..10: note = CONT. FROM ABOVE: HLA-DQA1*02:01-B1*03:03L HLA-DRB1*15:03L
  source 1..10: note = Severe acute respiratory syndrome coronavirus 2
WSYSGQSTQL

SEQ ID NO: 8614 - protein, 12 aa, Severe acute respiratory syndrome-related coronavirus
  REGION 1..12: note = Table B: HLA-DQA1*03:02-B1*03:03L HLA-DQA1*05:01-B1*03:01L HLA-DRB1*04:04L HLA-DRB1*01:02L HLA-DQA1*05:01-B1*02:01L HLA-DPA1*03:01-B1*105:01L HLA-DRB1*10:01L HLA-DQA1*01:03-B1*06:01L
  source 1..12: note = Severe acute respiratory syndrome coronavirus 2
SYSGQSTQLGIE

SEQ ID NO: 8615 - protein, 10 aa, Severe acute respiratory syndrome-related coronavirus
  REGION 1..10: note = Table B: HLA-DQA1*03:02-B1*03:03L HLA-DRB1*13:03L HLA-DQA1*01:02-B1*06:02L HLA-DRB1*08:77L HLA-DQA1*05:05-B1*03:19L HLA-DQA1*05:01-B1*02:01L HLA-DPA1*01:03-B1*04:01L HLA-DPA1*03:01-B1*105:01L
  REGION 1..10: note = CONT. FROM ABOVE: HLA-DQA1*02:01-B1*03:03L HLA-DRB1*15:03L
  source 1..10: note = Severe acute respiratory syndrome coronavirus 2
GQSTQLGIEF

SEQ ID NO: 8616 - protein, 12 aa, Severe acute respiratory syndrome-related coronavirus
  REGION 1..12: note = Table B: HLA-DQA1*03:02-B1*03:03L HLA-DRB1*13:03L HLA-DRB1*01:03L HLA-DRB1*04:02L HLA-DRB1*04:05L HLA-DRB4*03:01NL HLA-DQA1*05:01-B1*02:01L HLA-DRB1*04:10L HLA-DRB1*12:01L HLA-DQA1*03:01-B1*03:02L HLA-DRB1*14:54L HLA-DRB1*14:17L
  REGION 1..12: note = CONT. FROM ABOVE: HLA-DRB1*16:01L HLA-DQA1*02:01-B1*03:03L
  source 1..12: note = Severe acute respiratory syndrome coronavirus 2
DKSVYYTSNPTT

SEQ ID NO: 8617 - protein, 10 aa, Severe acute respiratory syndrome-related coronavirus
  REGION 1..10: note = Table B: HLA-DQA1*03:02-B1*03:03L HLA-DQA1*05:01-B1*03:01L HLA-DRB1*04:03M HLA-DRB1*01:03M HLA-DRB1*04:05M HLA-DQA1*01:02-B1*06:02L HLA-DRB1*01:01M HLA-DRB1*01:02L HLA-DRB4*03:01NL HLA-DRB1*08:77L HLA-DPA1*03:01-B1*04:02L
  REGION 1..10: note = CONT. FROM ABOVE: HLA-DRB1*14:01L HLA-DRB1*11:03L HLA-DRB1*14:02 L HLA-DQA1*01:01-B1*05:01L HLA-DRB1*11:01L HLA-DQA1*01-B1*05L HL A-DQA1*05:05-B1*03:19L HLA-DQA1*05:01-B1*02:01L HLA-DRB4*01:01L HLA-DPA1*01:03-B1*04:01L HLA-DQA1*05:05-B1*03:116L
  REGION 1..10: note = CONT. FROM ABOVE: HLA-DPA1*01:03-B1*04:02L HLA-DRB1*12:01L HLA-D PA1*02:01-B1*13:01H HLA-DPA1*03:01-B1*105:01L HLA-DPA1*01:02-B1* 04:01L HLA-DRB1*10:01L HLA-DRB1*16:01L HLA-DQA1*01:03-B1*06:01M HLA-DRB1*08:03L HLA-DQA1*02:01-B1*03:03L HLA-DRB1*15:03L
  source 1..10: note = Severe acute respiratory syndrome coronavirus 2
VYYTSNPTTF

SEQ ID NO: 8618 - protein, 10 aa, Severe acute respiratory syndrome-related coronavirus
  REGION 1..10: note = Table B: HLA-DQA1*03:02-B1*03:03L HLA-DQA1*05:01-B1*03:01L HLA-DRB1*04:03L HLA-DRB1*13:02L HLA-DRB1*13:03L HLA-DRB1*01:03L HLA-DRB1*04:02L HLA-DRB1*01:02L HLA-DRB4*03:01NL HLA-DRB1*08:77L HLA-DRB3*02:01L HLA-DRB1*14:01L HLA-DQA1*01-B1*05L
  REGION 1..10: note = CONT. FROM ABOVE: HLA-DQA1*05:05-B1*03:19L HLA-DQA1*05:01-B1*02: 01L HLA-DRB1*12:01L HLA-DPA1*03:01-B1*105:01L HLA-DQA1*03:01-B1* 03:02L HLA-DQA1*05:05-B1*03:01L HLA-DPA1*01:02-B1*04:01L HLA-DRB 1*16:01L HLA-DQA1*01:03-B1*06:01L HLA-DQA1*02:01-B1*03:03L
  REGION 1..10: note = CONT. FROM ABOVE: HLA-DRB1*15:03L
  source 1..10: note = Severe acute respiratory syndrome coronavirus 2
YYTSNPTTFH

SEQ ID NO: 8619 - protein, 10 aa, Severe acute respiratory syndrome-related coronavirus
  REGION 1..10: note = Table B: HLA-DQA1*03:02-B1*03:03M HLA-DQA1*05:01-B1*03:01L HLA-DRB1*13:03L HLA-DRB1*01:03L HLA-DQA1*01:02-B1*06:02L HLA-DRB1*01:02L HLA-DPA1*03:01-B1*04:02L HLA-DRB1*14:01L HLA-DRB1*14:02L HLA-DRB1*08:01L HLA-DQA1*05:05-B1*03:19L
  REGION 1..10: note = CONT. FROM ABOVE: HLA-DQA1*05:01-B1*02:01L HLA-DPA1*01:03-B1*04: 01L HLA-DQA1*05:05-B1*03:116L HLA-DRB1*09:01L HLA-DPA1*01:03-B1* 04:02L HLA-DRB1*12:01L HLA-DPA1*02:01-B1*13:01L HLA-DPA1*03:01-B 1*105:01L HLA-DQA1*03:01-B1*03:02L HLA-DPA1*01:03-B1*104:01L
  REGION 1..10: note = CONT. FROM ABOVE: HLA-DPA1*01:02-B1*04:01L HLA-DRB1*10:01L HLA-D RB1*16:01L HLA-DQA1*01:03-B1*06:01L HLA-DRB1*08:03L HLA-DQA1*02: 01-B1*03:03L HLA-DRB1*15:03L
  source 1..10: note = Severe acute respiratory syndrome coronavirus 2
YTSNPTTFHL

SEQ ID NO: 8620 - protein, 12 aa, Severe acute respiratory syndrome-related coronavirus
  REGION 1..12: note = Table B: HLA-DQA1*03:02-B1*03:03L HLA-DRB1*04:03L HLA-DQA1*01-B1*05L HLA-DQA1*05:01-B1*02:01L HLA-DQA1*03:01-B1*03:02L
  source 1..12: note = Severe acute respiratory syndrome coronavirus 2
PTTFHLDGEVIT

SEQ ID NO: 8621 - protein, 10 aa, Severe acute respiratory syndrome-related coronavirus
  REGION 1..10: note = Table B: HLA-DQA1*03:02-B1*03:03L HLA-DQA1*05:01-B1*03:01L HLA-DRB1*04:03L HLA-DRB1*13:03L HLA-DRB1*01:03L HLA-DRB1*04:05L HLA-DQA1*01:02-B1*06:02M HLA-DRB1*01:01L HLA-DRB1*01:02L HLA-DRB1*08:77L HLA-DPA1*01:03-B1*03:01L
  REGION 1..10: note = CONT. FROM ABOVE: HLA-DPA1*03:01-B1*04:02L HLA-DRB1*03:01L HLA-D RB1*14:01L HLA-DRB1*11:03L HLA-DRB1*14:02M HLA-DQA1*01:01-B1*05: 01L HLA-DRB1*08:01L HLA-DRB1*11:01L HLA-DQA1*05:05-B1*03:19L HLA -DQA1*05:01-B1*02:01L HLA-DRB4*01:01L HLA-DPA1*01:03-B1*04:01L
  REGION 1..10: note = CONT. FROM ABOVE: HLA-DQA1*05:05-B1*03:116L HLA-DRB1*09:01L HLA- DPA1*01:03-B1*04:02L HLA-DRB1*12:01L HLA-DPA1*02:01-B1*13:01M HL A-DPA1*03:01-B1*105:01L HLA-DQA1*03:01-B1*03:02L HLA-DPA1*01:03- B1*104:01L HLA-DPA1*01:02-B1*04:01L HLA-DRB1*10:01L
  REGION 1..10: note = CONT. FROM ABOVE: HLA-DRB1*16:01L HLA-DQA1*01:03-B1*06:01M HLA-D RB1*08:02L HLA-DRB1*08:03L HLA-DQA1*02:01-B1*03:03M HLA-DRB1*15: 03L
  source 1..10: note = Severe acute respiratory syndrome coronavirus 2
FHLDGEVITF

SEQ ID NO: 8622 - protein, 12 aa, Severe acute respiratory syndrome-related coronavirus
  REGION 1..12: note = Table B: HLA-DQA1*03:02-B1*03:03L HLA-DQA1*01:02-B1*06:02L HLA-DQA1*05:01-B1*02:01L HLA-DQA1*01:03-B1*06:01L
  source 1..12: note = Severe acute respiratory syndrome coronavirus 2
LDGEVITFDNLK

SEQ ID NO: 8623 - protein, 11 aa, Severe acute respiratory syndrome-related coronavirus
  REGION 1..11: note = Table B: HLA-DQA1*03:02-B1*03:03L HLA-DRB1*13:03L HLA-DRB1*01:03L HLA-DRB1*04:04L HLA-DRB1*04:05L HLA-DQA1*01:02-B1*06:02L HLA-DRB1*01:02L HLA-DRB4*03:01NL HLA-DRB1*14:01L HLA-DQA1*05:01-B1*02:01L HLA-DRB1*04:10L
  REGION 1..11: note = CONT. FROM ABOVE: HLA-DRB1*12:01L HLA-DRB1*14:54L HLA-DRB1*16:01 L HLA-DRB1*04:08L HLA-DRB1*15:03L
  source 1..11: note = Severe acute respiratory syndrome coronavirus 2
GEVITFDNLKT

SEQ ID NO: 8624 - protein, 10 aa, Severe acute respiratory syndrome-related coronavirus
  REGION 1..10: note = Table B: HLA-DQA1*03:02-B1*03:03L HLA-DQA1*05:01-B1*03:01L HLA-DRB1*04:03L HLA-DRB1*04:02L HLA-DPA1*03:01-B1*04:02L HLA-DRB1*14:01L HLA-DQA1*01-B1*05L HLA-DQA1*05:01-B1*02:01L HLA-DRB1*12:01L HLA-DPA1*03:01-B1*105:01L
  REGION 1..10: note = CONT. FROM ABOVE: HLA-DQA1*03:01-B1*03:02L HLA-DPA1*01:02-B1*04: 01L HLA-DRB1*16:01L HLA-DQA1*01:03-B1*06:01L HLA-DQA1*02:01-B1*0 3:03L HLA-DRB1*15:03L
  source 1..10: note = Severe acute respiratory syndrome coronavirus 2
VITFDNLKTL

SEQ ID NO: 8625 - protein, 10 aa, Severe acute respiratory syndrome-related coronavirus
  REGION 1..10: note = Table B: HLA-DQA1*03:02-B1*03:03L HLA-DQA1*05:01-B1*03:01L HLA-DQA1*01:02-B1*06:02L HLA-DPA1*03:01-B1*04:02L HLA-DRB1*14:02L HLA-DQA1*05:05-B1*03:19L HLA-DQA1*05:01-B1*02:01L HLA-DQA1*05:05-B1*03:116L
  REGION 1..10: note = CONT. FROM ABOVE: HLA-DPA1*02:01-B1*13:01L HLA-DPA1*03:01-B1*105 :01L HLA-DQA1*03:01-B1*03:02L HLA-DPA1*01:02-B1*04:01L HLA-DQA1* 01:03-B1*06:01L HLA-DQA1*02:01-B1*03:03L HLA-DRB1*15:03L
  source 1..10: note = Severe acute respiratory syndrome coronavirus 2
ITFDNLKTLL

SEQ ID NO: 8626 - protein, 10 aa, Severe acute respiratory syndrome-related coronavirus
  REGION 1..10: note = Table B: HLA-DQA1*03:02-B1*03:03L HLA-DQA1*05:05-B1*03:19L HLA-DQA1*03:01-B1*03:02L
  source 1..10: note = Severe acute respiratory syndrome coronavirus 2
FDNLKTLLSL

SEQ ID NO: 8627 - protein, 12 aa, Severe acute respiratory syndrome-related coronavirus
  REGION 1..12: note = Table B: HLA-DQA1*03:02-B1*03:03L HLA-DQA1*05:01-B1*03:01L HLA-DRB1*01:03L HLA-DRB1*04:04L HLA-DRB1*04:05L HLA-DRB1*01:02L HLA-DRB4*03:01NL HLA-DPA1*01:03-B1*03:01L HLA-DRB1*14:01L HLA-DQA1*01:01-B1*05:01L HLA-DRB1*08:01L HLA-DQA1*01-B1*05L
  REGION 1..12: note = CONT. FROM ABOVE: HLA-DQA1*05:05-B1*03:19L HLA-DQA1*05:01-B1*02: 01L HLA-DRB1*04:10L HLA-DRB1*12:01L HLA-DPA1*03:01-B1*105:01L HL A-DRB1*14:54L HLA-DQA1*05:05-B1*03:01L HLA-DRB1*16:01L HLA-DRB1* 04:08L HLA-DRB1*15:03L
  source 1..12: note = Severe acute respiratory syndrome coronavirus 2
VRTIKVFTTVDN

SEQ ID NO: 8628 - protein, 11 aa, Severe acute respiratory syndrome-related coronavirus
  REGION 1..11: note = Table B: HLA-DQA1*03:02-B1*03:03L HLA-DRB1*04:03L HLA-DRB1*04:02L HLA-DQA1*01-B1*05L HLA-DQA1*05:01-B1*02:01L HLA-DRB1*14:17L HLA-DQA1*02:01-B1*03:03L
  source 1..11: note = Severe acute respiratory syndrome coronavirus 2
IKVFTTVDNIN

SEQ ID NO: 8629 - protein, 10 aa, Severe acute respiratory syndrome-related coronavirus
  REGION 1..10: note = Table B: HLA-DQA1*03:02-B1*03:03L HLA-DQA1*05:01-B1*02:01L HLA-DQA1*03:01-B1*03:02L HLA-DRB1*16:01L HLA-DQA1*01:03-B1*06:01L HLA-DQA1*02:01-B1*03:03L HLA-DRB1*15:03L
  source 1..10: note = Severe acute respiratory syndrome coronavirus 2
VFTTVDNINL

SEQ ID NO: 8630 - protein, 10 aa, Severe acute respiratory syndrome-related coronavirus
  REGION 1..10: note = Table B: HLA-DQA1*03:02-B1*03:03L HLA-DQA1*05:01-B1*03:01L HLA-DRB1*04:03L HLA-DRB1*13:02L HLA-DRB1*13:03L HLA-DRB1*01:03L HLA-DRB1*04:02L HLA-DRB1*04:05L HLA-DQA1*01:02-B1*06:02L HLA-DRB1*01:02L HLA-DRB4*03:01NL HLA-DRB1*08:77L HLA-DRB3*02:01L
  REGION 1..10: note = CONT. FROM ABOVE: HLA-DRB1*14:01L HLA-DRB1*11:03L HLA-DRB1*14:02 L HLA-DQA1*01-B1*05L HLA-DQA1*05:05-B1*03:19L HLA-DQA1*05:01-B1* 02:01L HLA-DRB1*04:10L HLA-DRB1*12:01L HLA-DRB1*12:02L HLA-DPA1* 03:01-B1*105:01L HLA-DQA1*03:01-B1*03:02L HLA-DRB1*14:54L
  REGION 1..10: note = CONT. FROM ABOVE: HLA-DQA1*05:05-B1*03:01L HLA-DRB1*14:17L HLA-D PA1*01:02-B1*04:01L HLA-DRB1*10:01L HLA-DRB1*16:01L HLA-DQA1*01: 03-B1*06:01L HLA-DRB1*04:08L HLA-DQA1*02:01-B1*03:03L HLA-DRB1*1 5:03L
  source 1..10: note = Severe acute respiratory syndrome coronavirus 2
FTTVDNINLH

SEQ ID NO: 8631 - protein, 10 aa, Severe acute respiratory syndrome-related coronavirus
  REGION 1..10: note = Table B: HLA-DQA1*03:02-B1*03:03L HLA-DRB1*04:03L HLA-DRB1*13:03L HLA-DRB1*01:03L HLA-DRB1*04:02L HLA-DRB4*03:01NL HLA-DQA1*01-B1*05L HLA-DQA1*05:01-B1*02:01L HLA-DQA1*03:01-B1*03:02L HLA-DRB1*14:54L HLA-DRB1*14:17L
  REGION 1..10: note = CONT. FROM ABOVE: HLA-DRB1*16:01L HLA-DQA1*01:03-B1*06:01L HLA-D QA1*02:01-B1*03:03L
  source 1..10: note = Severe acute respiratory syndrome coronavirus 2
TVDNINLHTQ

SEQ ID NO: 8632 - protein, 10 aa, Severe acute respiratory syndrome-related coronavirus
  REGION 1..10: note = Table B: HLA-DQA1*03:02-B1*03:03L HLA-DQA1*05:01-B1*03:01L HLA-DRB1*04:03L HLA-DRB1*13:03L HLA-DRB1*01:03L HLA-DRB1*04:02L HLA-DRB1*04:05L HLA-DQA1*01:02-B1*06:02L HLA-DRB4*03:01NL HLA-DRB1*14:01L HLA-DQA1*01-B1*05L HLA-DQA1*05:01-B1*02:01L
  REGION 1..10: note = CONT. FROM ABOVE: HLA-DRB1*12:01L HLA-DPA1*03:01-B1*105:01L HLA- DQA1*03:01-B1*03:02L HLA-DRB1*14:54L HLA-DQA1*05:05-B1*03:01L HL A-DRB1*14:17L HLA-DPA1*01:02-B1*04:01L HLA-DRB1*16:01L HLA-DQA1* 01:03-B1*06:01L HLA-DQA1*02:01-B1*03:03L
  source 1..10: note = Severe acute respiratory syndrome coronavirus 2
NINLHTQVVD

SEQ ID NO: 8633 - protein, 10 aa, Severe acute respiratory syndrome-related coronavirus
  REGION 1..10: note = Table B: HLA-DQA1*03:02-B1*03:03L HLA-DRB1*04:03L HLA-DQA1*01-B1*05L HLA-DQA1*03:01-B1*03:02L HLA-DQA1*02:01-B1*03:03L
  source 1..10: note = Severe acute respiratory syndrome coronavirus 2
INLHTQVVDM

SEQ ID NO: 8634 - protein, 10 aa, Severe acute respiratory syndrome-related coronavirus
  REGION 1..10: note = Table B: HLA-DQA1*03:02-B1*03:03L HLA-DRB1*04:03L HLA-DRB1*01:03L HLA-DQA1*01-B1*05L HLA-DQA1*05:01-B1*02:01L HLA-DPA1*03:01-B1*105:01L HLA-DQA1*03:01-B1*03:02L HLA-DPA1*01:02-B1*04:01L HLA-DRB1*16:01L
  REGION 1..10: note = CONT. FROM ABOVE: HLA-DQA1*01:03-B1*06:01L HLA-DQA1*02:01-B1*03: 03L HLA-DRB1*15:03L
  source 1..10: note = Severe acute respiratory syndrome coronavirus 2
LHTQVVDMSM

SEQ ID NO: 8635 - protein, 10 aa, Severe acute respiratory syndrome-related coronavirus
  REGION 1..10: note = Table B: HLA-DQA1*03:02-B1*03:03L HLA-DRB1*04:03L HLA-DQA1*01-B1*05L HLA-DQA1*05:01-B1*02:01L HLA-DQA1*03:01-B1*03:02L HLA-DRB1*16:01L HLA-DQA1*01:03-B1*06:01L HLA-DQA1*02:01-B1*03:03L
  source 1..10: note = Severe acute respiratory syndrome coronavirus 2
HTQVVDMSMT

SEQ ID NO: 8636 - protein, 13 aa, Severe acute respiratory syndrome-related coronavirus
  REGION 1..13: note = Table B: HLA-DQA1*03:02-B1*03:03L HLA-DRB1*13:02L HLA-DRB1*01:03L HLA-DRB1*04:02L HLA-DRB1*04:05L HLA-DQA1*01:02-B1*06:02L HLA-DRB1*01:02L HLA-DRB4*03:01NL HLA-DRB1*08:77L HLA-DPA1*01:03-B1*03:01L HLA-DRB1*14:01L
  REGION 1..13: note = CONT. FROM ABOVE: HLA-DQA1*05:01-B1*02:01L HLA-DRB1*04:10L HLA-D RB1*12:02L HLA-DPA1*03:01-B1*105:01L HLA-DRB1*14:54L HLA-DRB1*14 :17L HLA-DRB1*07:01L HLA-DRB1*16:01L HLA-DRB1*15:03L
  source 1..13: note = Severe acute respiratory syndrome coronavirus 2
DMSMTYGQQFGPT

SEQ ID NO: 8637 - protein, 10 aa, Severe acute respiratory syndrome-related coronavirus
  REGION 1..10: note = Table B: HLA-DQA1*03:02-B1*03:03L HLA-DQA1*05:01-B1*03:01L HLA-DRB1*04:03L HLA-DRB1*13:03L HLA-DRB1*01:03L HLA-DRB1*04:05L HLA-DQA1*01:02-B1*06:02L HLA-DRB1*01:01L HLA-DRB4*03:01NL HLA-DRB1*08:77L HLA-DPA1*01:03-B1*03:01L
  REGION 1..10: note = CONT. FROM ABOVE: HLA-DPA1*03:01-B1*04:02L HLA-DRB1*03:01L HLA-D RB1*14:01L HLA-DRB1*14:02L HLA-DRB1*11:01L HLA-DQA1*01-B1*05L HL A-DQA1*05:05-B1*03:19L HLA-DQA1*05:01-B1*02:01L HLA-DRB4*01:01L HLA-DPA1*01:03-B1*04:01L HLA-DQA1*05:05-B1*03:116L
  REGION 1..10: note = CONT. FROM ABOVE: HLA-DPA1*01:03-B1*04:02L HLA-DRB1*12:01L HLA-D PA1*02:01-B1*13:01M HLA-DPA1*03:01-B1*105:01L HLA-DQA1*03:01-B1* 03:02L HLA-DPA1*01:03-B1*104:01L HLA-DPA1*01:02-B1*04:01L HLA-DR B1*10:01L HLA-DRB1*16:01L HLA-DQA1*01:03-B1*06:01L
  REGION 1..10: note = CONT. FROM ABOVE: HLA-DRB1*08:02L HLA-DQA1*02:01-B1*03:03L HLA-D RB1*15:03L
  source 1..10: note = Severe acute respiratory syndrome coronavirus 2
TYGQQFGPTY

SEQ ID NO: 8638 - protein, 13 aa, Severe acute respiratory syndrome-related coronavirus
  REGION 1..13: note = Table B: HLA-DQA1*03:02-B1*03:03L HLA-DQA1*01-B1*05L HLA-DQA1*05:01-B1*02:01L HLA-DQA1*03:01-B1*03:02L
  source 1..13: note = Severe acute respiratory syndrome coronavirus 2
GQQFGPTYLDGAD

SEQ ID NO: 8639 - protein, 12 aa, Severe acute respiratory syndrome-related coronavirus
  REGION 1..12: note = Table B: HLA-DQA1*03:02-B1*03:03L HLA-DQA1*05:01-B1*02:01L HLA-DQA1*02:01-B1*03:03L
  source 1..12: note = Severe acute respiratory syndrome coronavirus 2
FGPTYLDGADVT

SEQ ID NO: 8640 - protein, 12 aa, Severe acute respiratory syndrome-related coronavirus
  REGION 1..12: note = Table B: HLA-DQA1*03:02-B1*03:03L HLA-DQA1*05:01-B1*03:01L HLA-DRB1*04:03L HLA-DRB1*01:03L HLA-DRB1*04:05L HLA-DRB1*01:02L HLA-DRB1*08:77L HLA-DRB1*11:03L HLA-DRB1*11:04L HLA-DRB1*14:02L HLA-DQA1*01:01-B1*05:01L HLA-DRB5*01:01L
  REGION 1..12: note = CONT. FROM ABOVE: HLA-DQA1*05:05-B1*03:19L HLA-DQA1*05:01-B1*02: 01L HLA-DRB1*04:10L HLA-DRB1*12:02L HLA-DRB1*14:54L HLA-DRB1*10: 01L HLA-DRB1*16:01L HLA-DRB1*04:08L
  source 1..12: note = Severe acute respiratory syndrome coronavirus 2
GPTYLDGADVTK

SEQ ID NO: 8641 - protein, 10 aa, Severe acute respiratory syndrome-related coronavirus
  REGION 1..10: note = Table B: HLA-DQA1*03:02-B1*03:03M HLA-DQA1*05:01-B1*03:01L HLA-DQA1*01:02-B1*06:02L HLA-DRB1*01:02L HLA-DRB1*08:77L HLA-DPA1*03:01-B1*04:02L HLA-DRB1*14:01L HLA-DRB1*11:02L HLA-DRB1*14:02L HLA-DQA1*05:05-B1*03:19M
  REGION 1..10: note = CONT. FROM ABOVE: HLA-DQA1*05:01-B1*02:01L HLA-DRB4*01:01L HLA-D PA1*01:03-B1*04:01L HLA-DQA1*05:05-B1*03:116L HLA-DRB1*09:01L HL A-DPA1*01:03-B1*04:02L HLA-DPA1*02:01-B1*13:01L HLA-DPA1*03:01-B 1*105:01L HLA-DQA1*03:01-B1*03:02M HLA-DPA1*01:03-B1*104:01M
  REGION 1..10: note = CONT. FROM ABOVE: HLA-DPA1*01:02-B1*04:01L HLA-DRB1*10:01L HLA-D RB1*16:01L HLA-DQA1*01:03-B1*06:01L HLA-DRB1*08:03L HLA-DQA1*02: 01-B1*03:03M HLA-DRB1*15:03L
  source 1..10: note = Severe acute respiratory syndrome coronavirus 2
YLDGADVTKI

SEQ ID NO: 8642 - protein, 12 aa, Severe acute respiratory syndrome-related coronavirus
  REGION 1..12: note = Table B: HLA-DQA1*03:02-B1*03:03L HLA-DRB1*01:03L HLA-DPA1*03:01-B1*105:01L HLA-DRB1*04:08L
  source 1..12: note = Severe acute respiratory syndrome coronavirus 2
LDGADVTKIKPH

SEQ ID NO: 8643 - protein, 12 aa, Severe acute respiratory syndrome-related coronavirus
  REGION 1..12: note = Table B: HLA-DQA1*03:02-B1*03:03L HLA-DRB1*01:03L HLA-DQA1*01:02-B1*06:02L HLA-DQA1*01:01-B1*05:01L HLA-DRB1*08:01L HLA-DQA1*05:05-B1*03:01L
  source 1..12: note = Severe acute respiratory syndrome coronavirus 2
DGADVTKIKPHN

SEQ ID NO: 8644 - protein, 12 aa, Severe acute respiratory syndrome-related coronavirus
  REGION 1..12: note = Table B: HLA-DQA1*03:02-B1*03:03L HLA-DQA1*02:01-B1*03:03L
  source 1..12: note = Severe acute respiratory syndrome coronavirus 2
EGKTFYVLPNDD

SEQ ID NO: 8645 - protein, 10 aa, Severe acute respiratory syndrome-related coronavirus
  REGION 1..10: note = Table B: HLA-DQA1*03:02-B1*03:03L HLA-DQA1*01-B1*05L HLA-DQA1*05:01-B1*02:01L HLA-DQA1*03:01-B1*03:02L
  source 1..10: note = Severe acute respiratory syndrome coronavirus 2
TFYVLPNDDT

SEQ ID NO: 8646 - protein, 10 aa, Severe acute respiratory syndrome-related coronavirus
  REGION 1..10: note = Table B: HLA-DQA1*03:02-B1*03:03L HLA-DQA1*05:01-B1*03:01L HLA-DRB1*04:03L HLA-DRB1*04:05L HLA-DQA1*01:02-B1*06:02L HLA-DPA1*03:01-B1*04:02L HLA-DRB1*14:02L HLA-DQA1*01-B1*05L HLA-DQA1*05:05-B1*03:19L HLA-DQA1*05:01-B1*02:01L
  REGION 1..10: note = CONT. FROM ABOVE: HLA-DQA1*05:05-B1*03:116L HLA-DRB1*09:01L HLA- DPA1*01:03-B1*04:02L HLA-DPA1*02:01-B1*13:01L HLA-DPA1*03:01-B1* 105:01L HLA-DQA1*03:01-B1*03:02L HLA-DPA1*01:02-B1*04:01L HLA-DR B1*16:01L HLA-DQA1*01:03-B1*06:01L HLA-DQA1*02:01-B1*03:03L
  REGION 1..10: note = CONT. FROM ABOVE: HLA-DRB1*15:03L
  source 1..10: note = Severe acute respiratory syndrome coronavirus 2
FYVLPNDDTL

SEQ ID NO: 8647 - protein, 10 aa, Severe acute respiratory syndrome-related coronavirus
  REGION 1..10: note = Table B: HLA-DQA1*03:02-B1*03:03L HLA-DQA1*05:01-B1*03:01L HLA-DRB1*14:01L HLA-DQA1*05:05-B1*03:19L HLA-DQA1*05:05-B1*03:116L HLA-DPA1*02:01-B1*13:01L HLA-DQA1*03:01-B1*03:02L HLA-DRB1*16:01L
  REGION 1..10: note = CONT. FROM ABOVE: HLA-DQA1*02:01-B1*03:03L HLA-DRB1*15:03L
  source 1..10: note = Severe acute respiratory syndrome coronavirus 2
VLPNDDTLRV

SEQ ID NO: 8648 - protein, 13 aa, Severe acute respiratory syndrome-related coronavirus
  REGION 1..13: note = Table B: HLA-DQA1*03:02-B1*03:03L HLA-DQA1*05:01-B1*03:01L HLA-DQA1*01:02-B1*06:02L HLA-DQA1*01:01-B1*05:01L HLA-DPA1*03:01-B1*105:01L HLA-DQA1*05:05-B1*03:01L HLA-DQA1*01:03-B1*06:01L HLA-DQA1*02:01-B1*03:03L
  source 1..13: note = Severe acute respiratory syndrome coronavirus 2
LPNDDTLRVEAFE

SEQ ID NO: 8649 - protein, 19 aa, Severe acute respiratory syndrome-related coronavirus
  REGION 1..19: note = Table B: HLA-DQA1*03:02-B1*03:03L
  source 1..19: note = Severe acute respiratory syndrome coronavirus 2
PNDDTLRVEAFEYYHTTDP

SEQ ID NO: 8650 - protein, 12 aa, Severe acute respiratory syndrome-related coronavirus
  REGION 1..12: note = Table B: HLA-DQA1*03:02-B1*03:03L HLA-DQA1*02:01-B1*03:03L
  source 1..12: note = Severe acute respiratory syndrome coronavirus 2
EAFEYYHTTDPS

SEQ ID NO: 8651 - protein, 10 aa, Severe acute respiratory syndrome-related coronavirus
  REGION 1..10: note = Table B: HLA-DQA1*03:02-B1*03:03L HLA-DQA1*05:01-B1*03:01L HLA-DRB1*04:03L HLA-DRB1*13:03L HLA-DRB1*01:03L HLA-DRB1*04:05M HLA-DQA1*01:02-B1*06:02M HLA-DRB1*01:01L HLA-DRB1*01:02L HLA-DRB4*03:01NL HLA-DRB1*08:77L HLA-DPA1*01:03-B1*03:01L
  REGION 1..10: note = CONT. FROM ABOVE: HLA-DPA1*03:01-B1*04:02L HLA-DRB1*03:01L HLA-D RB1*14:01L HLA-DRB1*11:03L HLA-DRB1*14:02L HLA-DQA1*01:01-B1*05: 01L HLA-DRB1*08:01L HLA-DRB1*11:01L HLA-DQA1*01-B1*05L HLA-DQA1* 05:05-B1*03:19L HLA-DQA1*05:01-B1*02:01L HLA-DRB4*01:01L
  REGION 1..10: note = CONT. FROM ABOVE: HLA-DPA1*01:03-B1*04:01L HLA-DQA1*05:05-B1*03: 116L HLA-DPA1*01:03-B1*04:02L HLA-DRB1*12:01L HLA-DPA1*02:01-B1* 13:01M HLA-DPA1*03:01-B1*105:01M HLA-DQA1*03:01-B1*03:02L HLA-DQ A1*05:05-B1*03:01L HLA-DPA1*01:02-B1*04:01L HLA-DRB1*10:01L
  REGION 1..10: note = CONT. FROM ABOVE: HLA-DRB1*16:01L HLA-DQA1*01:03-B1*06:01M HLA-D RB1*08:02L HLA-DRB1*08:03L HLA-DQA1*02:01-B1*03:03L HLA-DRB1*15: 03L
  source 1..10: note = Severe acute respiratory syndrome coronavirus 2
EYYHTTDPSF

SEQ ID NO: 8652 - protein, 10 aa, Severe acute respiratory syndrome-related coronavirus
  REGION 1..10: note = Table B: HLA-DQA1*03:02-B1*03:03L HLA-DQA1*05:01-B1*03:01L HLA-DRB1*04:03L HLA-DRB1*13:02L HLA-DRB1*13:03L HLA-DRB1*01:03L HLA-DRB1*04:05L HLA-DQA1*01:02-B1*06:02L HLA-DRB1*01:01L HLA-DRB1*01:02L HLA-DRB1*08:77L HLA-DRB3*02:01L
  REGION 1..10: note = CONT. FROM ABOVE: HLA-DPA1*03:01-B1*04:02L HLA-DRB1*14:01L HLA-D RB1*11:03L HLA-DRB1*14:02L HLA-DQA1*01:01-B1*05:01L HLA-DRB1*08: 01L HLA-DQA1*01-B1*05L HLA-DQA1*05:05-B1*03:19L HLA-DQA1*05:01-B 1*02:01L HLA-DPA1*01:03-B1*04:01L HLA-DQA1*05:05-B1*03:116L
  REGION 1..10: note = CONT. FROM ABOVE: HLA-DRB1*09:01L HLA-DPA1*01:03-B1*04:02L HLA-D RB1*12:01L HLA-DPA1*02:01-B1*13:01L HLA-DPA1*03:01-B1*105:01L HL A-DQA1*03:01-B1*03:02L HLA-DQA1*05:05-B1*03:01L HLA-DPA1*01:02-B 1*04:01L HLA-DRB1*07:01L HLA-DRB1*16:01L
  REGION 1..10: note = CONT. FROM ABOVE: HLA-DQA1*01:03-B1*06:01L HLA-DRB1*08:03L HLA-D QA1*02:01-B1*03:03L HLA-DRB1*15:03L
  source 1..10: note = Severe acute respiratory syndrome coronavirus 2
YYHTTDPSFL

SEQ ID NO: 8653 - protein, 10 aa, Severe acute respiratory syndrome-related coronavirus
  REGION 1..10: note = Table B: HLA-DQA1*03:02-B1*03:03L HLA-DQA1*05:01-B1*03:01L HLA-DRB1*04:03L HLA-DQA1*01-B1*05L HLA-DQA1*05:01-B1*02:01L HLA-DRB1*12:01L HLA-DQA1*03:01-B1*03:02L HLA-DRB1*16:01L HLA-DQA1*01:03-B1*06:01L HLA-DQA1*02:01-B1*03:03L
  REGION 1..10: note = CONT. FROM ABOVE: HLA-DRB1*15:03L
  source 1..10: note = Severe acute respiratory syndrome coronavirus 2
YHTTDPSFLG

SEQ ID NO: 8654 - protein, 10 aa, Severe acute respiratory syndrome-related coronavirus
  REGION 1..10: note = Table B: HLA-DQA1*03:02-B1*03:03L HLA-DQA1*05:01-B1*03:01M HLA-DRB1*14:04M HLA-DRB1*04:01L HLA-DRB1*04:03M HLA-DRB1*13:02M HLA-DRB1*13:03H HLA-DRB1*01:03H HLA-DRB1*04:02M HLA-DRB1*04:05H HLA-DQA1*01:02-B1*06:02H HLA-DRB1*01:01L HLA-DRB4*03:01NM
  REGION 1..10: note = CONT. FROM ABOVE: HLA-DRB1*08:04L HLA-DRB1*08:77H HLA-DRB3*02:01 L HLA-DPA1*01:03-B1*03:01H HLA-DPA1*03:01-B1*04:02M HLA-DRB1*03: 01H HLA-DRB1*14:01M HLA-DRB1*11:02H HLA-DRB1*11:03H HLA-DRB1*11: 04H HLA-DRB1*14:02M HLA-DRB1*08:01L HLA-DRB1*11:01M
  REGION 1..10: note = CONT. FROM ABOVE: HLA-DRB5*01:01H HLA-DQA1*01-B1*05H HLA-DQA1*05 :05-B1*03:19H HLA-DRB4*02:01NL HLA-DQA1*05:01-B1*02:01H HLA-DRB1 *13:01L HLA-DRB4*01:01H HLA-DPA1*01:03-B1*04:01H HLA-DQA1*05:05- B1*03:116H HLA-DRB1*09:01L HLA-DPA1*01:03-B1*04:02H
  REGION 1..10: note = CONT. FROM ABOVE: HLA-DRB1*12:01H HLA-DRB1*12:02L HLA-DPA1*02:01 -B1*13:01L HLA-DPA1*03:01-B1*105:01M HLA-DQA1*03:01-B1*03:02L HL A-DRB1*14:54H HLA-DPA1*01:03-B1*104:01H HLA-DQA1*05:05-B1*03:01L HLA-DRB1*14:17L HLA-DPA1*01:02-B1*04:01M HLA-DRB1*10:01H
  REGION 1..10: note = CONT. FROM ABOVE: HLA-DRB1*16:01H HLA-DQA1*01:03-B1*06:01L HLA -DRB1*04:08L HLA-DRB1*08:02M HLA-DRB1*08:03L HLA-DQA1*02:01-B1 *03:03L HLA-DRB1*15:01M HLA-DRB1*15:03M
  source 1..10: note = Severe acute respiratory syndrome coronavirus 2
TTDPSFLGRY

SEQ ID NO: 8655 - protein, 10 aa, Severe acute respiratory syndrome-related coronavirus
  REGION 1..10: note = Table B: HLA-DQA1*03:02-B1*03:03L HLA-DQA1*05:05-B1*03:19L HLA-DQA1*05:01-B1*02:01L HLA-DQA1*03:01-B1*03:02L
  source 1..10: note = Severe acute respiratory syndrome coronavirus 2
TDPSFLGRYM

SEQ ID NO: 8656 - protein, 10 aa, Severe acute respiratory syndrome-related coronavirus
  REGION 1..10: note = Table B: HLA-DQA1*03:02-B1*03:03L HLA-DQA1*05:01-B1*03:01L HLA-DRB1*13:03L HLA-DQA1*01:02-B1*06:02L HLA-DQA1*01-B1*05L HLA-DQA1*05:05-B1*03:19L HLA-DQA1*05:05-B1*03:116L HLA-DPA1*02:01-B1*13:01L HLA-DPA1*03:01-B1*105:01L
  REGION 1..10: note = CONT. FROM ABOVE: HLA-DPA1*01:02-B1*04:01L HLA-DRB1*08:03L HLA-D RB1*15:03L
  source 1..10: note = Severe acute respiratory syndrome coronavirus 2
YPQVNGLTSI

SEQ ID NO: 8657 - protein, 12 aa, Severe acute respiratory syndrome-related coronavirus
  REGION 1..12: note = Table B: HLA-DQA1*03:02-B1*03:03L HLA-DQA1*05:01-B1*03:01L HLA-DRB1*04:03L HLA-DRB1*13:02L HLA-DRB1*01:03L HLA-DRB1*04:02L HLA-DRB1*04:05L HLA-DRB1*01:02L HLA-DRB4*03:01NL HLA-DRB1*08:04L HLA-DRB3*02:01L HLA-DPA1*01:03-B1*03:01L
  REGION 1..12: note = CONT. FROM ABOVE: HLA-DPA1*03:01-B1*04:02L HLA-DRB1*14:01L HLA-D QA1*05:05-B1*03:19L HLA-DQA1*05:01-B1*02:01L HLA-DRB1*04:10L HLA -DRB1*12:01L HLA-DRB1*12:02L HLA-DPA1*02:01-B1*13:01L HLA-DPA1*0 3:01-B1*105:01L HLA-DRB1*14:54L HLA-DQA1*05:05-B1*03:01L
  REGION 1..12: note = CONT. FROM ABOVE: HLA-DRB1*14:17L HLA-DPA1*01:02-B1*04:01L HLA-D RB1*16:01L HLA-DRB1*04:08L HLA-DRB1*15:03L
  source 1..12: note = Severe acute respiratory syndrome coronavirus 2
VNGLTSIKWADN

SEQ ID NO: 8658 - protein, 10 aa, Severe acute respiratory syndrome-related coronavirus
  REGION 1..10: note = Table B: HLA-DQA1*03:02-B1*03:03L HLA-DRB1*04:03L HLA-DQA1*01:02-B1*06:02L HLA-DQA1*01-B1*05L HLA-DPA1*03:01-B1*105:01L HLA-DQA1*03:01-B1*03:02L HLA-DPA1*01:02-B1*04:01L HLA-DQA1*01:03-B1*06:01L
  REGION 1..10: note = CONT. FROM ABOVE: HLA-DQA1*02:01-B1*03:03L
  source 1..10: note = Severe acute respiratory syndrome coronavirus 2
LTSIKWADNN

SEQ ID NO: 8659 - protein, 10 aa, Severe acute respiratory syndrome-related coronavirus
  REGION 1..10: note = Table B: HLA-DQA1*03:02-B1*03:03L HLA-DQA1*01:02-B1*06:02L HLA-DQA1*05:05-B1*03:19L HLA-DPA1*03:01-B1*105:01L HLA-DPA1*01:03-B1*104:01L HLA-DRB1*15:03L
  source 1..10: note = Severe acute respiratory syndrome coronavirus 2
ATALLTLQQI

SEQ ID NO: 8660 - protein, 10 aa, Severe acute respiratory syndrome-related coronavirus
  REGION 1..10: note = Table B: HLA-DQA1*03:02-B1*03:03L HLA-DQA1*05:01-B1*03:01L HLA-DPA1*03:01-B1*04:02L HLA-DRB1*09:01L HLA-DQA1*03:01-B1*03:02L HLA-DQA1*02:01-B1*03:03L HLA-DRB1*15:03L
  source 1..10: note = Severe acute respiratory syndrome coronavirus 2
ALLTLQQIEL

SEQ ID NO: 8661 - protein, 10 aa, Severe acute respiratory syndrome-related coronavirus
  REGION 1..10: note = Table B: HLA-DQA1*03:02-B1*03:03M HLA-DQA1*05:01-B1*03:01L HLA-DRB1*13:03L HLA-DPA1*03:01-B1*04:02L HLA-DRB1*11:02L HLA-DRB1*11:01L HLA-DQA1*05:05-B1*03:19M HLA-DQA1*05:05-B1*03:116L HLA-DRB1*09:01M
  REGION 1..10: note = CONT. FROM ABOVE: HLA-DPA1*01:03-B1*04:02L HLA-DQA1*03:01-B1*03: 02M HLA-DPA1*01:03-B1*104:01L HLA-DPA1*01:02-B1*04:01L HLA-DRB1* 16:01L HLA-DQA1*02:01-B1*03:03L
  source 1..10: note = Severe acute respiratory syndrome coronavirus 2
IELKFNPPAL

SEQ ID NO: 8662 - protein, 11 aa, Severe acute respiratory syndrome-related coronavirus
  REGION 1..11: note = Table B: HLA-DQA1*03:02-B1*03:03L HLA-DRB1*04:01L HLA-DRB1*04:03L HLA-DRB1*13:02L HLA-DRB1*04:05L HLA-DRB4*03:01NL HLA-DPA1*03:01-B1*04:02L HLA-DRB1*14:01L HLA-DRB1*11:01L HLA-DPA1*02:01-B1*13:01L HLA-DQA1*03:01-B1*03:02L
  REGION 1..11: note = CONT. FROM ABOVE: HLA-DQA1*05:05-B1*03:01L HLA-DPA1*01:02-B1*04: 01L HLA-DQA1*01:03-B1*06:01L HLA-DRB1*08:02L
  source 1..11: note = Severe acute respiratory syndrome coronavirus 2
KFNPPALQDAY

SEQ ID NO: 8663 - protein, 17 aa, Severe acute respiratory syndrome-related coronavirus
  REGION 1..17: note = Table B: HLA-DQA1*03:02-B1*03:03L HLA-DQA1*05:01-B1*03:01L HLA-DRB1*13:02L HLA-DRB1*04:02L HLA-DRB1*04:05L HLA-DRB1*08:04L HLA-DPA1*01:03-B1*03:01L HLA-DRB1*14:01L HLA-DQA1*01:01-B1*05:01L HLA-DRB1*11:01L
  REGION 1..17: note = CONT. FROM ABOVE: HLA-DQA1*05:05-B1*03:19L HLA-DPA1*01:03-B1*04: 02L HLA-DRB1*12:01L HLA-DRB3*01:01L HLA-DPA1*02:01-B1*13:01L HLA -DQA1*05:05-B1*03:01L HLA-DRB1*15:03L
  source 1..17: note = Severe acute respiratory syndrome coronavirus 2
NPPALQDAYYRARAGEA

SEQ ID NO: 8664 - protein, 12 aa, Severe acute respiratory syndrome-related coronavirus
  REGION 1..12: note = Table B: HLA-DQA1*03:02-B1*03:03L HLA-DQA1*05:01-B1*03:01L HLA-DRB1*04:03L HLA-DRB1*13:02L HLA-DRB1*13:03L HLA-DRB1*01:03L HLA-DRB1*04:02L HLA-DRB1*04:05L HLA-DQA1*01:02-B1*06:02L HLA-DRB1*01:02L HLA-DRB4*03:01NL HLA-DRB1*08:04L HLA-DRB1*08:77L
  REGION 1..12: note = CONT. FROM ABOVE: HLA-DRB1*14:01L HLA-DRB1*11:03L HLA-DRB1*11:04 L HLA-DRB1*14:02L HLA-DQA1*01:01-B1*05:01L HLA-DRB1*08:01L HLA-D RB1*11:01L HLA-DQA1*01-B1*05L HLA-DQA1*05:05-B1*03:19L HLA-DQA1* 05:01-B1*02:01L HLA-DRB1*04:10L HLA-DRB1*09:01L HLA-DRB1*12:01L
  REGION 1..12: note = CONT. FROM ABOVE: HLA-DRB1*12:02L HLA-DPA1*02:01-B1*13:01L HLA-D PA1*03:01-B1*105:01L HLA-DRB1*14:54L HLA-DQA1*05:05-B1*03:01L HL A-DRB1*14:17L HLA-DPA1*01:02-B1*04:01L HLA-DRB1*07:01L HLA-DRB1* 10:01L HLA-DQA1*01:03-B1*06:01L HLA-DRB1*04:08L HLA-DRB1*08:03L
  REGION 1..12: note = CONT. FROM ABOVE: HLA-DRB1*15:03L
  source 1..12: note = Severe acute respiratory syndrome coronavirus 2
DAYYRARAGEAA

SEQ ID NO: 8665 - protein, 12 aa, Severe acute respiratory syndrome-related coronavirus
  REGION 1..12: note = Table B: HLA-DQA1*03:02-B1*03:03L HLA-DRB1*01:01L HLA-DRB1*08:04L HLA-DRB1*11:04L HLA-DRB1*11:01L HLA-DPA1*02:01-B1*13:01L HLA-DPA1*03:01-B1*105:01L HLA-DRB1*10:01L
  source 1..12: note = Severe acute respiratory syndrome coronavirus 2
AYYRARAGEAAN

SEQ ID NO: 8666 - protein, 10 aa, Severe acute respiratory syndrome-related coronavirus
  REGION 1..10: note = Table B: HLA-DQA1*03:02-B1*03:03L HLA-DRB1*04:03L HLA-DRB1*04:02L HLA-DQA1*05:01-B1*02:01L HLA-DQA1*03:01-B1*03:02L HLA-DQA1*01:03-B1*06:01L HLA-DQA1*02:01-B1*03:03L
  source 1..10: note = Severe acute respiratory syndrome coronavirus 2
TVGELGDVRE

SEQ ID NO: 8667 - protein, 10 aa, Severe acute respiratory syndrome-related coronavirus
  REGION 1..10: note = Table B: HLA-DQA1*03:02-B1*03:03L HLA-DQA1*05:01-B1*03:01L HLA-DRB1*04:03L HLA-DRB1*13:03L HLA-DRB1*01:03L HLA-DRB1*04:02L HLA-DRB1*04:05L HLA-DRB4*03:01NL HLA-DQA1*01:01-B1*05:01L HLA-DQA1*01-B1*05L HLA-DQA1*05:01-B1*02:01L HLA-DRB1*04:10L
  REGION 1..10: note = CONT. FROM ABOVE: HLA-DRB1*12:01L HLA-DQA1*03:01-B1*03:02L HLA-D RB1*14:54L HLA-DQA1*05:05-B1*03:01L HLA-DRB1*14:17L HLA-DPA1*01: 02-B1*04:01L HLA-DRB1*16:01L HLA-DQA1*01:03-B1*06:01L HLA-DRB1*0 4:08L HLA-DQA1*02:01-B1*03:03L
  source 1..10: note = Severe acute respiratory syndrome coronavirus 2
VGELGDVRET

SEQ ID NO: 8668 - protein, 10 aa, Severe acute respiratory syndrome-related coronavirus
  REGION 1..10: note = Table B: HLA-DQA1*03:02-B1*03:03H HLA-DQA1*05:01-B1*03:01M HLA-DRB1*04:01L HLA-DRB1*13:02L HLA-DRB1*13:03L HLA-DRB1*01:03L HLA-DQA1*01:02-B1*06:02L HLA-DRB4*03:01NL HLA-DRB1*08:77M HLA-DPA1*03:01-B1*04:02M HLA-DRB1*03:01L HLA-DRB1*14:01L
  REGION 1..10: note = CONT. FROM ABOVE: HLA-DRB1*11:02L HLA-DRB1*14:02L HLA-DRB1*08:01 L HLA-DRB1*11:01L HLA-DQA1*01-B1*05L HLA-DQA1*05:05-B1*03:19M HL A-DQA1*05:01-B1*02:01L HLA-DRB4*01:01M HLA-DPA1*01:03-B1*04:01M HLA-DQA1*05:05-B1*03:116M HLA-DRB1*09:01M
  REGION 1..10: note = CONT. FROM ABOVE: HLA-DPA1*01:03-B1*04:02M HLA-DRB1*12:01L HLA-D QA1*03:01-B1*03:02H HLA-DPA1*01:03-B1*104:01M HLA-DPA1*01:02-B1* 04:01L HLA-DRB1*10:01L HLA-DRB1*16:01L HLA-DQA1*01:03-B1*06:01L HLA-DQA1*02:01-B1*03:03L HLA-DRB1*15:03L
  source 1..10: note = Severe acute respiratory syndrome coronavirus 2
GELGDVRETM

SEQ ID NO: 8669 - protein, 10 aa, Severe acute respiratory syndrome-related coronavirus
  REGION 1..10: note = Table B: HLA-DQA1*03:02-B1*03:03L HLA-DQA1*01:02-B1*06:02L HLA-DPA1*03:01-B1*105:01L HLA-DQA1*03:01-B1*03:02L HLA-DQA1*01:03-B1*06:01L
  source 1..10: note = Severe acute respiratory syndrome coronavirus 2
ETMSYLFQHA

SEQ ID NO: 8670 - protein, 10 aa, Severe acute respiratory syndrome-related coronavirus
  REGION 1..10: note = Table B: HLA-DQA1*03:02-B1*03:03L HLA-DQA1*03:01-B1*03:02L HLA-DQA1*01:03-B1*06:01L HLA-DQA1*02:01-B1*03:03L
  source 1..10: note = Severe acute respiratory syndrome coronavirus 2
MSYLFQHANL

SEQ ID NO: 8671 - protein, 10 aa, Severe acute respiratory syndrome-related coronavirus
  REGION 1..10: note = Table B: HLA-DQA1*03:02-B1*03:03L HLA-DRB1*04:03L HLA-DRB1*13:03L HLA-DRB1*01:03L HLA-DRB1*04:02L HLA-DRB1*04:05L HLA-DRB4*03:01NL HLA-DQA1*01-B1*05L HLA-DRB1*04:10L HLA-DQA1*03:01-B1*03:02L HLA-DRB1*14:54L HLA-DRB1*14:17L
  REGION 1..10: note = CONT. FROM ABOVE: HLA-DRB1*16:01L HLA-DQA1*02:01-B1*03:03L
  source 1..10: note = Severe acute respiratory syndrome coronavirus 2
YLFQHANLDS

SEQ ID NO: 8672 - protein, 10 aa, Severe acute respiratory syndrome-related coronavirus
  REGION 1..10: note = Table B: HLA-DQA1*03:02-B1*03:03L HLA-DQA1*05:05-B1*03:19L HLA-DPA1*01:03-B1*104:01L
  source 1..10: note = Severe acute respiratory syndrome coronavirus 2
GQQQTTLKGV

SEQ ID NO: 8673 - protein, 10 aa, Severe acute respiratory syndrome-related coronavirus
  REGION 1..10: note = Table B: HLA-DQA1*03:02-B1*03:03L HLA-DQA1*03:01-B1*03:02L
  source 1..10: note = Severe acute respiratory syndrome coronavirus 2
QQTTLKGVEA

SEQ ID NO: 8674 - protein, 10 aa, Severe acute respiratory syndrome-related coronavirus
  REGION 1..10: note = Table B: HLA-DQA1*03:02-B1*03:03L HLA-DQA1*05:05-B1*03:19L
  source 1..10: note = Severe acute respiratory syndrome coronavirus 2
QTTLKGVEAV

SEQ ID NO: 8675 - protein, 10 aa, Severe acute respiratory syndrome-related coronavirus
  REGION 1..10: note = Table B: HLA-DQA1*03:02-B1*03:03L HLA-DQA1*05:01-B1*03:01L HLA-DQA1*01:02-B1*06:02L HLA-DQA1*05:01-B1*02:01L HLA-DPA1*03:01-B1*105:01L HLA-DQA1*03:01-B1*03:02L HLA-DPA1*01:02-B1*04:01L HLA-DQA1*02:01-B1*03:03L
  REGION 1..10: note = CONT. FROM ABOVE: HLA-DRB1*15:03L
  source 1..10: note = Severe acute respiratory syndrome coronavirus 2
TTLKGVEAVM

SEQ ID NO: 8676 - protein, 10 aa, Severe acute respiratory syndrome-related coronavirus
  REGION 1..10: note = Table B: HLA-DQA1*03:02-B1*03:03L HLA-DQA1*05:01-B1*03:01L HLA-DRB1*04:01L HLA-DRB1*04:03L HLA-DRB1*13:02L HLA-DRB1*13:03L HLA-DRB1*01:03L HLA-DQA1*01:02-B1*06:02M HLA-DRB4*03:01NL HLA-DRB1*08:77L HLA-DPA1*01:03-B1*03:01L
  REGION 1..10: note = CONT. FROM ABOVE: HLA-DPA1*03:01-B1*04:02L HLA-DRB1*03:01L HLA-D RB1*14:01L HLA-DRB1*11:02L HLA-DRB1*14:02M HLA-DRB1*11:01L HLA-D QA1*01-B1*05L HLA-DQA1*05:05-B1*03:19M HLA-DQA1*05:01-B1*02:01L HLA-DRB4*01:01L HLA-DPA1*01:03-B1*04:01L
  REGION 1..10: note = CONT. FROM ABOVE: HLA-DQA1*05:05-B1*03:116L HLA-DPA1*01:03-B1*04 :02L HLA-DRB1*12:01L HLA-DPA1*02:01-B1*13:01L HLA-DPA1*03:01-B1* 105:01L HLA-DQA1*03:01-B1*03:02L HLA-DPA1*01:03-B1*104:01L HLA-D QA1*05:05-B1*03:01L HLA-DPA1*01:02-B1*04:01L HLA-DRB1*10:01L
  REGION 1..10: note = CONT. FROM ABOVE: HLA-DRB1*16:01L HLA-DQA1*01:03-B1*06:01L HLA-D RB1*08:02L HLA-DQA1*02:01-B1*03:03M HLA-DRB1*15:03L
  source 1..10: note = Severe acute respiratory syndrome coronavirus 2
TLKGVEAVMY

SEQ ID NO: 8677 - protein, 10 aa, Severe acute respiratory syndrome-related coronavirus
  REGION 1..10: note = Table B: HLA-DQA1*03:02-B1*03:03L HLA-DQA1*05:05-B1*03:19L HLA-DQA1*03:01-B1*03:02L
  source 1..10: note = Severe acute respiratory syndrome coronavirus 2
VEAVMYMGTL

SEQ ID NO: 8678 - protein, 13 aa, Severe acute respiratory syndrome-related coronavirus
  REGION 1..13: note = Table B: HLA-DQA1*03:02-B1*03:03L HLA-DRB1*01:03L HLA-DRB1*01:02L HLA-DRB1*08:04L HLA-DPA1*01:03-B1*03:01L HLA-DQA1*01-B1*05L HLA-DPA1*01:03-B1*04:01L HLA-DRB1*16:01L HLA-DRB1*04:08L
  source 1..13: note = Severe acute respiratory syndrome coronavirus 2
VMYMGTLSYEQFK

SEQ ID NO: 8679 - protein, 12 aa, Severe acute respiratory syndrome-related coronavirus
  REGION 1..12: note = Table B: HLA-DQA1*03:02-B1*03:03L HLA-DRB1*04:04L HLA-DRB4*03:01NL HLA-DRB1*08:04L HLA-DRB1*11:03L HLA-DQA1*01:01-B1*05:01L HLA-DQA1*05:05-B1*03:19L HLA-DQA1*05:01-B1*02:01L HLA-DRB1*14:54L
  REGION 1..12: note = CONT. FROM ABOVE: HLA-DPA1*01:03-B1*104:01L HLA-DQA1*05:05-B1*03 :01L HLA-DRB1*07:01L HLA-DRB1*10:01L HLA-DRB1*08:03L
  source 1..12: note = Severe acute respiratory syndrome coronavirus 2
MGTLSYEQFKKG

SEQ ID NO: 8680 - protein, 10 aa, Severe acute respiratory syndrome-related coronavirus
  REGION 1..10: note = Table B: HLA-DQA1*03:02-B1*03:03L HLA-DQA1*05:05-B1*03:19M HLA-DPA1*01:03-B1*104:01L
  source 1..10: note = Severe acute respiratory syndrome coronavirus 2
YEQFKKGVQI

SEQ ID NO: 8681 - protein, 10 aa, Severe acute respiratory syndrome-related coronavirus
  REGION 1..10: note = Table B: HLA-DQA1*03:02-B1*03:03L HLA-DQA1*05:01-B1*03:01L HLA-DRB1*04:03L HLA-DRB1*01:03L HLA-DRB1*04:05L HLA-DQA1*01:02-B1*06:02L HLA-DRB1*01:01L HLA-DRB1*01:02L HLA-DPA1*03:01-B1*04:02L HLA-DQA1*01:01-B1*05:01L
  REGION 1..10: note = CONT. FROM ABOVE: HLA-DQA1*01-B1*05L HLA-DQA1*05:05-B1*03:19L HL A-DQA1*05:01-B1*02:01L HLA-DPA1*01:03-B1*04:01L HLA-DRB1*12:01L HLA-DPA1*02:01-B1*13:01M HLA-DPA1*03:01-B1*105:01L HLA-DQA1*03:0 1-B1*03:02L HLA-DQA1*05:05-B1*03:01L HLA-DPA1*01:02-B1*04:01L
  REGION 1..10: note = CONT. FROM ABOVE: HLA-DRB1*16:01L HLA-DQA1*01:03-B1*06:01M HLA-D QA1*02:01-B1*03:03L HLA-DRB1*15:03L
  source 1..10: note = Severe acute respiratory syndrome coronavirus 2
KYLVQQESPF

SEQ ID NO: 8682 - protein, 10 aa, Severe acute respiratory syndrome-related coronavirus
  REGION 1..10: note = Table B: HLA-DQA1*03:02-B1*03:03L HLA-DQA1*05:01-B1*03:01L HLA-DRB1*04:03L HLA-DQA1*01:02-B1*06:02L HLA-DRB1*01:02L HLA-DPA1*03:01-B1*04:02L HLA-DRB1*14:01L HLA-DRB1*14:02L HLA-DQA1*01-B1*05L HLA-DQA1*05:05-B1*03:19L
  REGION 1..10: note = CONT. FROM ABOVE: HLA-DQA1*05:01-B1*02:01L HLA-DQA1*05:05-B1*03: 116L HLA-DRB1*09:01L HLA-DRB1*12:01L HLA-DPA1*02:01-B1*13:01L HL A-DPA1*03:01-B1*105:01L HLA-DQA1*03:01-B1*03:02L HLA-DPA1*01:03- B1*104:01L HLA-DPA1*01:02-B1*04:01L HLA-DRB1*16:01L
  REGION 1..10: note = CONT. FROM ABOVE: HLA-DQA1*01:03-B1*06:01L HLA-DQA1*02:01-B1*03: 03L HLA-DRB1*15:03L
  source 1..10: note = Severe acute respiratory syndrome coronavirus 2
YLVQQESPFV

SEQ ID NO: 8683 - protein, 10 aa, Severe acute respiratory syndrome-related coronavirus
  REGION 1..10: note = Table B: HLA-DQA1*03:02-B1*03:03L HLA-DQA1*05:01-B1*03:01L HLA-DRB1*04:03L HLA-DQA1*01:02-B1*06:02L HLA-DRB1*01:02L HLA-DPA1*03:01-B1*04:02L HLA-DRB1*14:01L HLA-DQA1*01-B1*05L HLA-DQA1*05:05-B1*03:19L HLA-DQA1*05:01-B1*02:01L
  REGION 1..10: note = CONT. FROM ABOVE: HLA-DRB1*12:01L HLA-DPA1*03:01-B1*105:01L HLA- DQA1*03:01-B1*03:02L HLA-DPA1*01:02-B1*04:01L HLA-DRB1*16:01L HL A-DQA1*01:03-B1*06:01L HLA-DQA1*02:01-B1*03:03L HLA-DRB1*15:03L
  source 1..10: note = Severe acute respiratory syndrome coronavirus 2
LVQQESPFVM

SEQ ID NO: 8684 - protein, 10 aa, Severe acute respiratory syndrome-related coronavirus
  REGION 1..10: note = Table B: HLA-DQA1*03:02-B1*03:03L HLA-DQA1*03:01-B1*03:02L
  source 1..10: note = Severe acute respiratory syndrome coronavirus 2
VQQESPFVMM

SEQ ID NO: 8685 - protein, 10 aa, Severe acute respiratory syndrome-related coronavirus
  REGION 1..10: note = Table B: HLA-DQA1*03:02-B1*03:03L HLA-DQA1*05:05-B1*03:19L
  source 1..10: note = Severe acute respiratory syndrome coronavirus 2
QESPFVMMSA

SEQ ID NO: 8686 - protein, 12 aa, Severe acute respiratory syndrome-related coronavirus
  REGION 1..12: note = Table B: HLA-DQA1*03:02-B1*03:03L HLA-DQA1*05:01-B1*03:01L HLA-DRB1*04:01L HLA-DRB1*13:02L HLA-DQA1*01:02-B1*06:02L HLA-DRB1*01:01L HLA-DRB1*08:04L HLA-DRB1*08:77L HLA-DRB3*02:01L HLA-DPA1*01:03-B1*03:01L HLA-DPA1*03:01-B1*04:02L
  REGION 1..12: note = CONT. FROM ABOVE: HLA-DRB1*14:01L HLA-DRB1*11:03L HLA-DRB1*11:04 L HLA-DRB1*14:02L HLA-DRB1*08:01L HLA-DRB1*11:01L HLA-DRB5*01:01 L HLA-DQA1*01-B1*05L HLA-DQA1*05:05-B1*03:19L HLA-DQA1*05:01-B1* 02:01L HLA-DRB4*01:01L HLA-DRB1*09:01L HLA-DRB1*12:02L
  REGION 1..12: note = CONT. FROM ABOVE: HLA-DRB3*01:01L HLA-DPA1*02:01-B1*13:01L HLA-D PA1*03:01-B1*105:01L HLA-DPA1*01:03-B1*104:01L HLA-DQA1*05:05-B1 *03:01L HLA-DRB1*07:01L HLA-DRB1*08:02L HLA-DRB1*08:03L HLA-DRB1 *15:01L
  source 1..12: note = Severe acute respiratory syndrome coronavirus 2
SPFVMMSAPPAQ

SEQ ID NO: 8687 - protein, 10 aa, Severe acute respiratory syndrome-related coronavirus
  REGION 1..10: note = Table B: HLA-DQA1*03:02-B1*03:03L HLA-DQA1*05:01-B1*03:01L HLA-DRB1*04:01L HLA-DRB1*04:03L HLA-DRB1*13:02L HLA-DRB1*13:03L HLA-DRB1*01:03L HLA-DQA1*01:02-B1*06:02L HLA-DRB4*03:01NL HLA-DRB1*08:77L HLA-DPA1*01:03-B1*03:01L
  REGION 1..10: note = CONT. FROM ABOVE: HLA-DPA1*03:01-B1*04:02L HLA-DRB1*03:01L HLA-D RB1*14:01L HLA-DRB1*11:02L HLA-DRB1*14:02L HLA-DRB1*11:01L HLA-D QA1*01-B1*05L HLA-DQA1*05:05-B1*03:19L HLA-DQA1*05:01-B1*02:01L HLA-DRB4*01:01L HLA-DPA1*01:03-B1*04:01L
  REGION 1..10: note = CONT. FROM ABOVE: HLA-DQA1*05:05-B1*03:116L HLA-DPA1*01:03-B1*04 :02L HLA-DRB1*12:01L HLA-DPA1*02:01-B1*13:01L HLA-DPA1*03:01-B1* 105:01L HLA-DPA1*01:03-B1*104:01L HLA-DQA1*05:05-B1*03:01L HLA-D PA1*01:02-B1*04:01L HLA-DRB1*10:01L HLA-DRB1*16:01L
  REGION 1..10: note = CONT. FROM ABOVE: HLA-DQA1*01:03-B1*06:01L HLA-DRB1*08:02L HLA-D QA1*02:01-B1*03:03L HLA-DRB1*15:03L
  source 1..10: note = Severe acute respiratory syndrome coronavirus 2
VMMSAPPAQY

SEQ ID NO: 8688 - protein, 10 aa, Severe acute respiratory syndrome-related coronavirus
  REGION 1..10: note = Table B: HLA-DQA1*03:02-B1*03:03L HLA-DQA1*05:01-B1*03:01L HLA-DQA1*01:02-B1*06:02L HLA-DRB1*01:02L HLA-DPA1*03:01-B1*04:02L HLA-DRB1*14:02L HLA-DQA1*05:05-B1*03:19L HLA-DQA1*05:01-B1*02:01L
  REGION 1..10: note = CONT. FROM ABOVE: HLA-DQA1*05:05-B1*03:116L HLA-DRB1*09:01L HLA- DPA1*03:01-B1*105:01L HLA-DQA1*03:01-B1*03:02L HLA-DPA1*01:02-B1 *04:01L HLA-DQA1*02:01-B1*03:03L HLA-DRB1*15:03L
  source 1..10: note = Severe acute respiratory syndrome coronavirus 2
MSAPPAQYEL

SEQ ID NO: 8689 - protein, 10 aa, Severe acute respiratory syndrome-related coronavirus
  REGION 1..10: note = Table B: HLA-DQA1*03:02-B1*03:03L HLA-DQA1*05:01-B1*03:01L HLA-DRB1*01:03L HLA-DRB1*04:05L HLA-DQA1*01:02-B1*06:02M HLA-DRB1*08:77L HLA-DPA1*01:03-B1*03:01L HLA-DPA1*03:01-B1*04:02L HLA-DRB1*03:01L HLA-DRB1*14:02L
  REGION 1..10: note = CONT. FROM ABOVE: HLA-DQA1*05:05-B1*03:19L HLA-DQA1*05:01-B1*02: 01L HLA-DRB4*01:01L HLA-DPA1*01:03-B1*04:01L HLA-DQA1*05:05-B1*0 3:116L HLA-DPA1*01:03-B1*04:02L HLA-DPA1*02:01-B1*13:01L HLA-DPA 1*03:01-B1*105:01L HLA-DPA1*01:02-B1*04:01L HLA-DRB1*16:01L
  REGION 1..10: note = CONT. FROM ABOVE: HLA-DQA1*01:03-B1*06:01L HLA-DRB1*08:02L HLA-D QA1*02:01-B1*03:03M HLA-DRB1*15:03L
  source 1..10: note = Severe acute respiratory syndrome coronavirus 2
AQYELKHGTF

SEQ ID NO: 8690 - protein, 15 aa, Severe acute respiratory syndrome-related coronavirus
  REGION 1..15: note = Table B: HLA-DQA1*03:02-B1*03:03L HLA-DQA1*05:01-B1*03:01L HLA-DRB1*13:02L HLA-DRB1*04:05L HLA-DRB1*01:02L HLA-DQA1*05:05-B1*03:19L HLA-DRB1*12:01L HLA-DQA1*03:01-B1*03:02L HLA-DPA1*01:03-B1*104:01L
  REGION 1..15: note = CONT. FROM ABOVE: HLA-DRB1*04:08L
  source 1..15: note = Severe acute respiratory syndrome coronavirus 2
YELKHGTFTCASEYT

SEQ ID NO: 8691 - protein, 15 aa, Severe acute respiratory syndrome-related coronavirus
  REGION 1..15: note = Table B: HLA-DQA1*03:02-B1*03:03L HLA-DRB1*04:03L HLA-DRB1*01:03L HLA-DRB1*01:02L HLA-DRB1*08:04L HLA-DPA1*01:03-B1*04:02L HLA-DRB1*12:01L HLA-DQA1*03:01-B1*03:02L HLA-DRB1*16:01L HLA-DRB1*04:08L
  REGION 1..15: note = CONT. FROM ABOVE: HLA-DRB1*15:03L
  source 1..15: note = Severe acute respiratory syndrome coronavirus 2
HGTFTCASEYTGNYQ

SEQ ID NO: 8692 - protein, 12 aa, Severe acute respiratory syndrome-related coronavirus
  REGION 1..12: note = Table B: HLA-DQA1*03:02-B1*03:03L HLA-DQA1*05:01-B1*03:01L HLA-DPA1*01:03-B1*03:01L HLA-DPA1*03:01-B1*04:02L HLA-DPA1*01:03-B1*04:01L HLA-DPA1*03:01-B1*105:01L HLA-DPA1*01:03-B1*104:01L HLA-DRB1*15:03L
  source 1..12: note = Severe acute respiratory syndrome coronavirus 2
SEYTGNYQCGHY

SEQ ID NO: 8693 - protein, 18 aa, Severe acute respiratory syndrome-related coronavirus
  REGION 1..18: note = Table B: HLA-DQA1*03:02-B1*03:03L HLA-DRB3*02:01L HLA-DRB4*01:01L HLA-DQA1*05:05-B1*03:116L
  source 1..18: note = Severe acute respiratory syndrome coronavirus 2
HYKHITSKETLYCIDGAL

SEQ ID NO: 8694 - protein, 10 aa, Severe acute respiratory syndrome-related coronavirus
  REGION 1..10: note = Table B: HLA-DQA1*03:02-B1*03:03L HLA-DQA1*05:01-B1*03:01L HLA-DQA1*01:02-B1*06:02L HLA-DQA1*05:05-B1*03:19L HLA-DQA1*03:01-B1*03:02L HLA-DQA1*05:05-B1*03:01L HLA-DQA1*01:03-B1*06:01L HLA-DQA1*02:01-B1*03:03L
  source 1..10: note = Severe acute respiratory syndrome coronavirus 2
IDGALLTKSS

SEQ ID NO: 8695 - protein, 12 aa, Severe acute respiratory syndrome-related coronavirus
  REGION 1..12: note = Table B: HLA-DQA1*03:02-B1*03:03L HLA-DQA1*05:05-B1*03:01L
  source 1..12: note = Severe acute respiratory syndrome coronavirus 2
DGALLTKSSEYK

SEQ ID NO: 8696 - protein, 10 aa, Severe acute respiratory syndrome-related coronavirus
  REGION 1..10: note = Table B: HLA-DQA1*03:02-B1*03:03L HLA-DQA1*01-B1*05L HLA-DQA1*03:01-B1*03:02L
  source 1..10: note = Severe acute respiratory syndrome coronavirus 2
SSEYKGPITD

SEQ ID NO: 8697 - protein, 10 aa, Severe acute respiratory syndrome-related coronavirus
  REGION 1..10: note = Table B: HLA-DQA1*03:02-B1*03:03M HLA-DQA1*05:01-B1*03:01L HLA-DRB1*13:02L HLA-DRB1*13:03L HLA-DRB1*01:02L HLA-DRB1*08:77L HLA-DPA1*03:01-B1*04:02L HLA-DRB1*11:02M HLA-DRB1*11:01L HLA-DQA1*05:05-B1*03:19H HLA-DQA1*05:01-B1*02:01L
  REGION 1..10: note = CONT. FROM ABOVE: HLA-DRB4*01:01L HLA-DPA1*01:03-B1*04:01L HLA-D QA1*05:05-B1*03:116L HLA-DRB1*09:01M HLA-DPA1*01:03-B1*04:02L HL A-DPA1*03:01-B1*105:01L HLA-DQA1*03:01-B1*03:02M HLA-DPA1*01:03- B1*104:01M HLA-DPA1*01:02-B1*04:01L HLA-DRB1*07:01L
  REGION 1..10: note = CONT. FROM ABOVE: HLA-DRB1*10:01L HLA-DRB1*16:01L HLA-DQA1*01:03 -B1*06:01L HLA-DQA1*02:01-B1*03:03L HLA-DRB1*15:03L
  source 1..10: note = Severe acute respiratory syndrome coronavirus 2
SEYKGPITDV

SEQ ID NO: 8698 - protein, 10 aa, Severe acute respiratory syndrome-related coronavirus
  REGION 1..10: note = Table B: HLA-DQA1*03:02-B1*03:03L HLA-DQA1*05:01-B1*03:01L HLA-DRB1*04:03L HLA-DRB1*13:03L HLA-DRB1*01:03L HLA-DRB1*04:05L HLA-DQA1*01:02-B1*06:02M HLA-DRB1*01:01L HLA-DRB1*01:02L HLA-DRB1*08:77L HLA-DPA1*01:03-B1*03:01L
  REGION 1..10: note = CONT. FROM ABOVE: HLA-DPA1*03:01-B1*04:02L HLA-DRB1*03:01L HLA-D RB1*11:03L HLA-DRB1*14:02L HLA-DQA1*01:01-B1*05:01L HLA-DRB1*11: 01L HLA-DQA1*01-B1*05L HLA-DQA1*05:05-B1*03:19L HLA-DQA1*05:01-B 1*02:01L HLA-DRB4*01:01L HLA-DPA1*01:03-B1*04:01L
  REGION 1..10: note = CONT. FROM ABOVE: HLA-DQA1*05:05-B1*03:116L HLA-DPA1*01:03-B1*04 :02L HLA-DRB1*12:01L HLA-DPA1*02:01-B1*13:01M HLA-DPA1*03:01-B1* 105:01L HLA-DPA1*01:02-B1*04:01L HLA-DRB1*16:01L HLA-DQA1*01:03- B1*06:01M HLA-DQA1*02:01-B1*03:03L HLA-DRB1*15:03L
  source 1..10: note = Severe acute respiratory syndrome coronavirus 2
EYKGPITDVF

SEQ ID NO: 8699 - protein, 11 aa, Severe acute respiratory syndrome-related coronavirus
  REGION 1..11: note = Table B: HLA-DQA1*03:02-B1*03:03L HLA-DRB1*04:03L HLA-DQA1*01:02-B1*06:02L HLA-DQA1*05:01-B1*02:01L HLA-DQA1*03:01-B1*03:02L HLA-DPA1*01:02-B1*04:01L HLA-DQA1*02:01-B1*03:03L
  source 1..11: note = Severe acute respiratory syndrome coronavirus 2
GPITDVFYKEN

SEQ ID NO: 8700 - protein, 11 aa, Severe acute respiratory syndrome-related coronavirus
  REGION 1..11: note = Table B: HLA-DQA1*03:02-B1*03:03L HLA-DPA1*02:01-B1*13:01L
  source 1..11: note = Severe acute respiratory syndrome coronavirus 2
FYKENSYTTTI

SEQ ID NO: 8701 - protein, 10 aa, Severe acute respiratory syndrome-related coronavirus
  REGION 1..10: note = Table B: HLA-DQA1*03:02-B1*03:03L HLA-DQA1*05:01-B1*03:01L HLA-DRB1*04:03L HLA-DRB1*13:02L HLA-DRB1*13:03L HLA-DRB1*01:03L HLA-DRB1*04:02L HLA-DRB1*04:05L HLA-DQA1*01:02-B1*06:02L HLA-DRB1*01:02L HLA-DRB4*03:01NL HLA-DRB1*08:04L
  REGION 1..10: note = CONT. FROM ABOVE: HLA-DPA1*01:03-B1*03:01L HLA-DPA1*03:01-B1*04: 02L HLA-DRB1*14:01L HLA-DRB1*14:02L HLA-DQA1*01:01-B1*05:01L HLA -DRB1*08:01L HLA-DQA1*01-B1*05L HLA-DQA1*05:05-B1*03:19L HLA-DQA 1*05:01-B1*02:01L HLA-DPA1*01:03-B1*04:01L HLA-DRB1*04:10L
  REGION 1..10: note = CONT. FROM ABOVE: HLA-DPA1*01:03-B1*04:02L HLA-DRB1*12:01L HLA-D PA1*02:01-B1*13:01L HLA-DPA1*03:01-B1*105:01L HLA-DQA1*03:01-B1* 03:02L HLA-DRB1*14:54L HLA-DQA1*05:05-B1*03:01L HLA-DRB1*14:17L HLA-DPA1*01:02-B1*04:01L HLA-DRB1*16:01L
  REGION 1..10: note = CONT. FROM ABOVE: HLA-DQA1*01:03-B1*06:01L HLA-DRB1*04:08L HLA-D RB1*08:03L HLA-DQA1*02:01-B1*03:03L HLA-DRB1*15:03L
  source 1..10: note = Severe acute respiratory syndrome coronavirus 2
SYTTTIKPVT

SEQ ID NO: 8702 - protein, 10 aa, Severe acute respiratory syndrome-related coronavirus
  REGION 1..10: note = Table B: HLA-DQA1*03:02-B1*03:03L HLA-DQA1*05:01-B1*03:01M HLA-DRB1*14:04L HLA-DRB1*04:01L HLA-DRB1*04:03L HLA-DRB1*13:02L HLA-DRB1*13:03M HLA-DRB1*01:03M HLA-DRB1*04:02L HLA-DRB1*04:05L HLA-DQA1*01:02-B1*06:02M HLA-DRB1*01:01L HLA-DRB1*01:02L
  REGION 1..10: note = CONT. FROM ABOVE: HLA-DRB4*03:01NL HLA-DRB1*08:77M HLA-DRB3*02:0 1L HLA-DPA1*01:03-B1*03:01M HLA-DPA1*03:01-B1*04:02L HLA-DRB1*03 :01M HLA-DRB1*14:01L HLA-DRB1*11:02M HLA-DRB1*11:03L HLA-DRB1*11 :04L HLA-DRB1*14:02M HLA-DRB1*08:01L HLA-DRB1*11:01L
  REGION 1..10: note = CONT. FROM ABOVE: HLA-DRB5*01:01L HLA-DQA1*01-B1*05M HLA-DQA1*05 :05-B1*03:19M HLA-DRB4*02:01NL HLA-DQA1*05:01-B1*02:01M HLA-DRB4 *01:01M HLA-DPA1*01:03-B1*04:01M HLA-DQA1*05:05-B1*03:116M HLA-D RB1*09:01L HLA-DPA1*01:03-B1*04:02M HLA-DRB1*12:01L
  REGION 1..10: note = CONT. FROM ABOVE: HLA-DRB1*12:02L HLA-DPA1*02:01-B1*13:01L HLA-D PA1*03:01-B1*105:01M HLA-DQA1*03:01-B1*03:02L HLA-DRB1*14:54L HL A-DPA1*01:03-B1*104:01M HLA-DQA1*05:05-B1*03:01L HLA-DRB1*14:17L HLA-DPA1*01:02-B1*04:01L HLA-DRB1*10:01M HLA-DRB1*16:01M
  REGION 1..10: note = CONT. FROM ABOVE: HLA-DQA1*01:03-B1*06:01L HLA-DRB1*08:02L HLA -DRB1*08:03L HLA-DQA1*02:01-B1*03:03M HLA-DRB1*15:01L HLA-DRB1 *15:03M
  source 1..10: note = Severe acute respiratory syndrome coronavirus 2
YTTTIKPVTY

SEQ ID NO: 8703 - protein, 10 aa, Severe acute respiratory syndrome-related coronavirus
  REGION 1..10: note = Table B: HLA-DQA1*03:02-B1*03:03L HLA-DQA1*05:01-B1*03:01L HLA-DQA1*01:02-B1*06:02L HLA-DRB1*01:02L HLA-DPA1*03:01-B1*04:02L HLA-DRB1*14:01L HLA-DRB1*14:02L HLA-DRB1*08:01L HLA-DQA1*05:01-B1*02:01L
  REGION 1..10: note = CONT. FROM ABOVE: HLA-DQA1*05:05-B1*03:116L HLA-DPA1*03:01-B1*10 5:01L HLA-DQA1*03:01-B1*03:02L HLA-DPA1*01:02-B1*04:01L HLA-DRB1 *16:01L HLA-DQA1*01:03-B1*06:01L HLA-DQA1*02:01-B1*03:03L HLA-DR B1*15:03L
  source 1..10: note = Severe acute respiratory syndrome coronavirus 2
TTIKPVTYKL

SEQ ID NO: 8704 - protein, 12 aa, Severe acute respiratory syndrome-related coronavirus
  REGION 1..12: note = Table B: HLA-DQA1*03:02-B1*03:03L HLA-DQA1*05:01-B1*03:01L HLA-DQA1*01:02-B1*06:02L HLA-DQA1*05:05-B1*03:01L HLA-DQA1*01:03-B1*06:01L
  source 1..12: note = Severe acute respiratory syndrome coronavirus 2
LDGVVCTEIDPK

SEQ ID NO: 8705 - protein, 13 aa, Severe acute respiratory syndrome-related coronavirus
  REGION 1..13: note = Table B: HLA-DQA1*03:02-B1*03:03L HLA-DRB1*04:03L HLA-DRB1*04:05L HLA-DRB1*01:02L HLA-DPA1*02:01-B1*13:01L HLA-DRB1*16:01L HLA-DRB1*15:03L
  source 1..13: note = Severe acute respiratory syndrome coronavirus 2
DGVVCTEIDPKLD

SEQ ID NO: 8706 - protein, 12 aa, Severe acute respiratory syndrome-related coronavirus
  REGION 1..12: note = Table B: HLA-DQA1*03:02-B1*03:03L HLA-DRB1*04:03L HLA-DRB1*04:02L HLA-DRB1*04:05L HLA-DQA1*01:02-B1*06:02L HLA-DQA1*01-B1*05L HLA-DQA1*05:01-B1*02:01L HLA-DPA1*03:01-B1*105:01L HLA-DQA1*03:01-B1*03:02L
  REGION 1..12: note = CONT. FROM ABOVE: HLA-DQA1*05:05-B1*03:01L HLA-DRB1*16:01L HLA-D QA1*02:01-B1*03:03L
  source 1..12: note = Severe acute respiratory syndrome coronavirus 2
VVCTEIDPKLDN

SEQ ID NO: 8707 - protein, 10 aa, Severe acute respiratory syndrome-related coronavirus
  REGION 1..10: note = Table B: HLA-DQA1*03:02-B1*03:03M HLA-DQA1*05:01-B1*03:01H HLA-DRB1*14:04L HLA-DRB1*04:01L HLA-DRB1*04:03L HLA-DRB1*13:02L HLA-DRB1*13:03M HLA-DRB1*01:03M HLA-DRB1*04:02M HLA-DRB1*04:05L HLA-DQA1*01:02-B1*06:02M HLA-DRB1*01:01L HLA-DRB4*03:01NM
  REGION 1..10: note = CONT. FROM ABOVE: HLA-DRB1*08:77H HLA-DPA1*01:03-B1*03:01M HLA-D PA1*03:01-B1*04:02H HLA-DRB1*03:01H HLA-DRB1*14:01L HLA-DRB1*11: 02M HLA-DRB1*11:03L HLA-DRB1*11:04L HLA-DRB1*14:02M HLA-DRB1*08: 01L HLA-DRB1*11:01L HLA-DRB5*01:01L HLA-DQA1*01-B1*05H
  REGION 1..10: note = CONT. FROM ABOVE: HLA-DQA1*05:05-B1*03:19H HLA-DRB4*02:01NL HLA- DQA1*05:01-B1*02:01H HLA-DRB4*01:01H HLA-DPA1*01:03-B1*04:01H HL A-DQA1*05:05-B1*03:116M HLA-DRB1*09:01L HLA-DPA1*01:03-B1*04:02M HLA-DRB1*12:01M HLA-DPA1*02:01-B1*13:01L
  REGION 1..10: note = CONT. FROM ABOVE: HLA-DPA1*03:01-B1*105:01L HLA-DQA1*03:01-B1*03 :02M HLA-DRB1*14:54M HLA-DPA1*01:03-B1*104:01M HLA-DRB1*14:17L H LA-DPA1*01:02-B1*04:01M HLA-DRB1*10:01H HLA-DRB1*16:01M HLA-DQA1 *01:03-B1*06:01L HLA-DRB1*04:08L HLA-DRB1*08:02L HLA-DRB1*08:03L
  REGION 1..10: note = CONT. FROM ABOVE: HLA-DQA1*02:01-B1*03:03L HLA-DRB1*15:01L HLA -DRB1*15:03H
  source 1..10: note = Severe acute respiratory syndrome coronavirus 2
TEIDPKLDNY

SEQ ID NO: 8708 - protein, 10 aa, Severe acute respiratory syndrome-related coronavirus
  REGION 1..10: note = Table B: HLA-DQA1*03:02-B1*03:03L HLA-DQA1*05:01-B1*03:01L HLA-DRB1*04:03L HLA-DRB1*13:02L HLA-DRB1*13:03M HLA-DRB1*01:03M HLA-DRB1*04:02L HLA-DRB1*04:05L HLA-DQA1*01:02-B1*06:02M HLA-DRB1*01:01L HLA-DRB4*03:01NL HLA-DRB1*08:77M
  REGION 1..10: note = CONT. FROM ABOVE: HLA-DPA1*01:03-B1*03:01H HLA-DPA1*03:01-B1*04: 02L HLA-DRB1*03:01M HLA-DRB1*14:01L HLA-DRB1*11:02M HLA-DRB1*11: 03L HLA-DRB1*11:04L HLA-DRB1*14:02M HLA-DRB1*11:01L HLA-DRB5*01: 01L HLA-DQA1*01-B1*05M HLA-DQA1*05:05-B1*03:19H
  REGION 1..10: note = CONT. FROM ABOVE: HLA-DQA1*05:01-B1*02:01H HLA-DRB4*01:01M HLA-D PA1*01:03-B1*04:01M HLA-DQA1*05:05-B1*03:116M HLA-DPA1*01:03-B1* 04:02M HLA-DRB1*12:01M HLA-DPA1*02:01-B1*13:01L HLA-DPA1*03:01-B 1*105:01L HLA-DQA1*03:01-B1*03:02L HLA-DRB1*14:54L
  REGION 1..10: note = CONT. FROM ABOVE: HLA-DPA1*01:03-B1*104:01M HLA-DQA1*05:05-B1*03 :01L HLA-DPA1*01:02-B1*04:01L HLA-DRB1*10:01M HLA-DRB1*16:01M HL A-DQA1*01:03-B1*06:01L HLA-DRB1*08:02L HLA-DQA1*02:01-B1*03:03L HLA-DRB1*15:03L
  source 1..10: note = Severe acute respiratory syndrome coronavirus 2
EIDPKLDNYY

SEQ ID NO: 8709 - protein, 20 aa, Severe acute respiratory syndrome-related coronavirus
  REGION 1..20: note = Table B: HLA-DQA1*03:02-B1*03:03L HLA-DQA1*05:05-B1*03:01L
  source 1..20: note = Severe acute respiratory syndrome coronavirus 2
IDPKLDNYYKKDNSYFTEQP

SEQ ID NO: 8710 - protein, 20 aa, Severe acute respiratory syndrome-related coronavirus
  REGION 1..20: note = Table B: HLA-DQA1*03:02-B1*03:03L HLA-DRB3*02:01L
  source 1..20: note = Severe acute respiratory syndrome coronavirus 2
DPKLDNYYKKDNSYFTEQPI

SEQ ID NO: 8711 - protein, 11 aa, Severe acute respiratory syndrome-related coronavirus
  REGION 1..11: note = Table B: HLA-DQA1*03:02-B1*03:03L HLA-DQA1*05:01-B1*02:01L HLA-DQA1*03:01-B1*03:02L
  source 1..11: note = Severe acute respiratory syndrome coronavirus 2
DNSYFTEQPID

SEQ ID NO: 8712 - protein, 10 aa, Severe acute respiratory syndrome-related coronavirus
  REGION 1..10: note = Table B: HLA-DQA1*03:02-B1*03:03L HLA-DRB1*04:05L HLA-DQA1*01-B1*05L HLA-DQA1*05:01-B1*02:01L HLA-DPA1*02:01-B1*13:01L HLA-DQA1*03:01-B1*03:02L HLA-DRB1*16:01L HLA-DQA1*01:03-B1*06:01L
  REGION 1..10: note = CONT. FROM ABOVE: HLA-DQA1*02:01-B1*03:03L HLA-DRB1*15:03L
  source 1..10: note = Severe acute respiratory syndrome coronavirus 2
SYFTEQPIDL

SEQ ID NO: 8713 - protein, 11 aa, Severe acute respiratory syndrome-related coronavirus
  REGION 1..11: note = Table B: HLA-DQA1*03:02-B1*03:03L HLA-DRB1*13:03L HLA-DRB1*01:03L HLA-DRB1*04:02L HLA-DRB1*04:05L HLA-DRB4*03:01NL HLA-DRB1*08:77L HLA-DRB1*14:01L HLA-DRB1*14:02L HLA-DQA1*01-B1*05L HLA-DQA1*05:01-B1*02:01L HLA-DRB1*04:10L
  REGION 1..11: note = CONT. FROM ABOVE: HLA-DRB1*12:01L HLA-DQA1*03:01-B1*03:02L HLA-D RB1*14:54L HLA-DRB1*14:17L HLA-DRB1*16:01L HLA-DRB1*04:08L HLA-D QA1*02:01-B1*03:03L
  source 1..11: note = Severe acute respiratory syndrome coronavirus 2
FTEQPIDLVPN

SEQ ID NO: 8714 - protein, 12 aa, Severe acute respiratory syndrome-related coronavirus
  REGION 1..12: note = Table B: HLA-DQA1*03:02-B1*03:03L HLA-DQA1*01-B1*05L HLA-DQA1*05:01-B1*02:01L HLA-DQA1*03:01-B1*03:02L HLA-DQA1*02:01-B1*03:03L
  source 1..12: note = Severe acute respiratory syndrome coronavirus 2
TEQPIDLVPNQP

SEQ ID NO: 8715 - protein, 12 aa, Severe acute respiratory syndrome-related coronavirus
  REGION 1..12: note = Table B: HLA-DQA1*03:02-B1*03:03L HLA-DQA1*05:01-B1*03:01L HLA-DRB1*13:02L HLA-DRB1*13:03L HLA-DRB1*01:03L HLA-DRB1*04:02L HLA-DRB1*04:05L HLA-DRB1*01:02L HLA-DRB4*03:01NL HLA-DRB1*08:77L HLA-DRB3*02:01L HLA-DPA1*03:01-B1*04:02L HLA-DRB1*14:01L
  REGION 1..12: note = CONT. FROM ABOVE: HLA-DQA1*01-B1*05L HLA-DRB1*04:10L HLA-DRB1*12 :01L HLA-DRB1*12:02L HLA-DQA1*03:01-B1*03:02L HLA-DRB1*14:54L HL A-DRB1*14:17L HLA-DRB1*04:08L HLA-DQA1*02:01-B1*03:03L HLA-DRB1* 15:03L
  source 1..12: note = Severe acute respiratory syndrome coronavirus 2
QPIDLVPNQPYP

SEQ ID NO: 8716 - protein, 10 aa, Severe acute respiratory syndrome-related coronavirus
  REGION 1..10: note = Table B: HLA-DQA1*03:02-B1*03:03L HLA-DQA1*05:01-B1*03:01L HLA-DRB1*04:03L HLA-DRB1*13:02L HLA-DRB1*13:03L HLA-DRB1*01:03L HLA-DRB1*04:02L HLA-DRB1*04:05L HLA-DRB4*03:01NL HLA-DRB1*08:77L HLA-DRB1*14:01L HLA-DQA1*01-B1*05L HLA-DQA1*05:01-B1*02:01L
  REGION 1..10: note = CONT. FROM ABOVE: HLA-DRB1*04:10L HLA-DRB1*12:01L HLA-DRB1*12:02 L HLA-DQA1*03:01-B1*03:02L HLA-DRB1*14:54L HLA-DRB1*14:17L HLA-D RB1*16:01L HLA-DQA1*02:01-B1*03:03L
  source 1..10: note = Severe acute respiratory syndrome coronavirus 2
DLVPNQPYPN

SEQ ID NO: 8717 - protein, 10 aa, Severe acute respiratory syndrome-related coronavirus
  REGION 1..10: note = Table B: HLA-DQA1*03:02-B1*03:03L HLA-DQA1*05:01-B1*03:01L HLA-DRB1*04:03L HLA-DRB1*13:03L HLA-DRB1*04:02L HLA-DRB4*03:01NL HLA-DRB1*14:01L HLA-DRB1*12:01L HLA-DQA1*03:01-B1*03:02L HLA-DRB1*14:17L HLA-DRB1*16:01L HLA-DQA1*02:01-B1*03:03L
  source 1..10: note = Severe acute respiratory syndrome coronavirus 2
LVPNQPYPNA

SEQ ID NO: 8718 - protein, 11 aa, Severe acute respiratory syndrome-related coronavirus
  REGION 1..11: note = Table B: HLA-DQA1*03:02-B1*03:03L HLA-DQA1*05:01-B1*03:01L HLA-DRB1*01:03L HLA-DRB1*04:05L HLA-DQA1*01:02-B1*06:02M HLA-DRB1*01:01L HLA-DRB4*03:01NL HLA-DRB1*08:77L HLA-DPA1*01:03-B1*03:01L HLA-DPA1*03:01-B1*04:02L
  REGION 1..11: note = CONT. FROM ABOVE: HLA-DRB1*14:01L HLA-DRB1*11:03L HLA-DRB1*14:02 L HLA-DRB1*08:01L HLA-DRB5*01:01L HLA-DQA1*01-B1*05L HLA-DQA1*05 :05-B1*03:19L HLA-DQA1*05:01-B1*02:01L HLA-DPA1*01:03-B1*04:01L HLA-DQA1*05:05-B1*03:116L HLA-DPA1*01:03-B1*04:02L
  REGION 1..11: note = CONT. FROM ABOVE: HLA-DPA1*02:01-B1*13:01L HLA-DPA1*03:01-B1*105 :01M HLA-DPA1*01:02-B1*04:01L HLA-DRB1*10:01L HLA-DRB1*16:01L HL A-DQA1*01:03-B1*06:01L HLA-DQA1*02:01-B1*03:03L HLA-DRB1*15:03L
  source 1..11: note = Severe acute respiratory syndrome coronavirus 2
VPNQPYPNASF

SEQ ID NO: 8719 - protein, 12 aa, Severe acute respiratory syndrome-related coronavirus
  REGION 1..12: note = Table B: HLA-DQA1*03:02-B1*03:03L HLA-DQA1*05:01-B1*03:01L HLA-DQA1*01:02-B1*06:02L HLA-DQA1*05:05-B1*03:19L HLA-DQA1*05:05-B1*03:01L HLA-DQA1*01:03-B1*06:01L
  source 1..12: note = Severe acute respiratory syndrome coronavirus 2
PNQPYPNASFDN

SEQ ID NO: 8720 - protein, 12 aa, Severe acute respiratory syndrome-related coronavirus
  REGION 1..12: note = Table B: HLA-DQA1*03:02-B1*03:03L HLA-DRB1*04:02L HLA-DQA1*05:05-B1*03:19L HLA-DQA1*05:01-B1*02:01L HLA-DRB1*12:01L HLA-DQA1*05:05-B1*03:01L
  source 1..12: note = Severe acute respiratory syndrome coronavirus 2
QPYPNASFDNFK

SEQ ID NO: 8721 - protein, 15 aa, Severe acute respiratory syndrome-related coronavirus
  REGION 1..15: note = Table B: HLA-DQA1*03:02-B1*03:03L HLA-DQA1*05:01-B1*03:01L HLA-DRB1*04:03L HLA-DRB1*04:04L HLA-DRB1*08:04L HLA-DRB3*02:01L HLA-DPA1*01:03-B1*03:01L HLA-DPA1*03:01-B1*04:02L HLA-DRB1*03:01L HLA-DRB1*11:02L HLA-DRB1*14:02L HLA-DRB1*11:01L
  REGION 1..15: note = CONT. FROM ABOVE: HLA-DQA1*05:05-B1*03:19L HLA-DQA1*05:01-B1*02: 01L HLA-DPA1*01:03-B1*04:02L HLA-DRB3*01:01L HLA-DPA1*01:03-B1*1 04:01L HLA-DQA1*05:05-B1*03:01L HLA-DPA1*01:02-B1*04:01L HLA-DQA 1*01:03-B1*06:01L HLA-DRB1*08:03L HLA-DQA1*02:01-B1*03:03L
  source 1..15: note = Severe acute respiratory syndrome coronavirus 2
DNFKFVCDNIKFADD

SEQ ID NO: 8722 - protein, 11 aa, Severe acute respiratory syndrome-related coronavirus
  REGION 1..11: note = Table B: HLA-DQA1*03:02-B1*03:03L HLA-DRB1*13:03L HLA-DRB1*01:03L HLA-DRB1*04:02L HLA-DRB1*04:04L HLA-DRB1*04:05L HLA-DRB4*03:01NL HLA-DRB1*11:04L HLA-DQA1*05:01-B1*02:01L HLA-DRB1*04:10L HLA-DRB1*12:01L HLA-DRB1*14:54L HLA-DRB1*14:17L
  REGION 1..11: note = CONT. FROM ABOVE: HLA-DRB1*16:01L HLA-DRB1*04:08L HLA-DRB1*08:03 L HLA-DQA1*02:01-B1*03:03L
  source 1..11: note = Severe acute respiratory syndrome coronavirus 2
DNIKFADDLNQ

SEQ ID NO: 8723 - protein, 10 aa, Severe acute respiratory syndrome-related coronavirus
  REGION 1..10: note = Table B: HLA-DQA1*03:02-B1*03:03L HLA-DRB1*04:03L HLA-DRB1*04:02L HLA-DRB1*04:05L HLA-DPA1*03:01-B1*04:02L HLA-DRB1*14:01L HLA-DQA1*01-B1*05L HLA-DQA1*05:01-B1*02:01L HLA-DPA1*02:01-B1*13:01L HLA-DQA1*03:01-B1*03:02L
  REGION 1..10: note = CONT. FROM ABOVE: HLA-DPA1*01:02-B1*04:01L HLA-DRB1*16:01L HLA-D QA1*02:01-B1*03:03L HLA-DRB1*15:03L
  source 1..10: note = Severe acute respiratory syndrome coronavirus 2
IKFADDLNQL

SEQ ID NO: 8724 - protein, 18 aa, Severe acute respiratory syndrome-related coronavirus
  REGION 1..18: note = Table B: HLA-DQA1*03:02-B1*03:03L HLA-DRB3*02:01L HLA-DQA1*05:01-B1*02:01L HLA-DPA1*01:03-B1*04:01L HLA-DRB1*09:01L
  source 1..18: note = Severe acute respiratory syndrome coronavirus 2
DDLNQLTGYKKPASRELK

SEQ ID NO: 8725 - protein, 16 aa, Severe acute respiratory syndrome-related coronavirus
  REGION 1..16: note = Table B: HLA-DQA1*03:02-B1*03:03L HLA-DRB1*04:05L HLA-DRB1*14:02L HLA-DQA1*05:05-B1*03:01L
  source 1..16: note = Severe acute respiratory syndrome coronavirus 2
KPASRELKVTFFPDLN

SEQ ID NO: 8726 - protein, 11 aa, Severe acute respiratory syndrome-related coronavirus
  REGION 1..11: note = Table B: HLA-DQA1*03:02-B1*03:03L HLA-DRB1*04:03L HLA-DRB1*04:02L HLA-DRB1*04:05L HLA-DQA1*05:01-B1*02:01L HLA-DRB1*04:10L HLA-DQA1*03:01-B1*03:02L HLA-DRB1*14:17L HLA-DRB1*16:01L HLA-DQA1*02:01-B1*03:03L HLA-DRB1*15:03L
  source 1..11: note = Severe acute respiratory syndrome coronavirus 2
VTFFPDLNGDV

SEQ ID NO: 8727 - protein, 10 aa, Severe acute respiratory syndrome-related coronavirus
  REGION 1..10: note = Table B: HLA-DQA1*03:02-B1*03:03L HLA-DQA1*01-B1*05L HLA-DQA1*05:05-B1*03:19L HLA-DQA1*05:01-B1*02:01L HLA-DPA1*02:01-B1*13:01L HLA-DQA1*03:01-B1*03:02L HLA-DQA1*02:01-B1*03:03L HLA-DRB1*15:03L
  source 1..10: note = Severe acute respiratory syndrome coronavirus 2
FFPDLNGDVV

SEQ ID NO: 8728 - protein, 13 aa, Severe acute respiratory syndrome-related coronavirus
  REGION 1..13: note = Table B: HLA-DQA1*03:02-B1*03:03L HLA-DRB1*04:03L HLA-DPA1*01:03-B1*03:01L HLA-DQA1*01-B1*05L HLA-DPA1*03:01-B1*105:01L HLA-DRB1*16:01L
  source 1..13: note = Severe acute respiratory syndrome coronavirus 2
FPDLNGDVVAIDY

SEQ ID NO: 8729 - protein, 10 aa, Severe acute respiratory syndrome-related coronavirus
  REGION 1..10: note = Table B: HLA-DQA1*03:02-B1*03:03L HLA-DQA1*05:01-B1*02:01L HLA-DQA1*03:01-B1*03:02L HLA-DQA1*01:03-B1*06:01L HLA-DQA1*02:01-B1*03:03L
  source 1..10: note = Severe acute respiratory syndrome coronavirus 2
NGDVVAIDYK

SEQ ID NO: 8730 - protein, 10 aa, Severe acute respiratory syndrome-related coronavirus
  REGION 1..10: note = Table B: HLA-DQA1*03:02-B1*03:03L HLA-DQA1*05:01-B1*03:01L HLA-DRB1*13:02L HLA-DRB1*13:03M HLA-DRB1*01:03L HLA-DQA1*01:02-B1*06:02M HLA-DRB4*03:01NL HLA-DRB1*08:77L HLA-DPA1*01:03-B1*03:01L HLA-DPA1*03:01-B1*04:02L
  REGION 1..10: note = CONT. FROM ABOVE: HLA-DRB1*03:01L HLA-DRB1*14:01L HLA-DRB1*14:02 L HLA-DRB5*01:01L HLA-DQA1*01-B1*05L HLA-DQA1*05:05-B1*03:19L HL A-DQA1*05:01-B1*02:01L HLA-DRB4*01:01L HLA-DPA1*01:03-B1*04:01M HLA-DQA1*05:05-B1*03:116L HLA-DPA1*01:03-B1*04:02L
  REGION 1..10: note = CONT. FROM ABOVE: HLA-DRB1*12:01L HLA-DPA1*02:01-B1*13:01L HLA-D PA1*03:01-B1*105:01M HLA-DQA1*05:05-B1*03:01L HLA-DPA1*01:02-B1* 04:01L HLA-DRB1*10:01L HLA-DRB1*16:01L HLA-DQA1*01:03-B1*06:01L HLA-DQA1*02:01-B1*03:03L HLA-DRB1*15:03L
  source 1..10: note = Severe acute respiratory syndrome coronavirus 2
DVVAIDYKHY

SEQ ID NO: 8731 - protein, 12 aa, Severe acute respiratory syndrome-related coronavirus
  REGION 1..12: note = Table B: HLA-DQA1*03:02-B1*03:03L HLA-DQA1*05:01-B1*03:01L HLA-DRB1*14:04L HLA-DRB1*04:01L HLA-DRB1*04:04L HLA-DRB1*04:05L HLA-DQA1*01:02-B1*06:02L HLA-DRB1*01:02L HLA-DRB1*08:04L HLA-DRB1*08:77L HLA-DRB3*02:01L HLA-DPA1*01:03-B1*03:01L
  REGION 1..12: note = CONT. FROM ABOVE: HLA-DPA1*03:01-B1*04:02L HLA-DRB1*03:01L HLA-D RB1*11:02L HLA-DRB1*11:03L HLA-DRB1*11:04L HLA-DRB1*14:02L HLA-D RB1*08:01L HLA-DRB1*11:01L HLA-DRB5*01:01L HLA-DQA1*01-B1*05L HL A-DQA1*05:05-B1*03:19L HLA-DQA1*05:01-B1*02:01L HLA-DRB1*13:01L
  REGION 1..12: note = CONT. FROM ABOVE: HLA-DRB4*01:01L HLA-DPA1*01:03-B1*04:01L HLA-D RB1*04:10L HLA-DPA1*01:03-B1*04:02L HLA-DRB1*12:02L HLA-DRB3*01: 01L HLA-DPA1*02:01-B1*13:01L HLA-DPA1*03:01-B1*105:01L HLA-DPA1* 01:03-B1*02:01L HLA-DRB1*10:01L HLA-DQA1*01:03-B1*06:01L
  REGION 1..12: note = CONT. FROM ABOVE: HLA-DRB1*08:03L HLA-DQA1*02:01-B1*03:03L HLA-D RB1*15:03L
  source 1..12: note = Severe acute respiratory syndrome coronavirus 2
VVAIDYKHYTPS

SEQ ID NO: 8732 - protein, 15 aa, Severe acute respiratory syndrome-related coronavirus
  REGION 1..15: note = Table B: HLA-DQA1*03:02-B1*03:03L HLA-DPA1*03:01-B1*04:02L HLA-DRB1*03:01L HLA-DRB1*11:02L HLA-DQA1*05:05-B1*03:19L HLA-DQA1*05:01-B1*02:01L HLA-DRB1*09:01L HLA-DPA1*01:03-B1*04:02L HLA-DPA1*01:03-B1*104:01L
  REGION 1..15: note = CONT. FROM ABOVE: HLA-DQA1*01:03-B1*06:01L HLA-DRB1*08:02L
  source 1..15: note = Severe acute respiratory syndrome coronavirus 2
KPIVWHVNNATNKAT

SEQ ID NO: 8733 - protein, 11 aa, Severe acute respiratory syndrome-related coronavirus
  REGION 1..11: note = Table B: HLA-DQA1*03:02-B1*03:03L HLA-DRB1*04:01L HLA-DRB1*13:02L HLA-DRB4*03:01NL HLA-DPA1*03:01-B1*04:02L HLA-DRB1*14:01L HLA-DRB1*11:02L HLA-DRB1*11:01L HLA-DRB4*01:01L HLA-DQA1*05:05-B1*03:116L HLA-DPA1*02:01-B1*13:01L
  REGION 1..11: note = CONT. FROM ABOVE: HLA-DPA1*01:03-B1*104:01L HLA-DRB1*14:17L HLA- DPA1*01:02-B1*04:01L HLA-DQA1*01:03-B1*06:01L
  source 1..11: note = Severe acute respiratory syndrome coronavirus 2
HVNNATNKATY

SEQ ID NO: 8734 - protein, 10 aa, Severe acute respiratory syndrome-related coronavirus
  REGION 1..10: note = Table B: HLA-DQA1*03:02-B1*03:03L HLA-DQA1*05:01-B1*03:01L HLA-DRB1*04:03L HLA-DRB1*13:02L HLA-DRB1*13:03L HLA-DRB1*01:03L HLA-DRB1*04:02L HLA-DRB1*04:05L HLA-DRB1*01:02L HLA-DRB4*03:01NL HLA-DRB1*08:77L HLA-DRB1*14:01L HLA-DRB1*11:04L HLA-DRB1*12:01L
  REGION 1..10: note = CONT. FROM ABOVE: HLA-DQA1*03:01-B1*03:02L HLA-DRB1*14:54L HLA-D RB1*14:17L HLA-DPA1*01:02-B1*04:01L HLA-DRB1*16:01L HLA-DQA1*01: 03-B1*06:01L HLA-DRB1*04:08L HLA-DQA1*02:01-B1*03:03L
  source 1..10: note = Severe acute respiratory syndrome coronavirus 2
ATNKATYKPN

SEQ ID NO: 8735 - protein, 10 aa, Severe acute respiratory syndrome-related coronavirus
  REGION 1..10: note = Table B: HLA-DQA1*03:02-B1*03:03L HLA-DQA1*05:01-B1*03:01L HLA-DRB1*04:03L HLA-DRB1*13:03L HLA-DRB1*04:02L HLA-DQA1*01:02-B1*06:02L HLA-DRB4*03:01NL HLA-DQA1*05:05-B1*03:19L HLA-DQA1*05:01-B1*02:01L
  REGION 1..10: note = CONT. FROM ABOVE: HLA-DPA1*03:01-B1*105:01L HLA-DQA1*03:01-B1*03 :02L HLA-DQA1*05:05-B1*03:01L HLA-DRB1*14:17L HLA-DQA1*01:03-B1* 06:01L HLA-DQA1*02:01-B1*03:03L
  source 1..10: note = Severe acute respiratory syndrome coronavirus 2
WSTKPVETSN

SEQ ID NO: 8736 - protein, 11 aa, Severe acute respiratory syndrome-related coronavirus
  REGION 1..11: note = Table B: HLA-DQA1*03:02-B1*03:03L HLA-DQA1*05:01-B1*03:01L HLA-DRB1*04:03L HLA-DRB1*08:77L HLA-DPA1*01:03-B1*03:01L HLA-DPA1*03:01-B1*04:02L HLA-DRB1*03:01L HLA-DRB1*14:01L HLA-DRB1*14:02L HLA-DRB1*11:01L HLA-DQA1*01-B1*05L
  REGION 1..11: note = CONT. FROM ABOVE: HLA-DQA1*05:05-B1*03:19L HLA-DQA1*05:01-B1*02: 01L HLA-DRB4*01:01L HLA-DPA1*01:03-B1*04:01L HLA-DQA1*05:05-B1*0 3:116L HLA-DPA1*01:03-B1*04:02L HLA-DPA1*02:01-B1*13:01L HLA-DPA 1*03:01-B1*105:01L HLA-DPA1*01:02-B1*04:01L HLA-DRB1*10:01L
  REGION 1..11: note = CONT. FROM ABOVE: HLA-DRB1*16:01L HLA-DQA1*01:03-B1*06:01L HLA-D RB1*08:02L HLA-DRB1*15:03L
  source 1..11: note = Severe acute respiratory syndrome coronavirus 2
STKPVETSNSF

SEQ ID NO: 8737 - protein, 10 aa, Severe acute respiratory syndrome-related coronavirus
  REGION 1..10: note = Table B: HLA-DQA1*03:02-B1*03:03L HLA-DQA1*05:05-B1*03:19L HLA-DQA1*03:01-B1*03:02L
  source 1..10: note = Severe acute respiratory syndrome coronavirus 2
VETSNSFDVL

SEQ ID NO: 8738 - protein, 12 aa, Severe acute respiratory syndrome-related coronavirus
  REGION 1..12: note = Table B: HLA-DQA1*03:02-B1*03:03L HLA-DRB1*04:03L HLA-DQA1*01:02-B1*06:02L HLA-DQA1*01-B1*05L HLA-DQA1*05:01-B1*02:01L HLA-DPA1*03:01-B1*105:01L
  source 1..12: note = Severe acute respiratory syndrome coronavirus 2
TSNSFDVLKSED

SEQ ID NO: 8739 - protein, 12 aa, Severe acute respiratory syndrome-related coronavirus
  REGION 1..12: note = Table B: HLA-DQA1*03:02-B1*03:03L HLA-DQA1*05:01-B1*03:01L HLA-DRB1*13:02L HLA-DRB1*01:03L HLA-DRB1*04:04L HLA-DQA1*01:02-B1*06:02L HLA-DRB1*01:02L HLA-DRB1*08:04L HLA-DPA1*01:03-B1*03:01L HLA-DRB1*14:01L HLA-DRB1*11:04L
  REGION 1..12: note = CONT. FROM ABOVE: HLA-DQA1*01:01-B1*05:01L HLA-DRB1*08:01L HLA-D QA1*05:05-B1*03:19L HLA-DRB1*12:02L HLA-DPA1*02:01-B1*13:01L HLA -DPA1*03:01-B1*105:01L HLA-DQA1*05:05-B1*03:01L HLA-DRB1*10:01L HLA-DRB1*04:08L HLA-DRB1*08:03L HLA-DRB1*15:03L
  source 1..12: note = Severe acute respiratory syndrome coronavirus 2
SNSFDVLKSEDA

SEQ ID NO: 8740 - protein, 12 aa, Severe acute respiratory syndrome-related coronavirus
  REGION 1..12: note = Table B: HLA-DQA1*03:02-B1*03:03L HLA-DQA1*05:01-B1*03:01L HLA-DRB1*13:02L HLA-DRB1*01:03L HLA-DRB1*04:04L HLA-DQA1*01:02-B1*06:02L HLA-DRB1*01:02L HLA-DRB1*08:04L HLA-DRB1*08:77L HLA-DRB3*02:01L HLA-DPA1*01:03-B1*03:01L
  REGION 1..12: note = CONT. FROM ABOVE: HLA-DRB1*14:01L HLA-DRB1*11:03L HLA-DRB1*14:02 L HLA-DRB1*08:01L HLA-DQA1*05:05-B1*03:19L HLA-DRB1*12:02L HLA-D PA1*02:01-B1*13:01L HLA-DPA1*03:01-B1*105:01L HLA-DQA1*05:05-B1* 03:01L HLA-DRB1*10:01L HLA-DRB1*04:08L HLA-DRB1*08:03L
  REGION 1..12: note = CONT. FROM ABOVE: HLA-DRB1*15:03L
  source 1..12: note = Severe acute respiratory syndrome coronavirus 2
NSFDVLKSEDAQ

SEQ ID NO: 8741 - protein, 12 aa, Severe acute respiratory syndrome-related coronavirus
  REGION 1..12: note = Table B: HLA-DQA1*03:02-B1*03:03L HLA-DQA1*05:01-B1*03:01L HLA-DRB1*13:02L HLA-DQA1*01:02-B1*06:02L HLA-DRB1*01:01L HLA-DRB1*08:04L HLA-DRB1*08:77L HLA-DPA1*01:03-B1*03:01L HLA-DRB1*14:01L HLA-DRB1*11:03L HLA-DRB1*14:02L HLA-DRB1*08:01L
  REGION 1..12: note = CONT. FROM ABOVE: HLA-DRB1*11:01L HLA-DRB5*01:01L HLA-DQA1*05:05 -B1*03:19L HLA-DRB1*09:01L HLA-DRB1*12:02L HLA-DRB3*01:01L HLA-D PA1*02:01-B1*13:01L HLA-DPA1*03:01-B1*105:01L HLA-DQA1*05:05-B1* 03:01L HLA-DRB1*07:01L HLA-DRB1*08:03L HLA-DRB1*15:03L
  source 1..12: note = Severe acute respiratory syndrome coronavirus 2
SFDVLKSEDAQG

SEQ ID NO: 8742 - protein, 10 aa, Severe acute respiratory syndrome-related coronavirus
  REGION 1..10: note = Table B: HLA-DQA1*03:02-B1*03:03L
  source 1..10: note = Severe acute respiratory syndrome coronavirus 2
VLKSEDAQGM

SEQ ID NO: 8743 - protein, 10 aa, Severe acute respiratory syndrome-related coronavirus
  REGION 1..10: note = Table B: HLA-DQA1*03:02-B1*03:03L HLA-DRB1*04:03L HLA-DQA1*05:01-B1*02:01L HLA-DQA1*03:01-B1*03:02L
  source 1..10: note = Severe acute respiratory syndrome coronavirus 2
KSEDAQGMDN

SEQ ID NO: 8744 - protein, 10 aa, Severe acute respiratory syndrome-related coronavirus
  REGION 1..10: note = Table B: HLA-DQA1*03:02-B1*03:03H HLA-DQA1*05:01-B1*03:01L HLA-DRB1*13:03L HLA-DRB1*08:77L HLA-DPA1*03:01-B1*04:02L HLA-DRB1*11:02L HLA-DQA1*05:05-B1*03:19M HLA-DRB4*01:01L HLA-DPA1*01:03-B1*04:01L HLA-DQA1*05:05-B1*03:116L
  REGION 1..10: note = CONT. FROM ABOVE: HLA-DRB1*09:01M HLA-DPA1*01:03-B1*04:02L HLA-D QA1*03:01-B1*03:02M HLA-DPA1*01:03-B1*104:01L HLA-DPA1*01:02-B1* 04:01L HLA-DRB1*10:01L HLA-DRB1*16:01L
  source 1..10: note = Severe acute respiratory syndrome coronavirus 2
SEDAQGMDNL

SEQ ID NO: 8745 - protein, 16 aa, Severe acute respiratory syndrome-related coronavirus
  REGION 1..16: note = Table B: HLA-DQA1*03:02-B1*03:03L HLA-DQA1*05:01-B1*03:01L HLA-DRB1*04:05L HLA-DRB1*01:02L HLA-DPA1*01:03-B1*03:01L HLA-DQA1*05:05-B1*03:19L HLA-DQA1*05:01-B1*02:01L HLA-DRB1*12:01L HLA-DPA1*02:01-B1*13:01L HLA-DRB1*15:03L
  source 1..16: note = Severe acute respiratory syndrome coronavirus 2
DAQGMDNLACEDLKPV

SEQ ID NO: 8746 - protein, 14 aa, Severe acute respiratory syndrome-related coronavirus
  REGION 1..14: note = Table B: HLA-DQA1*03:02-B1*03:03L HLA-DRB1*04:03L HLA-DRB1*04:05L HLA-DRB1*01:02L HLA-DRB1*08:04L HLA-DPA1*01:03-B1*03:01L HLA-DRB1*08:01L HLA-DQA1*05:05-B1*03:19L HLA-DRB1*12:01L
  REGION 1..14: note = CONT. FROM ABOVE: HLA-DPA1*02:01-B1*13:01L HLA-DPA1*01:03-B1*02: 01L HLA-DRB1*15:03L
  source 1..14: note = Severe acute respiratory syndrome coronavirus 2
DNLACEDLKPVSEE

SEQ ID NO: 8747 - protein, 10 aa, Severe acute respiratory syndrome-related coronavirus
  REGION 1..10: note = Table B: HLA-DQA1*03:02-B1*03:03L HLA-DQA1*05:05-B1*03:19L HLA-DQA1*03:01-B1*03:02L HLA-DPA1*01:03-B1*104:01L
  source 1..10: note = Severe acute respiratory syndrome coronavirus 2
EDLKPVSEEV

SEQ ID NO: 8748 - protein, 11 aa, Severe acute respiratory syndrome-related coronavirus
  REGION 1..11: note = Table B: HLA-DQA1*03:02-B1*03:03L HLA-DQA1*05:01-B1*03:01L HLA-DRB1*13:02L HLA-DRB1*04:02L HLA-DRB1*04:05L HLA-DQA1*01:02-B1*06:02L HLA-DRB1*01:02L HLA-DRB4*03:01NL HLA-DRB3*02:01L HLA-DRB1*14:01L HLA-DQA1*01:01-B1*05:01L
  REGION 1..11: note = CONT. FROM ABOVE: HLA-DRB1*04:10L HLA-DRB1*12:01L HLA-DRB1*12:02 L HLA-DPA1*03:01-B1*105:01L HLA-DRB1*14:54L HLA-DQA1*05:05-B1*03 :01L HLA-DRB1*16:01L HLA-DQA1*01:03-B1*06:01L HLA-DRB1*15:03L
  source 1..11: note = Severe acute respiratory syndrome coronavirus 2
DLKPVSEEVVE

SEQ ID NO: 8749 - protein, 12 aa, Severe acute respiratory syndrome-related coronavirus
  REGION 1..12: note = Table B: HLA-DQA1*03:02-B1*03:03L HLA-DRB1*04:03L HLA-DRB1*04:05L HLA-DQA1*01:01-B1*05:01L HLA-DQA1*01-B1*05L HLA-DQA1*05:01-B1*02:01L HLA-DQA1*03:01-B1*03:02L HLA-DRB1*16:01L HLA-DQA1*01:03-B1*06:01L
  REGION 1..12: note = CONT. FROM ABOVE: HLA-DQA1*02:01-B1*03:03L
  source 1..12: note = Severe acute respiratory syndrome coronavirus 2
KPVSEEVVENPT

SEQ ID NO: 8750 - protein, 10 aa, Severe acute respiratory syndrome-related coronavirus
  REGION 1..10: note = Table B: HLA-DQA1*03:02-B1*03:03L HLA-DRB1*11:02L HLA-DQA1*05:05-B1*03:19M HLA-DRB1*09:01L HLA-DQA1*03:01-B1*03:02L HLA-DPA1*01:03-B1*104:01M
  source 1..10: note = Severe acute respiratory syndrome coronavirus 2
SEEVVENPTI

SEQ ID NO: 8751 - protein, 11 aa, Severe acute respiratory syndrome-related coronavirus
  REGION 1..11: note = Table B: HLA-DQA1*03:02-B1*03:03L HLA-DRB1*08:77L HLA-DPA1*01:03-B1*03:01L
  source 1..11: note = Severe acute respiratory syndrome coronavirus 2
EEVVENPTIQK

SEQ ID NO: 8752 - protein, 10 aa, Severe acute respiratory syndrome-related coronavirus
  REGION 1..10: note = Table B: HLA-DQA1*03:02-B1*03:03L HLA-DQA1*05:01-B1*03:01L HLA-DRB1*04:03L HLA-DRB1*13:02L HLA-DRB1*13:03L HLA-DRB1*01:03L HLA-DRB1*04:02L HLA-DRB1*04:05L HLA-DQA1*01:02-B1*06:02L HLA-DRB1*01:02L HLA-DRB4*03:01NL HLA-DRB1*08:04L HLA-DRB1*08:77L
  REGION 1..10: note = CONT. FROM ABOVE: HLA-DRB3*02:01L HLA-DPA1*01:03-B1*03:01L HLA-D RB1*14:01L HLA-DRB1*11:03L HLA-DRB1*11:04L HLA-DRB1*14:02L HLA-D QA1*01:01-B1*05:01L HLA-DQA1*01-B1*05L HLA-DQA1*05:05-B1*03:19L HLA-DQA1*05:01-B1*02:01L HLA-DRB1*04:10L
  REGION 1..10: note = CONT. FROM ABOVE: HLA-DPA1*01:03-B1*04:02L HLA-DRB1*12:01L HLA-D PA1*03:01-B1*105:01L HLA-DQA1*03:01-B1*03:02L HLA-DRB1*14:54L HL A-DQA1*05:05-B1*03:01L HLA-DRB1*14:17L HLA-DPA1*01:02-B1*04:01L HLA-DRB1*10:01L HLA-DRB1*16:01L HLA-DQA1*01:03-B1*06:01L
  REGION 1..10: note = CONT. FROM ABOVE: HLA-DRB1*04:08L HLA-DQA1*02:01-B1*03:03L HLA-D RB1*15:03L
  source 1..10: note = Severe acute respiratory syndrome coronavirus 2
VVENPTIQKD

SEQ ID NO: 8753 - protein, 10 aa, Severe acute respiratory syndrome-related coronavirus
  REGION 1..10: note = Table B: HLA-DQA1*03:02-B1*03:03L HLA-DRB1*11:02L HLA-DQA1*05:05-B1*03:19M HLA-DQA1*05:01-B1*02:01L HLA-DRB1*09:01L HLA-DPA1*01:03-B1*04:02L HLA-DQA1*03:01-B1*03:02L HLA-DPA1*01:03-B1*104:01L
  REGION 1..10: note = CONT. FROM ABOVE: HLA-DRB1*16:01L
  source 1..10: note = Severe acute respiratory syndrome coronavirus 2
VENPTIQKDV

SEQ ID NO: 8754 - protein, 10 aa, Severe acute respiratory syndrome-related coronavirus
  REGION 1..10: note = Table B: HLA-DQA1*03:02-B1*03:03L HLA-DQA1*05:01-B1*03:01L HLA-DQA1*01:02-B1*06:02L HLA-DQA1*01-B1*05L HLA-DQA1*05:01-B1*02:01L HLA-DPA1*03:01-B1*105:01L HLA-DQA1*03:01-B1*03:02L HLA-DQA1*01:03-B1*06:01L
  REGION 1..10: note = CONT. FROM ABOVE: HLA-DQA1*02:01-B1*03:03L
  source 1..10: note = Severe acute respiratory syndrome coronavirus 2
ENPTIQKDVL

SEQ ID NO: 8755 - protein, 10 aa, Severe acute respiratory syndrome-related coronavirus
  REGION 1..10: note = Table B: HLA-DQA1*03:02-B1*03:03L HLA-DQA1*01-B1*05L HLA-DQA1*05:01-B1*02:01L HLA-DQA1*03:01-B1*03:02L HLA-DQA1*02:01-B1*03:03L
  source 1..10: note = Severe acute respiratory syndrome coronavirus 2
NPTIQKDVLE

SEQ ID NO: 8756 - protein, 11 aa, Severe acute respiratory syndrome-related coronavirus
  REGION 1..11: note = Table B: HLA-DQA1*03:02-B1*03:03L HLA-DQA1*01-B1*05L HLA-DQA1*05:01-B1*02:01L HLA-DQA1*03:01-B1*03:02L HLA-DQA1*01:03-B1*06:01L HLA-DQA1*02:01-B1*03:03L
  source 1..11: note = Severe acute respiratory syndrome coronavirus 2
NVKTTEVVGDI

SEQ ID NO: 8757 - protein, 10 aa, Severe acute respiratory syndrome-related coronavirus
  REGION 1..10: note = Table B: HLA-DQA1*03:02-B1*03:03L HLA-DPA1*03:01-B1*105:01L
  source 1..10: note = Severe acute respiratory syndrome coronavirus 2
KTTEVVGDII

SEQ ID NO: 8758 - protein, 10 aa, Severe acute respiratory syndrome-related coronavirus
  REGION 1..10: note = Table B: HLA-DQA1*03:02-B1*03:03L HLA-DQA1*01-B1*05L HLA-DQA1*03:01-B1*03:02L
  source 1..10: note = Severe acute respiratory syndrome coronavirus 2
TTEVVGDIIL

SEQ ID NO: 8759 - protein, 10 aa, Severe acute respiratory syndrome-related coronavirus
  REGION 1..10: note = Table B: HLA-DQA1*03:02-B1*03:03L HLA-DRB1*13:03L HLA-DQA1*01:02-B1*06:02L HLA-DRB1*01:02L HLA-DQA1*05:01-B1*02:01L HLA-DRB1*12:01L HLA-DPA1*03:01-B1*105:01L HLA-DQA1*03:01-B1*03:02L
  REGION 1..10: note = CONT. FROM ABOVE: HLA-DQA1*05:05-B1*03:01L HLA-DQA1*01:03-B1*06: 01L HLA-DQA1*02:01-B1*03:03L HLA-DRB1*15:03L
  source 1..10: note = Severe acute respiratory syndrome coronavirus 2
EVVGDIILKP

SEQ ID NO: 8760 - protein, 11 aa, Severe acute respiratory syndrome-related coronavirus
  REGION 1..11: note = Table B: HLA-DQA1*03:02-B1*03:03L HLA-DQA1*05:01-B1*03:01L HLA-DRB1*04:03L HLA-DRB1*04:02L HLA-DQA1*01:02-B1*06:02L HLA-DQA1*05:05-B1*03:19L HLA-DQA1*05:01-B1*02:01L HLA-DPA1*03:01-B1*105:01L HLA-DQA1*05:05-B1*03:01L
  source 1..11: note = Severe acute respiratory syndrome coronavirus 2
VVGDIILKPAN

SEQ ID NO: 8761 - protein, 12 aa, Severe acute respiratory syndrome-related coronavirus
  REGION 1..12: note = Table B: HLA-DQA1*03:02-B1*03:03L HLA-DQA1*05:01-B1*03:01L HLA-DRB1*04:05L HLA-DQA1*01:02-B1*06:02L HLA-DRB1*14:01L HLA-DQA1*05:01-B1*02:01L HLA-DRB1*04:10L HLA-DRB1*12:01L HLA-DQA1*05:05-B1*03:01L HLA-DRB1*16:01L
  source 1..12: note = Severe acute respiratory syndrome coronavirus 2
VGDIILKPANNS

SEQ ID NO: 8762 - protein, 10 aa, Severe acute respiratory syndrome-related coronavirus
  REGION 1..10: note = Table B: HLA-DQA1*03:02-B1*03:03L HLA-DQA1*05:01-B1*03:01L HLA-DRB1*04:03L HLA-DRB1*13:02L HLA-DRB1*13:03L HLA-DRB1*01:03L HLA-DRB1*04:02L HLA-DRB1*04:05L HLA-DQA1*01:02-B1*06:02L HLA-DRB1*01:02L HLA-DRB4*03:01NL HLA-DRB1*08:77L
  REGION 1..10: note = CONT. FROM ABOVE: HLA-DPA1*01:03-B1*03:01L HLA-DPA1*03:01-B1*04: 02L HLA-DRB1*14:01L HLA-DRB1*14:02L HLA-DRB1*08:01L HLA-DQA1*01- B1*05L HLA-DQA1*05:05-B1*03:19L HLA-DQA1*05:01-B1*02:01L HLA-DPA 1*01:03-B1*04:01L HLA-DQA1*05:05-B1*03:116L HLA-DRB1*09:01L
  REGION 1..10: note = CONT. FROM ABOVE: HLA-DPA1*01:03-B1*04:02L HLA-DRB1*12:01L HLA-D PA1*03:01-B1*105:01L HLA-DQA1*03:01-B1*03:02L HLA-DRB1*14:17L HL A-DPA1*01:02-B1*04:01L HLA-DRB1*10:01L HLA-DRB1*16:01L HLA-DQA1* 01:03-B1*06:01L HLA-DQA1*02:01-B1*03:03L HLA-DRB1*15:03L
  source 1..10: note = Severe acute respiratory syndrome coronavirus 2
IILKPANNSL

SEQ ID NO: 8763 - protein, 11 aa, Severe acute respiratory syndrome-related coronavirus
  REGION 1..11: note = Table B: HLA-DQA1*03:02-B1*03:03L HLA-DRB1*04:03L HLA-DQA1*01:02-B1*06:02L
  source 1..11: note = Severe acute respiratory syndrome coronavirus 2
NNSLKITEEVG

SEQ ID NO: 8764 - protein, 12 aa, Severe acute respiratory syndrome-related coronavirus
  REGION 1..12: note = Table B: HLA-DQA1*03:02-B1*03:03L HLA-DQA1*05:01-B1*03:01L HLA-DRB1*04:05L HLA-DQA1*01:02-B1*06:02L HLA-DRB1*01:02L HLA-DRB1*14:01L HLA-DQA1*01-B1*05L HLA-DQA1*05:01-B1*02:01L HLA-DRB1*12:01L HLA-DPA1*02:01-B1*13:01L
  REGION 1..12: note = CONT. FROM ABOVE: HLA-DPA1*03:01-B1*105:01L HLA-DRB1*15:03L
  source 1..12: note = Severe acute respiratory syndrome coronavirus 2
SLKITEEVGHTD

SEQ ID NO: 8765 - protein, 10 aa, Severe acute respiratory syndrome-related coronavirus
  REGION 1..10: note = Table B: HLA-DQA1*03:02-B1*03:03M HLA-DQA1*05:01-B1*03:01L HLA-DRB1*04:03L HLA-DRB1*13:02L HLA-DRB1*13:03L HLA-DRB1*01:03L HLA-DRB1*04:02L HLA-DRB1*04:05L HLA-DRB4*03:01NL HLA-DRB1*08:77L HLA-DPA1*01:03-B1*03:01L HLA-DPA1*03:01-B1*04:02L
  REGION 1..10: note = CONT. FROM ABOVE: HLA-DRB1*14:01L HLA-DRB1*14:02L HLA-DQA1*01:01 -B1*05:01L HLA-DQA1*01-B1*05L HLA-DQA1*05:05-B1*03:19L HLA-DQA1* 05:01-B1*02:01L HLA-DQA1*05:05-B1*03:116L HLA-DRB1*09:01L HLA-DP A1*01:03-B1*04:02L HLA-DRB1*12:01L HLA-DPA1*03:01-B1*105:01L
  REGION 1..10: note = CONT. FROM ABOVE: HLA-DQA1*03:01-B1*03:02M HLA-DPA1*01:03-B1*104 :01L HLA-DRB1*14:17L HLA-DPA1*01:02-B1*04:01L HLA-DRB1*10:01L HL A-DRB1*16:01L HLA-DQA1*01:03-B1*06:01L HLA-DQA1*02:01-B1*03:03L HLA-DRB1*15:03L
  source 1..10: note = Severe acute respiratory syndrome coronavirus 2
ITEEVGHTDL

SEQ ID NO: 8766 - protein, 10 aa, Severe acute respiratory syndrome-related coronavirus
  REGION 1..10: note = Table B: HLA-DQA1*03:02-B1*03:03M HLA-DQA1*05:01-B1*03:01L HLA-DQA1*01-B1*05L HLA-DQA1*05:05-B1*03:19L HLA-DQA1*05:01-B1*02:01L HLA-DRB1*09:01L HLA-DQA1*03:01-B1*03:02L HLA-DPA1*01:03-B1*104:01L
  REGION 1..10: note = CONT. FROM ABOVE: HLA-DPA1*01:02-B1*04:01L HLA-DRB1*16:01L
  source 1..10: note = Severe acute respiratory syndrome coronavirus 2
TEEVGHTDLM

SEQ ID NO: 8767 - protein, 10 aa, Severe acute respiratory syndrome-related coronavirus
  REGION 1..10: note = Table B: HLA-DQA1*03:02-B1*03:03L HLA-DQA1*05:05-B1*03:19L HLA-DRB1*09:01L HLA-DQA1*03:01-B1*03:02L HLA-DPA1*01:03-B1*104:01L
  source 1..10: note = Severe acute respiratory syndrome coronavirus 2
EEVGHTDLMA

SEQ ID NO: 8768 - protein, 12 aa, Severe acute respiratory syndrome-related coronavirus
  REGION 1..12: note = Table B: HLA-DQA1*03:02-B1*03:03L HLA-DQA1*05:01-B1*03:01L HLA-DQA1*03:01-B1*03:02L HLA-DQA1*05:05-B1*03:01L HLA-DQA1*01:03-B1*06:01L
  source 1..12: note = Severe acute respiratory syndrome coronavirus 2
VGHTDLMAAYVD

SEQ ID NO: 8769 - protein, 11 aa, Severe acute respiratory syndrome-related coronavirus
  REGION 1..11: note = Table B: HLA-DQA1*03:02-B1*03:03L HLA-DQA1*05:01-B1*03:01L HLA-DRB1*04:03L HLA-DQA1*01:02-B1*06:02L HLA-DQA1*01:01-B1*05:01L HLA-DQA1*01-B1*05L HLA-DQA1*05:05-B1*03:19L HLA-DQA1*05:01-B1*02:01L
  REGION 1..11: note = CONT. FROM ABOVE: HLA-DQA1*03:01-B1*03:02L HLA-DQA1*05:05-B1*03: 01L HLA-DQA1*01:03-B1*06:01L HLA-DQA1*02:01-B1*03:03L
  source 1..11: note = Severe acute respiratory syndrome coronavirus 2
HTDLMAAYVDN

SEQ ID NO: 8770 - protein, 12 aa, Severe acute respiratory syndrome-related coronavirus
  REGION 1..12: note = Table B: HLA-DQA1*03:02-B1*03:03L HLA-DRB1*04:02L HLA-DRB1*14:17L HLA-DRB1*16:01L HLA-DQA1*02:01-B1*03:03L
  source 1..12: note = Severe acute respiratory syndrome coronavirus 2
TDLMAAYVDNSS

SEQ ID NO: 8771 - protein, 10 aa, Severe acute respiratory syndrome-related coronavirus
  REGION 1..10: note = Table B: HLA-DQA1*03:02-B1*03:03L HLA-DQA1*01-B1*05L HLA-DQA1*05:01-B1*02:01L HLA-DQA1*03:01-B1*03:02L HLA-DQA1*02:01-B1*03:03L HLA-DRB1*15:03L
  source 1..10: note = Severe acute respiratory syndrome coronavirus 2
MAAYVDNSSL

SEQ ID NO: 8772 - protein, 10 aa, Severe acute respiratory syndrome-related coronavirus
  REGION 1..10: note = Table B: HLA-DQA1*03:02-B1*03:03L HLA-DRB1*04:03L HLA-DRB1*04:05L HLA-DQA1*01:02-B1*06:02L HLA-DRB1*01:01L HLA-DRB1*11:02L HLA-DQA1*05:05-B1*03:19L HLA-DQA1*05:05-B1*03:116L HLA-DPA1*02:01-B1*13:01M
  REGION 1..10: note = CONT. FROM ABOVE: HLA-DPA1*01:03-B1*104:01L HLA-DRB1*16:01L HLA- DQA1*01:03-B1*06:01L HLA-DRB1*08:03L HLA-DQA1*02:01-B1*03:03L HL A-DRB1*15:03L
  source 1..10: note = Severe acute respiratory syndrome coronavirus 2
AYVDNSSLTI

SEQ ID NO: 8773 - protein, 10 aa, Severe acute respiratory syndrome-related coronavirus
  REGION 1..10: note = Table B: HLA-DQA1*03:02-B1*03:03L HLA-DQA1*05:01-B1*03:01L HLA-DRB1*04:01L HLA-DRB1*04:03L HLA-DRB1*13:02L HLA-DRB1*13:03L HLA-DRB1*01:03L HLA-DRB1*04:02L HLA-DRB1*04:05L HLA-DRB1*01:01L HLA-DRB1*01:02L HLA-DRB4*03:01NL HLA-DRB1*08:04L HLA-DRB1*08:77L
  REGION 1..10: note = CONT. FROM ABOVE: HLA-DRB3*02:01L HLA-DPA1*01:03-B1*03:01L HLA-D PA1*03:01-B1*04:02L HLA-DRB1*03:01L HLA-DRB1*14:01L HLA-DRB1*11: 03L HLA-DRB1*11:04L HLA-DRB1*14:02L HLA-DRB1*11:01L HLA-DRB5*01: 01L HLA-DQA1*01-B1*05L HLA-DQA1*05:05-B1*03:19L
  REGION 1..10: note = CONT. FROM ABOVE: HLA-DQA1*05:01-B1*02:01L HLA-DPA1*01:03-B1*04: 02L HLA-DRB1*12:01L HLA-DRB1*12:02L HLA-DRB3*01:01L HLA-DPA1*03: 01-B1*105:01L HLA-DQA1*03:01-B1*03:02L HLA-DRB1*14:54L HLA-DQA1* 05:05-B1*03:01L HLA-DRB1*14:17L HLA-DPA1*01:02-B1*04:01L
  REGION 1..10: note = CONT. FROM ABOVE: HLA-DRB1*07:01L HLA-DRB1*10:01L HLA-DRB1*16:01 L HLA-DRB1*04:08L HLA-DQA1*02:01-B1*03:03L HLA-DRB1*15:03L
  source 1..10: note = Severe acute respiratory syndrome coronavirus 2
YVDNSSLTIK

SEQ ID NO: 8774 - protein, 11 aa, Severe acute respiratory syndrome-related coronavirus
  REGION 1..11: note = Table B: HLA-DQA1*03:02-B1*03:03L HLA-DQA1*05:01-B1*03:01L HLA-DQA1*01:02-B1*06:02L
  source 1..11: note = Severe acute respiratory syndrome coronavirus 2
DNSSLTIKKPN

SEQ ID NO: 8775 - protein, 11 aa, Severe acute respiratory syndrome-related coronavirus
  REGION 1..11: note = Table B: HLA-DQA1*03:02-B1*03:03L HLA-DQA1*05:01-B1*03:01L HLA-DRB1*14:01L HLA-DRB1*12:01L HLA-DPA1*01:02-B1*04:01L HLA-DRB1*16:01L
  source 1..11: note = Severe acute respiratory syndrome coronavirus 2
SSLTIKKPNEL

SEQ ID NO: 8776 - protein, 10 aa, Severe acute respiratory syndrome-related coronavirus
  REGION 1..10: note = Table B: HLA-DQA1*03:02-B1*03:03L HLA-DQA1*05:01-B1*03:01L HLA-DRB1*12:01L HLA-DQA1*03:01-B1*03:02L HLA-DPA1*01:02-B1*04:01L HLA-DRB1*16:01L HLA-DQA1*02:01-B1*03:03L
  source 1..10: note = Severe acute respiratory syndrome coronavirus 2
GLKTLATHGL

SEQ ID NO: 8777 - protein, 10 aa, Severe acute respiratory syndrome-related coronavirus
  REGION 1..10: note = Table B: HLA-DQA1*03:02-B1*03:03M HLA-DQA1*05:01-B1*03:01L HLA-DRB1*04:01L HLA-DRB1*13:03L HLA-DRB1*01:03L HLA-DRB1*04:04L HLA-DQA1*01:02-B1*06:02L HLA-DRB1*01:02L HLA-DPA1*03:01-B1*04:02L HLA-DRB1*14:01L HLA-DRB1*14:02L
  REGION 1..10: note = CONT. FROM ABOVE: HLA-DRB1*08:01L HLA-DQA1*05:05-B1*03:19L HLA-D QA1*05:01-B1*02:01L HLA-DPA1*01:03-B1*04:01L HLA-DQA1*05:05-B1*0 3:116M HLA-DRB1*09:01L HLA-DPA1*01:03-B1*04:02L HLA-DRB1*12:01L HLA-DPA1*02:01-B1*13:01L HLA-DPA1*03:01-B1*105:01L
  REGION 1..10: note = CONT. FROM ABOVE: HLA-DQA1*03:01-B1*03:02L HLA-DPA1*01:03-B1*104 :01L HLA-DPA1*01:02-B1*04:01L HLA-DRB1*07:01L HLA-DRB1*10:01L HL A-DRB1*16:01L HLA-DQA1*01:03-B1*06:01L HLA-DRB1*08:03L HLA-DQA1* 02:01-B1*03:03M HLA-DRB1*15:03L
  source 1..10: note = Severe acute respiratory syndrome coronavirus 2
TLATHGLAAV

SEQ ID NO: 8778 - protein, 12 aa, Severe acute respiratory syndrome-related coronavirus
  REGION 1..12: note = Table B: HLA-DQA1*03:02-B1*03:03L HLA-DQA1*05:01-B1*03:01L HLA-DRB1*04:03L HLA-DRB1*13:02L HLA-DRB1*04:02L HLA-DRB1*01:02L HLA-DRB1*08:77L HLA-DRB3*02:01L HLA-DPA1*01:03-B1*03:01L HLA-DPA1*03:01-B1*04:02L HLA-DRB1*14:01L
  REGION 1..12: note = CONT. FROM ABOVE: HLA-DQA1*05:05-B1*03:19L HLA-DQA1*05:01-B1*02: 01L HLA-DRB1*12:01L HLA-DRB1*12:02L HLA-DPA1*03:01-B1*105:01L HL A-DQA1*03:01-B1*03:02L HLA-DRB1*14:54L HLA-DQA1*05:05-B1*03:01L HLA-DRB1*14:17L HLA-DRB1*16:01L
  source 1..12: note = Severe acute respiratory syndrome coronavirus 2
THGLAAVNSVPW

SEQ ID NO: 8779 - protein, 12 aa, Severe acute respiratory syndrome-related coronavirus
  REGION 1..12: note = Table B: HLA-DQA1*03:02-B1*03:03L HLA-DQA1*05:01-B1*03:01L HLA-DRB1*04:02L HLA-DRB1*01:02L HLA-DQA1*05:05-B1*03:19L HLA-DPA1*03:01-B1*105:01L HLA-DQA1*05:05-B1*03:01L HLA-DRB1*14:17L HLA-DRB1*16:01L
  source 1..12: note = Severe acute respiratory syndrome coronavirus 2
HGLAAVNSVPWD

SEQ ID NO: 8780 - protein, 10 aa, Severe acute respiratory syndrome-related coronavirus
  REGION 1..10: note = Table B: HLA-DQA1*03:02-B1*03:03L HLA-DQA1*01:02-B1*06:02L HLA-DQA1*05:05-B1*03:19L HLA-DPA1*02:01-B1*13:01L HLA-DPA1*03:01-B1*105:01L HLA-DQA1*03:01-B1*03:02L HLA-DPA1*01:03-B1*104:01L HLA-DQA1*01:03-B1*06:01L
  REGION 1..10: note = CONT. FROM ABOVE: HLA-DQA1*02:01-B1*03:03L HLA-DRB1*15:03L
  source 1..10: note = Severe acute respiratory syndrome coronavirus 2
AVNSVPWDTI

SEQ ID NO: 8781 - protein, 11 aa, Severe acute respiratory syndrome-related coronavirus
  REGION 1..11: note = Table B: HLA-DQA1*03:02-B1*03:03L HLA-DRB1*04:03L HLA-DRB1*04:02L HLA-DQA1*01-B1*05L HLA-DQA1*05:01-B1*02:01L HLA-DPA1*03:01-B1*105:01L HLA-DQA1*03:01-B1*03:02L HLA-DRB1*14:17L HLA-DPA1*01:02-B1*04:01L HLA-DRB1*16:01L
  REGION 1..11: note = CONT. FROM ABOVE: HLA-DQA1*01:03-B1*06:01L HLA-DQA1*02:01-B1*03: 03L
  source 1..11: note = Severe acute respiratory syndrome coronavirus 2
VNSVPWDTIAN

SEQ ID NO: 8782 - protein, 11 aa, Severe acute respiratory syndrome-related coronavirus
  REGION 1..11: note = Table B: HLA-DQA1*03:02-B1*03:03L HLA-DQA1*05:01-B1*03:01L HLA-DRB1*11:02L HLA-DPA1*01:03-B1*04:02L HLA-DRB1*08:02L
  source 1..11: note = Severe acute respiratory syndrome coronavirus 2
NSVPWDTIANY

SEQ ID NO: 8783 - protein, 12 aa, Severe acute respiratory syndrome-related coronavirus
  REGION 1..12: note = Table B: HLA-DQA1*03:02-B1*03:03L HLA-DQA1*05:01-B1*03:01L HLA-DRB1*04:03L HLA-DRB1*13:03L HLA-DRB1*01:03L HLA-DRB1*04:02L HLA-DRB1*04:05L HLA-DQA1*01:02-B1*06:02L HLA-DRB1*01:02L HLA-DRB4*03:01NL HLA-DQA1*01:01-B1*05:01L HLA-DQA1*01-B1*05L
  REGION 1..12: note = CONT. FROM ABOVE: HLA-DQA1*05:05-B1*03:19L HLA-DQA1*05:01-B1*02: 01L HLA-DRB1*12:01L HLA-DPA1*03:01-B1*105:01L HLA-DQA1*05:05-B1* 03:01L HLA-DRB1*14:17L HLA-DPA1*01:02-B1*04:01L HLA-DRB1*16:01L HLA-DQA1*01:03-B1*06:01L HLA-DRB1*04:08L
  REGION 1..12: note = CONT. FROM ABOVE: HLA-DQA1*02:01-B1*03:03L
  source 1..12: note = Severe acute respiratory syndrome coronavirus 2
VPWDTIANYAKP

SEQ ID NO: 8784 - protein, 10 aa, Severe acute respiratory syndrome-related coronavirus
  REGION 1..10: note = Table B: HLA-DQA1*03:02-B1*03:03L HLA-DQA1*05:01-B1*03:01L HLA-DRB1*04:03L HLA-DRB1*13:03L HLA-DRB1*01:03L HLA-DQA1*01:02-B1*06:02L HLA-DRB4*03:01NL HLA-DRB1*08:77L HLA-DPA1*01:03-B1*03:01L HLA-DPA1*03:01-B1*04:02L
  REGION 1..10: note = CONT. FROM ABOVE: HLA-DRB1*14:01L HLA-DRB1*14:02L HLA-DQA1*01-B1 *05L HLA-DQA1*05:05-B1*03:19L HLA-DQA1*05:01-B1*02:01L HLA-DPA1* 01:03-B1*04:01L HLA-DRB1*12:01L HLA-DPA1*02:01-B1*13:01L HLA-DPA 1*03:01-B1*105:01L HLA-DQA1*03:01-B1*03:02L
  REGION 1..10: note = CONT. FROM ABOVE: HLA-DQA1*05:05-B1*03:01L HLA-DRB1*14:17L HLA-D PA1*01:02-B1*04:01L HLA-DRB1*16:01L HLA-DQA1*01:03-B1*06:01L HLA -DQA1*02:01-B1*03:03L HLA-DRB1*15:03L
  source 1..10: note = Severe acute respiratory syndrome coronavirus 2
DTIANYAKPF

SEQ ID NO: 8785 - protein, 10 aa, Severe acute respiratory syndrome-related coronavirus
  REGION 1..10: note = Table B: HLA-DQA1*03:02-B1*03:03L HLA-DQA1*05:01-B1*03:01L HLA-DRB1*14:01L HLA-DQA1*03:01-B1*03:02L HLA-DQA1*01:03-B1*06:01L HLA-DQA1*02:01-B1*03:03L HLA-DRB1*15:03L
  source 1..10: note = Severe acute respiratory syndrome coronavirus 2
TIANYAKPFL

SEQ ID NO: 8786 - protein, 10 aa, Severe acute respiratory syndrome-related coronavirus
  REGION 1..10: note = Table B: HLA-DQA1*03:02-B1*03:03L HLA-DRB1*01:03L HLA-DRB1*04:05L HLA-DQA1*01:02-B1*06:02L HLA-DQA1*05:05-B1*03:19L HLA-DQA1*05:05-B1*03:116L HLA-DPA1*02:01-B1*13:01L HLA-DPA1*03:01-B1*105:01L
  REGION 1..10: note = CONT. FROM ABOVE: HLA-DQA1*03:01-B1*03:02L HLA-DPA1*01:02-B1*04: 01L HLA-DRB1*16:01L HLA-DQA1*01:03-B1*06:01L HLA-DQA1*02:01-B1*0 3:03L HLA-DRB1*15:03L
  source 1..10: note = Severe acute respiratory syndrome coronavirus 2
NYAKPFLNKV

SEQ ID NO: 8787 - protein, 12 aa, Severe acute respiratory syndrome-related coronavirus
  REGION 1..12: note = Table B: HLA-DQA1*03:02-B1*03:03L HLA-DQA1*05:01-B1*03:01L HLA-DRB1*01:03L HLA-DRB1*04:02L HLA-DQA1*01:02-B1*06:02L HLA-DRB1*01:02L HLA-DQA1*05:05-B1*03:19L HLA-DPA1*03:01-B1*105:01L HLA-DQA1*05:05-B1*03:01L
  REGION 1..12: note = CONT. FROM ABOVE: HLA-DRB1*16:01L HLA-DQA1*01:03-B1*06:01L HLA-D RB1*04:08L HLA-DRB1*15:03L
  source 1..12: note = Severe acute respiratory syndrome coronavirus 2
PFLNKVVSTTTN

SEQ ID NO: 8788 - protein, 12 aa, Severe acute respiratory syndrome-related coronavirus
  REGION 1..12: note = Table B: HLA-DQA1*03:02-B1*03:03L HLA-DQA1*05:01-B1*03:01L HLA-DRB1*13:02L HLA-DRB1*13:03L HLA-DRB1*01:03L HLA-DRB1*04:02L HLA-DRB1*04:05L HLA-DRB1*01:02L HLA-DRB4*03:01NL HLA-DRB1*08:04L HLA-DRB1*08:77L HLA-DRB3*02:01L HLA-DPA1*01:03-B1*03:01L
  REGION 1..12: note = CONT. FROM ABOVE: HLA-DPA1*03:01-B1*04:02L HLA-DRB1*14:01L HLA-D RB1*11:03L HLA-DRB1*11:04L HLA-DQA1*01-B1*05L HLA-DQA1*05:01-B1* 02:01L HLA-DPA1*01:03-B1*04:01L HLA-DRB1*04:10L HLA-DRB1*09:01L HLA-DRB1*12:02L HLA-DPA1*02:01-B1*13:01L
  REGION 1..12: note = CONT. FROM ABOVE: HLA-DPA1*03:01-B1*105:01L HLA-DRB1*14:54L HLA- DQA1*05:05-B1*03:01L HLA-DPA1*01:02-B1*04:01L HLA-DRB1*07:01L HL A-DRB1*15:03L
  source 1..12: note = Severe acute respiratory syndrome coronavirus 2
LNKVVSTTTNIV

SEQ ID NO: 8789 - protein, 10 aa, Severe acute respiratory syndrome-related coronavirus
  REGION 1..10: note = Table B: HLA-DQA1*03:02-B1*03:03L HLA-DRB1*04:03L HLA-DRB1*13:02L HLA-DRB1*13:03L HLA-DRB1*01:03L HLA-DRB1*04:02L HLA-DRB1*04:05L HLA-DRB4*03:01NL HLA-DRB1*08:77L HLA-DRB3*02:01L HLA-DRB1*14:01L HLA-DRB1*11:03L HLA-DRB1*11:04L
  REGION 1..10: note = CONT. FROM ABOVE: HLA-DQA1*05:01-B1*02:01L HLA-DRB1*04:10L HLA-D RB1*12:01L HLA-DRB1*12:02L HLA-DQA1*03:01-B1*03:02L HLA-DRB1*14: 54L HLA-DRB1*14:17L HLA-DRB1*07:01L HLA-DRB1*16:01L HLA-DQA1*02: 01-B1*03:03L
  source 1..10: note = Severe acute respiratory syndrome coronavirus 2
VVSTTTNIVT

SEQ ID NO: 8790 - protein, 10 aa, Severe acute respiratory syndrome-related coronavirus
  REGION 1..10: note = Table B: HLA-DQA1*03:02-B1*03:03L HLA-DQA1*01:02-B1*06:02L HLA-DQA1*05:05-B1*03:19L HLA-DPA1*02:01-B1*13:01L HLA-DQA1*01:03-B1*06:01L
  source 1..10: note = Severe acute respiratory syndrome coronavirus 2
TNYMPYFFTL

SEQ ID NO: 8791 - protein, 10 aa, Severe acute respiratory syndrome-related coronavirus
  REGION 1..10: note = Table B: HLA-DQA1*03:02-B1*03:03L HLA-DQA1*05:01-B1*03:01L HLA-DRB1*04:03L HLA-DRB1*13:02L HLA-DRB1*13:03L HLA-DRB1*01:03M HLA-DRB1*04:02L HLA-DRB1*04:05L HLA-DQA1*01:02-B1*06:02L HLA-DRB1*01:01L HLA-DRB1*01:02M HLA-DRB4*03:01NL HLA-DRB1*08:77L
  REGION 1..10: note = CONT. FROM ABOVE: HLA-DRB3*02:01L HLA-DRB1*14:01L HLA-DRB1*11:03 L HLA-DRB1*11:04L HLA-DRB1*08:01L HLA-DRB1*11:01L HLA-DRB1*12:01 L HLA-DRB1*12:02L HLA-DRB3*01:01L HLA-DPA1*03:01-B1*105:01L HLA- DQA1*03:01-B1*03:02L HLA-DRB1*14:54L HLA-DQA1*05:05-B1*03:01L
  REGION 1..10: note = CONT. FROM ABOVE: HLA-DRB1*14:17L HLA-DPA1*01:02-B1*04:01L HLA-D RB1*07:01L HLA-DRB1*16:01L HLA-DQA1*01:03-B1*06:01L HLA-DRB1*04: 08L HLA-DQA1*02:01-B1*03:03L HLA-DRB1*15:03L
  source 1..10: note = Severe acute respiratory syndrome coronavirus 2
FTRSTNSRIK

SEQ ID NO: 8792 - protein, 10 aa, Severe acute respiratory syndrome-related coronavirus
  REGION 1..10: note = Table B: HLA-DQA1*03:02-B1*03:03L HLA-DQA1*05:05-B1*03:19L HLA-DQA1*03:01-B1*03:02L HLA-DRB1*16:01L HLA-DQA1*01:03-B1*06:01L HLA-DQA1*02:01-B1*03:03L
  source 1..10: note = Severe acute respiratory syndrome coronavirus 2
RIKASMPTTI

SEQ ID NO: 8793 - protein, 12 aa, Severe acute respiratory syndrome-related coronavirus
  REGION 1..12: note = Table B: HLA-DQA1*03:02-B1*03:03L HLA-DPA1*03:01-B1*105:01L HLA-DRB1*15:03L
  source 1..12: note = Severe acute respiratory syndrome coronavirus 2
IKASMPTTIAKN

SEQ ID NO: 8794 - protein, 10 aa, Severe acute respiratory syndrome-related coronavirus
  REGION 1..10: note = Table B: HLA-DQA1*03:02-B1*03:03L HLA-DQA1*05:01-B1*03:01L HLA-DRB1*13:03L HLA-DRB1*04:05L HLA-DQA1*01:02-B1*06:02L HLA-DRB1*01:01L HLA-DRB1*01:02L HLA-DRB4*03:01NL HLA-DPA1*01:03-B1*03:01L HLA-DPA1*03:01-B1*04:02L
  REGION 1..10: note = CONT. FROM ABOVE: HLA-DRB1*14:01L HLA-DRB1*08:01L HLA-DQA1*01-B1 *05L HLA-DQA1*05:05-B1*03:19L HLA-DQA1*05:01-B1*02:01L HLA-DPA1* 01:03-B1*04:01L HLA-DQA1*05:05-B1*03:116M HLA-DPA1*02:01-B1*13:0 1M HLA-DPA1*03:01-B1*105:01M HLA-DQA1*03:01-B1*03:02L
  REGION 1..10: note = CONT. FROM ABOVE: HLA-DPA1*01:02-B1*04:01L HLA-DRB1*10:01L HLA-D RB1*16:01L HLA-DQA1*01:03-B1*06:01L HLA-DRB1*08:03L HLA-DQA1*02: 01-B1*03:03L HLA-DRB1*15:03L
  source 1..10: note = Severe acute respiratory syndrome coronavirus 2
MPTTIAKNTV

SEQ ID NO: 8795 - protein, 10 aa, Severe acute respiratory syndrome-related coronavirus
  REGION 1..10: note = Table B: HLA-DQA1*03:02-B1*03:03L HLA-DRB1*04:03L HLA-DRB1*04:02L HLA-DQA1*01-B1*05L HLA-DQA1*03:01-B1*03:02L HLA-DRB1*14:17L HLA-DPA1*01:02-B1*04:01L HLA-DQA1*02:01-B1*03:03L
  source 1..10: note = Severe acute respiratory syndrome coronavirus 2
ASFNYLKSPN

SEQ ID NO: 8796 - protein, 10 aa, Severe acute respiratory syndrome-related coronavirus
  REGION 1..10: note = Table B: HLA-DQA1*03:02-B1*03:03L HLA-DQA1*05:01-B1*03:01L HLA-DRB1*04:03L HLA-DRB1*04:05L HLA-DQA1*01:02-B1*06:02L HLA-DRB1*01:02L HLA-DRB1*08:77L HLA-DPA1*03:01-B1*04:02L HLA-DQA1*05:05-B1*03:19L HLA-DQA1*05:01-B1*02:01L
  REGION 1..10: note = CONT. FROM ABOVE: HLA-DRB1*12:01L HLA-DPA1*02:01-B1*13:01L HLA-D PA1*03:01-B1*105:01L HLA-DPA1*01:02-B1*04:01L HLA-DRB1*16:01L HL A-DQA1*01:03-B1*06:01L HLA-DQA1*02:01-B1*03:03L HLA-DRB1*15:03L
  source 1..10: note = Severe acute respiratory syndrome coronavirus 2
SFNYLKSPNF

SEQ ID NO: 8797 - protein, 10 aa, Severe acute respiratory syndrome-related coronavirus
  REGION 1..10: note = Table B: HLA-DQA1*03:02-B1*03:03L HLA-DQA1*05:01-B1*03:01L HLA-DRB1*04:03L HLA-DRB1*13:02L HLA-DRB1*01:03L HLA-DQA1*01:02-B1*06:02L HLA-DRB1*01:02L HLA-DPA1*01:03-B1*03:01L HLA-DPA1*03:01-B1*04:02L
  REGION 1..10: note = CONT. FROM ABOVE: HLA-DRB1*14:01L HLA-DRB1*14:02L HLA-DRB1*08:01 L HLA-DQA1*01-B1*05L HLA-DQA1*05:05-B1*03:19L HLA-DQA1*05:01-B1* 02:01L HLA-DPA1*01:03-B1*04:01L HLA-DQA1*05:05-B1*03:116L HLA-DP A1*01:03-B1*04:02L HLA-DRB1*12:01L HLA-DPA1*02:01-B1*13:01L
  REGION 1..10: note = CONT. FROM ABOVE: HLA-DPA1*03:01-B1*105:01L HLA-DQA1*03:01-B1*03 :02L HLA-DPA1*01:02-B1*04:01L HLA-DRB1*16:01L HLA-DQA1*01:03-B1* 06:01L HLA-DQA1*02:01-B1*03:03L HLA-DRB1*15:03L
  source 1..10: note = Severe acute respiratory syndrome coronavirus 2
YLKSPNFSKL

SEQ ID NO: 8798 - protein, 11 aa, Severe acute respiratory syndrome-related coronavirus
  REGION 1..11: note = Table B: HLA-DQA1*03:02-B1*03:03L HLA-DQA1*05:01-B1*03:01L HLA-DQA1*01:02-B1*06:02L HLA-DQA1*05:05-B1*03:19L HLA-DQA1*05:01-B1*02:01L HLA-DPA1*03:01-B1*105:01L HLA-DQA1*03:01-B1*03:02L HLA-DPA1*01:02-B1*04:01L
  REGION 1..11: note = CONT. FROM ABOVE: HLA-DQA1*01:03-B1*06:01L HLA-DQA1*02:01-B1*03: 03L
  source 1..11: note = Severe acute respiratory syndrome coronavirus 2
SPNFSKLINII

SEQ ID NO: 8799 - protein, 10 aa, Severe acute respiratory syndrome-related coronavirus
  REGION 1..10: note = Table B: HLA-DQA1*03:02-B1*03:03L HLA-DQA1*05:01-B1*03:01L HLA-DRB1*04:03L HLA-DQA1*01:02-B1*06:02L HLA-DRB1*08:77L HLA-DPA1*03:01-B1*04:02L HLA-DQA1*05:05-B1*03:19L HLA-DQA1*05:01-B1*02:01L HLA-DRB1*12:01L
  REGION 1..10: note = CONT. FROM ABOVE: HLA-DPA1*02:01-B1*13:01L HLA-DPA1*03:01-B1*105 :01L HLA-DQA1*03:01-B1*03:02L HLA-DQA1*05:05-B1*03:01L HLA-DPA1* 01:02-B1*04:01L HLA-DRB1*16:01L HLA-DQA1*01:03-B1*06:01L HLA-DQA 1*02:01-B1*03:03L HLA-DRB1*15:03L
  source 1..10: note = Severe acute respiratory syndrome coronavirus 2
IYSTAALGVL

SEQ ID NO: 8800 - protein, 10 aa, Severe acute respiratory syndrome-related coronavirus
  REGION 1..10: note = Table B: HLA-DQA1*03:02-B1*03:03L HLA-DQA1*03:01-B1*03:02L HLA-DQA1*02:01-B1*03:03L
  source 1..10: note = Severe acute respiratory syndrome coronavirus 2
AALGVLMSNL

SEQ ID NO: 8801 - protein, 12 aa, Severe acute respiratory syndrome-related coronavirus
  REGION 1..12: note = Table B: HLA-DQA1*03:02-B1*03:03L HLA-DRB1*04:02L HLA-DRB1*01:02L HLA-DRB1*08:04L HLA-DRB3*02:01L HLA-DRB1*12:02L HLA-DQA1*03:01-B1*03:02L HLA-DRB1*14:54L HLA-DPA1*01:02-B1*04:01L
  source 1..12: note = Severe acute respiratory syndrome coronavirus 2
GVLMSNLGMPSY

SEQ ID NO: 8802 - protein, 16 aa, Severe acute respiratory syndrome-related coronavirus
  REGION 1..16: note = Table B: HLA-DQA1*03:02-B1*03:03L
  source 1..16: note = Severe acute respiratory syndrome coronavirus 2
VLMSNLGMPSYCTGYR

SEQ ID NO: 8803 - protein, 12 aa, Severe acute respiratory syndrome-related coronavirus
  REGION 1..12: note = Table B: HLA-DQA1*03:02-B1*03:03L HLA-DQA1*05:01-B1*03:01L HLA-DRB1*04:03L HLA-DRB1*01:03L HLA-DRB1*04:02L HLA-DRB1*04:05L HLA-DQA1*01:02-B1*06:02L HLA-DRB1*01:02L HLA-DPA1*01:03-B1*03:01L HLA-DPA1*03:01-B1*04:02L
  REGION 1..12: note = CONT. FROM ABOVE: HLA-DQA1*01-B1*05L HLA-DQA1*05:05-B1*03:19L HL A-DQA1*05:01-B1*02:01L HLA-DPA1*01:03-B1*04:02L HLA-DRB1*12:01L HLA-DPA1*02:01-B1*13:01L HLA-DQA1*05:05-B1*03:01L HLA-DRB1*16:01 L HLA-DRB1*04:08L HLA-DRB1*15:03L
  source 1..12: note = Severe acute respiratory syndrome coronavirus 2
TGYREGYLNSTN

SEQ ID NO: 8804 - protein, 10 aa, Severe acute respiratory syndrome-related coronavirus
  REGION 1..10: note = Table B: HLA-DQA1*03:02-B1*03:03L HLA-DRB1*11:02L HLA-DQA1*05:05-B1*03:19M HLA-DRB1*09:01L HLA-DQA1*03:01-B1*03:02L HLA-DPA1*01:03-B1*104:01L
  source 1..10: note = Severe acute respiratory syndrome coronavirus 2
REGYLNSTNV

SEQ ID NO: 8805 - protein, 10 aa, Severe acute respiratory syndrome-related coronavirus
  REGION 1..10: note = Table B: HLA-DQA1*03:02-B1*03:03L HLA-DQA1*05:01-B1*03:01L HLA-DRB1*04:03L HLA-DRB1*01:03L HLA-DRB1*04:05L HLA-DQA1*01:02-B1*06:02L HLA-DRB1*01:01L HLA-DRB1*01:02L HLA-DRB1*08:77L HLA-DPA1*03:01-B1*04:02L HLA-DRB1*14:01L
  REGION 1..10: note = CONT. FROM ABOVE: HLA-DRB1*14:02L HLA-DQA1*05:05-B1*03:19L HLA-D QA1*05:05-B1*03:116L HLA-DRB1*09:01L HLA-DPA1*02:01-B1*13:01M HL A-DPA1*03:01-B1*105:01L HLA-DQA1*03:01-B1*03:02L HLA-DPA1*01:03- B1*104:01L HLA-DPA1*01:02-B1*04:01L HLA-DRB1*16:01L
  REGION 1..10: note = CONT. FROM ABOVE: HLA-DQA1*01:03-B1*06:01M HLA-DRB1*08:03L HLA-D QA1*02:01-B1*03:03L HLA-DRB1*15:03L
  source 1..10: note = Severe acute respiratory syndrome coronavirus 2
GYLNSTNVTI

SEQ ID NO: 8806 - protein, 10 aa, Severe acute respiratory syndrome-related coronavirus
  REGION 1..10: note = Table B: HLA-DQA1*03:02-B1*03:03L HLA-DQA1*05:01-B1*03:01L HLA-DRB1*04:03L HLA-DRB1*13:02L HLA-DRB1*13:03M HLA-DRB1*01:03L HLA-DQA1*01:02-B1*06:02M HLA-DRB4*03:01NL HLA-DRB1*08:77L HLA-DPA1*01:03-B1*03:01L HLA-DPA1*03:01-B1*04:02L
  REGION 1..10: note = CONT. FROM ABOVE: HLA-DRB1*03:01L HLA-DRB1*14:01L HLA-DRB1*11:02 L HLA-DRB1*14:02L HLA-DRB5*01:01L HLA-DQA1*01-B1*05L HLA-DQA1*05 :05-B1*03:19M HLA-DQA1*05:01-B1*02:01L HLA-DRB4*01:01L HLA-DPA1* 01:03-B1*04:01M HLA-DQA1*05:05-B1*03:116L
  REGION 1..10: note = CONT. FROM ABOVE: HLA-DPA1*01:03-B1*04:02L HLA-DRB1*12:01L HLA-D PA1*02:01-B1*13:01L HLA-DPA1*03:01-B1*105:01M HLA-DPA1*01:03-B1* 104:01L HLA-DQA1*05:05-B1*03:01L HLA-DPA1*01:02-B1*04:01L HLA-DR B1*10:01L HLA-DRB1*16:01L HLA-DQA1*01:03-B1*06:01L
  REGION 1..10: note = CONT. FROM ABOVE: HLA-DRB1*08:02L HLA-DQA1*02:01-B1*03:03L HLA-D RB1*15:03L
  source 1..10: note = Severe acute respiratory syndrome coronavirus 2
NSTNVTIATY

SEQ ID NO: 8807 - protein, 10 aa, Severe acute respiratory syndrome-related coronavirus
  REGION 1..10: note = Table B: HLA-DQA1*03:02-B1*03:03L
  source 1..10: note = Severe acute respiratory syndrome coronavirus 2
LDSLDTYPSL

SEQ ID NO: 8808 - protein, 11 aa, Severe acute respiratory syndrome-related coronavirus
  REGION 1..11: note = Table B: HLA-DQA1*03:02-B1*03:03L HLA-DPA1*02:01-B1*13:01L HLA-DQA1*01:03-B1*06:01L
  source 1..11: note = Severe acute respiratory syndrome coronavirus 2
SLDTYPSLETI

SEQ ID NO: 8809 - protein, 11 aa, Severe acute respiratory syndrome-related coronavirus
  REGION 1..11: note = Table B: HLA-DQA1*03:02-B1*03:03L HLA-DQA1*05:01-B1*03:01L HLA-DQA1*01:02-B1*06:02L HLA-DRB1*01:02L HLA-DPA1*03:01-B1*105:01L HLA-DPA1*01:03-B1*104:01L HLA-DRB1*08:03L HLA-DQA1*02:01-B1*03:03L
  source 1..11: note = Severe acute respiratory syndrome coronavirus 2
DTYPSLETIQI

SEQ ID NO: 8810 - protein, 10 aa, Severe acute respiratory syndrome-related coronavirus
  REGION 1..10: note = Table B: HLA-DQA1*03:02-B1*03:03L HLA-DQA1*05:01-B1*03:01L HLA-DRB1*13:03M HLA-DQA1*01:02-B1*06:02H HLA-DRB1*01:01L HLA-DRB1*01:02L HLA-DRB4*03:01NL HLA-DPA1*01:03-B1*03:01L HLA-DPA1*03:01-B1*04:02L HLA-DRB1*03:01L HLA-DRB1*14:01L
  REGION 1..10: note = CONT. FROM ABOVE: HLA-DRB1*14:02L HLA-DRB1*08:01L HLA-DRB5*01:01 L HLA-DQA1*05:01-B1*02:01L HLA-DRB4*01:01L HLA-DPA1*01:03-B1*04: 01M HLA-DQA1*05:05-B1*03:116L HLA-DRB1*09:01L HLA-DPA1*01:03-B1* 04:02L HLA-DRB1*12:01L HLA-DPA1*02:01-B1*13:01L
  REGION 1..10: note = CONT. FROM ABOVE: HLA-DPA1*03:01-B1*105:01H HLA-DQA1*05:05-B1*03 :01L HLA-DPA1*01:02-B1*04:01L HLA-DQA1*01:03-B1*06:01L HLA-DQA1* 02:01-B1*03:03L HLA-DRB1*15:01L HLA-DRB1*15:03M
  source 1..10: note = Severe acute respiratory syndrome coronavirus 2
ETIQITISSF

SEQ ID NO: 8811 - protein, 12 aa, Severe acute respiratory syndrome-related coronavirus
  REGION 1..12: note = Table B: HLA-DQA1*03:02-B1*03:03L HLA-DQA1*05:01-B1*03:01L HLA-DRB1*13:02L HLA-DRB1*13:03L HLA-DRB1*04:02L HLA-DRB1*04:04L HLA-DRB1*01:02L HLA-DRB4*03:01NL HLA-DRB1*08:04L HLA-DRB3*02:01L HLA-DPA1*01:03-B1*03:01L HLA-DPA1*03:01-B1*04:02L
  REGION 1..12: note = CONT. FROM ABOVE: HLA-DRB1*14:01L HLA-DRB1*08:01L HLA-DPA1*01:03 -B1*04:01L HLA-DRB1*04:10L HLA-DPA1*01:03-B1*04:02L HLA-DRB1*12: 01L HLA-DRB3*01:01L HLA-DQA1*03:01-B1*03:02L HLA-DRB1*14:54L HLA -DPA1*01:03-B1*104:01L HLA-DQA1*05:05-B1*03:01L
  REGION 1..12: note = CONT. FROM ABOVE: HLA-DPA1*01:02-B1*04:01L HLA-DRB1*10:01L HLA-D RB1*16:01L HLA-DRB1*04:08L HLA-DRB1*08:03L
  source 1..12: note = Severe acute respiratory syndrome coronavirus 2
ISSFKWDLTAFG

SEQ ID NO: 8812 - protein, 10 aa, Severe acute respiratory syndrome-related coronavirus
  REGION 1..10: note = Table B: HLA-DQA1*03:02-B1*03:03L HLA-DQA1*05:01-B1*03:01L HLA-DRB1*04:03L HLA-DRB1*04:05L HLA-DQA1*01:02-B1*06:02L HLA-DRB1*01:02L HLA-DPA1*01:03-B1*03:01L HLA-DPA1*03:01-B1*04:02L HLA-DRB1*14:01L HLA-DRB1*14:02L
  REGION 1..10: note = CONT. FROM ABOVE: HLA-DQA1*01-B1*05L HLA-DQA1*05:05-B1*03:19L HL A-DQA1*05:01-B1*02:01L HLA-DRB4*01:01L HLA-DPA1*01:03-B1*04:01L HLA-DQA1*05:05-B1*03:116L HLA-DPA1*01:03-B1*04:02L HLA-DRB1*12:0 1L HLA-DPA1*02:01-B1*13:01L HLA-DPA1*03:01-B1*105:01L
  REGION 1..10: note = CONT. FROM ABOVE: HLA-DPA1*01:03-B1*104:01L HLA-DQA1*05:05-B1*03 :01L HLA-DPA1*01:02-B1*04:01L HLA-DRB1*16:01L HLA-DQA1*01:03-B1* 06:01L HLA-DQA1*02:01-B1*03:03L HLA-DRB1*15:03L
  source 1..10: note = Severe acute respiratory syndrome coronavirus 2
FLAYILFTRF

SEQ ID NO: 8813 - protein, 11 aa, Severe acute respiratory syndrome-related coronavirus
  REGION 1..11: note = Table B: HLA-DQA1*03:02-B1*03:03L HLA-DQA1*01:02-B1*06:02L HLA-DRB1*15:03L
  source 1..11: note = Severe acute respiratory syndrome coronavirus 2
YVLGLAAIMQL

SEQ ID NO: 8814 - protein, 10 aa, Severe acute respiratory syndrome-related coronavirus
  REGION 1..10: note = Table B: HLA-DQA1*03:02-B1*03:03L HLA-DQA1*01:02-B1*06:02L HLA-DPA1*03:01-B1*04:02L HLA-DQA1*01-B1*05L HLA-DPA1*01:03-B1*04:02L HLA-DPA1*03:01-B1*105:01L HLA-DQA1*03:01-B1*03:02L HLA-DPA1*01:02-B1*04:01L
  REGION 1..10: note = CONT. FROM ABOVE: HLA-DRB1*16:01L HLA-DQA1*01:03-B1*06:01L HLA-D QA1*02:01-B1*03:03L
  source 1..10: note = Severe acute respiratory syndrome coronavirus 2
SYFAVHFISN

SEQ ID NO: 8815 - protein, 10 aa, Severe acute respiratory syndrome-related coronavirus
  REGION 1..10: note = Table B: HLA-DQA1*03:02-B1*03:03L HLA-DQA1*05:01-B1*03:01L HLA-DRB1*04:03L HLA-DRB1*13:03L HLA-DRB1*01:03L HLA-DRB1*04:05L HLA-DQA1*01:02-B1*06:02M HLA-DRB1*01:01L HLA-DRB1*08:77L HLA-DPA1*01:03-B1*03:01L HLA-DPA1*03:01-B1*04:02L
  REGION 1..10: note = CONT. FROM ABOVE: HLA-DRB1*03:01L HLA-DRB1*14:01L HLA-DRB1*14:02 L HLA-DQA1*01-B1*05L HLA-DQA1*05:05-B1*03:19L HLA-DQA1*05:01-B1* 02:01L HLA-DRB4*01:01L HLA-DPA1*01:03-B1*04:01L HLA-DQA1*05:05-B 1*03:116L HLA-DPA1*01:03-B1*04:02L HLA-DRB1*12:01L
  REGION 1..10: note = CONT. FROM ABOVE: HLA-DPA1*02:01-B1*13:01M HLA-DPA1*03:01-B1*105 :01L HLA-DQA1*03:01-B1*03:02L HLA-DPA1*01:03-B1*104:01L HLA-DQA1 *05:05-B1*03:01L HLA-DPA1*01:02-B1*04:01L HLA-DRB1*10:01L HLA-DR B1*16:01L HLA-DQA1*01:03-B1*06:01L HLA-DRB1*08:02L
  REGION 1..10: note = CONT. FROM ABOVE: HLA-DQA1*02:01-B1*03:03M HLA-DRB1*15:03L
  source 1..10: note = Severe acute respiratory syndrome coronavirus 2
FAVHFISNSW

SEQ ID NO: 8816 - protein, 10 aa, Severe acute respiratory syndrome-related coronavirus
  REGION 1..10: note = Table B: HLA-DQA1*03:02-B1*03:03L HLA-DQA1*05:01-B1*03:01L HLA-DRB1*04:03L HLA-DRB1*04:02L HLA-DQA1*01:02-B1*06:02L HLA-DRB1*01:02L HLA-DPA1*03:01-B1*04:02L HLA-DRB1*14:01L HLA-DQA1*01-B1*05L HLA-DQA1*05:01-B1*02:01L HLA-DRB1*12:01L
  REGION 1..10: note = CONT. FROM ABOVE: HLA-DPA1*03:01-B1*105:01L HLA-DQA1*03:01-B1*03 :02L HLA-DPA1*01:02-B1*04:01L HLA-DRB1*16:01L HLA-DQA1*01:03-B1* 06:01L HLA-DQA1*02:01-B1*03:03L HLA-DRB1*15:03L
  source 1..10: note = Severe acute respiratory syndrome coronavirus 2
AVHFISNSWL

SEQ ID NO: 8817 - protein, 12 aa, Severe acute respiratory syndrome-related coronavirus
  REGION 1..12: note = Table B: HLA-DQA1*03:02-B1*03:03L HLA-DRB1*13:02L HLA-DRB1*04:05L HLA-DRB4*03:01NL HLA-DPA1*01:03-B1*03:01L HLA-DQA1*05:05-B1*03:19L HLA-DRB1*04:10L HLA-DRB1*12:02L HLA-DRB1*14:54L
  source 1..12: note = Severe acute respiratory syndrome coronavirus 2
IINLVQMAPISA

SEQ ID NO: 8818 - protein, 10 aa, Severe acute respiratory syndrome-related coronavirus
  REGION 1..10: note = Table B: HLA-DQA1*03:02-B1*03:03L HLA-DQA1*05:01-B1*03:01L HLA-DRB1*04:03L HLA-DRB1*04:02L HLA-DQA1*01:02-B1*06:02L HLA-DRB1*01:02L HLA-DRB1*14:01L HLA-DQA1*05:05-B1*03:19L HLA-DQA1*05:01-B1*02:01L HLA-DRB1*12:01L
  REGION 1..10: note = CONT. FROM ABOVE: HLA-DPA1*03:01-B1*105:01L HLA-DQA1*03:01-B1*03 :02L HLA-DRB1*14:17L HLA-DRB1*16:01L HLA-DQA1*01:03-B1*06:01L HL A-DQA1*02:01-B1*03:03L HLA-DRB1*15:03L
  source 1..10: note = Severe acute respiratory syndrome coronavirus 2
LVQMAPISAM

SEQ ID NO: 8819 - protein, 10 aa, Severe acute respiratory syndrome-related coronavirus
  REGION 1..10: note = Table B: HLA-DQA1*03:02-B1*03:03L HLA-DQA1*05:05-B1*03:19L HLA-DQA1*03:01-B1*03:02L
  source 1..10: note = Severe acute respiratory syndrome coronavirus 2
VQMAPISAMV

SEQ ID NO: 8820 - protein, 11 aa, Severe acute respiratory syndrome-related coronavirus
  REGION 1..11: note = Table B: HLA-DQA1*03:02-B1*03:03L HLA-DQA1*05:05-B1*03:19L
  source 1..11: note = Severe acute respiratory syndrome coronavirus 2
QMAPISAMVRM

SEQ ID NO: 8821 - protein, 10 aa, Severe acute respiratory syndrome-related coronavirus
  REGION 1..10: note = Table B: HLA-DQA1*03:02-B1*03:03L HLA-DQA1*01:02-B1*06:02L HLA-DPA1*03:01-B1*04:02L HLA-DQA1*05:05-B1*03:19L HLA-DPA1*02:01-B1*13:01L HLA-DPA1*03:01-B1*105:01L HLA-DPA1*01:03-B1*104:01L HLA-DPA1*01:02-B1*04:01L
  REGION 1..10: note = CONT. FROM ABOVE: HLA-DRB1*16:01L HLA-DQA1*01:03-B1*06:01L HLA-D QA1*02:01-B1*03:03L HLA-DRB1*15:03L
  source 1..10: note = Severe acute respiratory syndrome coronavirus 2
YYVWKSYVHV

SEQ ID NO: 8822 - protein, 12 aa, Severe acute respiratory syndrome-related coronavirus
  REGION 1..12: note = Table B: HLA-DQA1*03:02-B1*03:03L HLA-DQA1*05:01-B1*03:01L HLA-DRB1*04:03L HLA-DRB1*13:02L HLA-DRB1*04:02L HLA-DRB1*04:04L HLA-DRB1*01:01L HLA-DRB1*08:04L HLA-DPA1*01:03-B1*03:01L HLA-DRB1*14:01L HLA-DRB1*11:03L HLA-DRB1*11:04L HLA-DRB1*14:02L
  REGION 1..12: note = CONT. FROM ABOVE: HLA-DQA1*01:01-B1*05:01L HLA-DRB1*11:01L HLA-D QA1*01-B1*05L HLA-DQA1*05:05-B1*03:19L HLA-DQA1*05:01-B1*02:01L HLA-DQA1*05:05-B1*03:116L HLA-DRB3*01:01L HLA-DPA1*02:01-B1*13:0 1L HLA-DRB1*14:54L HLA-DPA1*01:03-B1*104:01L
  REGION 1..12: note = CONT. FROM ABOVE: HLA-DQA1*05:05-B1*03:01L HLA-DRB1*07:01L HLA-D RB1*10:01L HLA-DRB1*08:02L HLA-DRB1*08:03L
  source 1..12: note = Severe acute respiratory syndrome coronavirus 2
YVWKSYVHVVDG

SEQ ID NO: 8823 - protein, 10 aa, Severe acute respiratory syndrome-related coronavirus
  REGION 1..10: note = Table B: HLA-DQA1*03:02-B1*03:03L HLA-DQA1*05:01-B1*03:01L HLA-DRB1*13:03L HLA-DRB1*01:03L HLA-DQA1*01:02-B1*06:02L HLA-DPA1*01:03-B1*03:01L HLA-DRB1*03:01L HLA-DRB1*14:01L HLA-DRB1*14:02L HLA-DQA1*05:05-B1*03:19L
  REGION 1..10: note = CONT. FROM ABOVE: HLA-DQA1*05:01-B1*02:01L HLA-DPA1*01:03-B1*04: 01L HLA-DPA1*02:01-B1*13:01L HLA-DPA1*03:01-B1*105:01L HLA-DPA1* 01:02-B1*04:01L HLA-DQA1*01:03-B1*06:01L HLA-DQA1*02:01-B1*03:03 L HLA-DRB1*15:03L
  source 1..10: note = Severe acute respiratory syndrome coronavirus 2
TIVNGVRRSF

SEQ ID NO: 8824 - protein, 10 aa, Severe acute respiratory syndrome-related coronavirus
  REGION 1..10: note = Table B: HLA-DQA1*03:02-B1*03:03L HLA-DQA1*05:01-B1*03:01L HLA-DRB1*04:03L HLA-DRB1*13:03L HLA-DRB1*01:03L HLA-DRB1*04:02L HLA-DRB1*04:05L HLA-DRB1*01:02L HLA-DRB4*03:01NL HLA-DQA1*01-B1*05L HLA-DQA1*05:01-B1*02:01L HLA-DRB1*12:01L
  REGION 1..10: note = CONT. FROM ABOVE: HLA-DQA1*03:01-B1*03:02L HLA-DRB1*14:54L HLA-D RB1*14:17L HLA-DRB1*16:01L HLA-DQA1*01:03-B1*06:01L HLA-DRB1*04: 08L HLA-DQA1*02:01-B1*03:03L HLA-DRB1*15:03L
  source 1..10: note = Severe acute respiratory syndrome coronavirus 2
FYVYANGGKG

SEQ ID NO: 8825 - protein, 10 aa, Severe acute respiratory syndrome-related coronavirus
  REGION 1..10: note = Table B: HLA-DQA1*03:02-B1*03:03L HLA-DQA1*05:01-B1*03:01L HLA-DRB1*04:01L HLA-DRB1*04:03L HLA-DRB1*13:02L HLA-DRB1*13:03M HLA-DRB1*01:03M HLA-DRB1*04:02L HLA-DRB1*04:05M HLA-DQA1*01:02-B1*06:02M HLA-DRB1*01:01L HLA-DRB1*01:02L
  REGION 1..10: note = CONT. FROM ABOVE: HLA-DRB4*03:01NL HLA-DRB1*08:77M HLA-DRB3*02:0 1L HLA-DPA1*01:03-B1*03:01L HLA-DPA1*03:01-B1*04:02L HLA-DRB1*03 :01L HLA-DRB1*14:01L HLA-DRB1*11:03L HLA-DRB1*11:04L HLA-DRB1*14 :02M HLA-DQA1*01:01-B1*05:01L HLA-DRB1*08:01L HLA-DRB1*11:01L
  REGION 1..10: note = CONT. FROM ABOVE: HLA-DRB5*01:01L HLA-DQA1*01-B1*05L HLA-DQA1*05 :05-B1*03:19L HLA-DQA1*05:01-B1*02:01L HLA-DRB4*01:01L HLA-DPA1* 01:03-B1*04:01M HLA-DQA1*05:05-B1*03:116L HLA-DRB1*09:01L HLA-DP A1*01:03-B1*04:02L HLA-DRB1*12:01L HLA-DPA1*02:01-B1*13:01M
  REGION 1..10: note = CONT. FROM ABOVE: HLA-DPA1*03:01-B1*105:01M HLA-DQA1*03:01-B1*03 :02L HLA-DPA1*01:03-B1*104:01L HLA-DQA1*05:05-B1*03:01L HLA-DPA1 *01:02-B1*04:01L HLA-DRB1*07:01L HLA-DRB1*10:01L HLA-DRB1*16:01L HLA-DQA1*01:03-B1*06:01M HLA-DRB1*08:02L HLA-DRB1*08:03L
  REGION 1..10: note = CONT. FROM ABOVE: HLA-DQA1*02:01-B1*03:03M HLA-DRB1*15:03M
  source 1..10: note = Severe acute respiratory syndrome coronavirus 2
YVYANGGKGF

SEQ ID NO: 8826 - protein, 12 aa, Severe acute respiratory syndrome-related coronavirus
  REGION 1..12: note = Table B: HLA-DQA1*03:02-B1*03:03L HLA-DQA1*01:01-B1*05:01L HLA-DQA1*05:01-B1*02:01L
  source 1..12: note = Severe acute respiratory syndrome coronavirus 2
AGSTFISDEVAR

SEQ ID NO: 8827 - protein, 10 aa, Severe acute respiratory syndrome-related coronavirus
  REGION 1..10: note = Table B: HLA-DQA1*03:02-B1*03:03L HLA-DRB1*04:03L HLA-DRB1*13:02L HLA-DRB1*13:03L HLA-DRB1*01:03L HLA-DRB1*04:02L HLA-DRB1*04:05L HLA-DRB1*01:02L HLA-DRB4*03:01NL HLA-DQA1*01:01-B1*05:01L HLA-DQA1*01-B1*05L
  REGION 1..10: note = CONT. FROM ABOVE: HLA-DQA1*05:01-B1*02:01L HLA-DRB1*04:10L HLA-D RB1*12:01L HLA-DPA1*03:01-B1*105:01L HLA-DQA1*03:01-B1*03:02L HL A-DRB1*14:54L HLA-DRB1*14:17L HLA-DPA1*01:02-B1*04:01L HLA-DRB1* 10:01L HLA-DRB1*16:01L HLA-DQA1*01:03-B1*06:01L HLA-DRB1*04:08L
  REGION 1..10: note = CONT. FROM ABOVE: HLA-DQA1*02:01-B1*03:03L HLA-DRB1*15:03L
  source 1..10: note = Severe acute respiratory syndrome coronavirus 2
TFISDEVARD

SEQ ID NO: 8828 - protein, 10 aa, Severe acute respiratory syndrome-related coronavirus
  REGION 1..10: note = Table B: HLA-DQA1*03:02-B1*03:03L HLA-DQA1*05:01-B1*03:01L HLA-DRB1*04:01L HLA-DRB1*04:03L HLA-DRB1*13:02L HLA-DRB1*13:03L HLA-DRB1*01:03L HLA-DRB1*04:02L HLA-DRB1*04:04L HLA-DRB1*04:05M HLA-DQA1*01:02-B1*06:02L HLA-DRB1*01:02L HLA-DRB4*03:01NL
  REGION 1..10: note = CONT. FROM ABOVE: HLA-DRB1*08:04L HLA-DRB1*08:77L HLA-DRB3*02:01 L HLA-DPA1*01:03-B1*03:01L HLA-DPA1*03:01-B1*04:02L HLA-DRB1*14: 01L HLA-DRB1*11:03L HLA-DRB1*11:04L HLA-DRB1*14:02L HLA-DQA1*01: 01-B1*05:01L HLA-DRB1*08:01L HLA-DRB1*11:01L HLA-DRB5*01:01L
  REGION 1..10: note = CONT. FROM ABOVE: HLA-DQA1*01-B1*05L HLA-DQA1*05:05-B1*03:19L HL A-DQA1*05:01-B1*02:01L HLA-DRB4*01:01L HLA-DPA1*01:03-B1*04:01L HLA-DQA1*05:05-B1*03:116L HLA-DRB1*04:10L HLA-DRB1*09:01L HLA-DP A1*01:03-B1*04:02L HLA-DRB1*12:01L HLA-DRB1*12:02L
  REGION 1..10: note = CONT. FROM ABOVE: HLA-DRB3*01:01L HLA-DPA1*02:01-B1*13:01L HLA-D PA1*03:01-B1*105:01L HLA-DQA1*03:01-B1*03:02L HLA-DRB1*14:54L HL A-DPA1*01:03-B1*104:01L HLA-DQA1*05:05-B1*03:01L HLA-DRB1*14:17L HLA-DPA1*01:02-B1*04:01L HLA-DRB1*07:01L HLA-DRB1*10:01L
  REGION 1..10: note = CONT. FROM ABOVE: HLA-DRB1*16:01L HLA-DQA1*01:03-B1*06:01L HLA -DRB1*04:08L HLA-DRB1*08:02L HLA-DRB1*08:03L HLA-DQA1*02:01-B1 *03:03L HLA-DRB1*15:03L
  source 1..10: note = Severe acute respiratory syndrome coronavirus 2
FISDEVARDL

SEQ ID NO: 8829 - protein, 10 aa, Severe acute respiratory syndrome-related coronavirus
  REGION 1..10: note = Table B: HLA-DQA1*03:02-B1*03:03L HLA-DRB1*04:03L HLA-DRB1*04:02L HLA-DQA1*01-B1*05L HLA-DQA1*05:01-B1*02:01L HLA-DQA1*03:01-B1*03:02L HLA-DRB1*14:17L HLA-DRB1*16:01L HLA-DQA1*01:03-B1*06:01L HLA-DQA1*02:01-B1*03:03L
  source 1..10: note = Severe acute respiratory syndrome coronavirus 2
ISDEVARDLS

SEQ ID NO: 8830 - protein, 10 aa, Severe acute respiratory syndrome-related coronavirus
  REGION 1..10: note = Table B: HLA-DQA1*03:02-B1*03:03L HLA-DQA1*01-B1*05L HLA-DQA1*05:05-B1*03:19L HLA-DQA1*03:01-B1*03:02L HLA-DRB1*16:01L
  source 1..10: note = Severe acute respiratory syndrome coronavirus 2
SDEVARDLSL

SEQ ID NO: 8831 - protein, 10 aa, Severe acute respiratory syndrome-related coronavirus
  REGION 1..10: note = Table B: HLA-DQA1*03:02-B1*03:03L HLA-DQA1*05:01-B1*02:01L HLA-DQA1*03:01-B1*03:02L
  source 1..10: note = Severe acute respiratory syndrome coronavirus 2
DEVARDLSLQ

SEQ ID NO: 8832 - protein, 10 aa, Severe acute respiratory syndrome-related coronavirus
  REGION 1..10: note = Table B: HLA-DQA1*03:02-B1*03:03L HLA-DQA1*05:01-B1*03:01L HLA-DRB1*13:02L HLA-DRB1*13:03M HLA-DRB1*01:03L HLA-DQA1*01:02-B1*06:02M HLA-DRB1*01:01L HLA-DRB1*01:02L HLA-DRB4*03:01NL HLA-DRB1*08:77L HLA-DPA1*01:03-B1*03:01L
  REGION 1..10: note = CONT. FROM ABOVE: HLA-DPA1*03:01-B1*04:02L HLA-DRB1*03:01L HLA-D RB1*14:01L HLA-DRB1*14:02L HLA-DRB5*01:01L HLA-DQA1*01-B1*05L HL A-DQA1*05:05-B1*03:19L HLA-DQA1*05:01-B1*02:01L HLA-DRB4*01:01L HLA-DPA1*01:03-B1*04:01M HLA-DQA1*05:05-B1*03:116L
  REGION 1..10: note = CONT. FROM ABOVE: HLA-DPA1*01:03-B1*04:02L HLA-DRB1*12:01L HLA-D PA1*02:01-B1*13:01L HLA-DPA1*03:01-B1*105:01M HLA-DQA1*03:01-B1* 03:02L HLA-DQA1*05:05-B1*03:01L HLA-DPA1*01:02-B1*04:01L HLA-DRB 1*10:01L HLA-DRB1*16:01L HLA-DQA1*01:03-B1*06:01L
  REGION 1..10: note = CONT. FROM ABOVE: HLA-DQA1*02:01-B1*03:03L HLA-DRB1*15:03L
  source 1..10: note = Severe acute respiratory syndrome coronavirus 2
EVARDLSLQF

SEQ ID NO: 8833 - protein, 13 aa, Severe acute respiratory syndrome-related coronavirus
  REGION 1..13: note = Table B: HLA-DQA1*03:02-B1*03:03L HLA-DQA1*05:01-B1*03:01L HLA-DRB1*04:04L HLA-DRB1*01:02L HLA-DRB4*03:01NL HLA-DQA1*01:01-B1*05:01L HLA-DQA1*01-B1*05L HLA-DRB1*12:01L HLA-DPA1*02:01-B1*13:01L HLA-DPA1*03:01-B1*105:01L
  REGION 1..13: note = CONT. FROM ABOVE: HLA-DRB1*14:17L
  source 1..13: note = Severe acute respiratory syndrome coronavirus 2
SLQFKRPINPTDQ

SEQ ID NO: 8834 - protein, 11 aa, Severe acute respiratory syndrome-related coronavirus
  REGION 1..11: note = Table B: HLA-DQA1*03:02-B1*03:03L HLA-DRB1*14:04L HLA-DRB1*04:01L HLA-DRB1*13:02M HLA-DRB1*04:02L HLA-DRB1*04:05L HLA-DRB1*01:01L HLA-DRB1*01:02L HLA-DRB3*02:01L HLA-DPA1*03:01-B1*04:02L HLA-DRB1*14:01M HLA-DRB1*11:03L
  REGION 1..11: note = CONT. FROM ABOVE: HLA-DRB1*11:04L HLA-DRB1*08:01L HLA-DRB1*11:01 L HLA-DRB5*01:01L HLA-DRB4*02:01NL HLA-DRB1*13:01L HLA-DQA1*05:0 5-B1*03:116L HLA-DRB1*09:01L HLA-DRB1*12:02L HLA-DRB3*01:01L HLA -DPA1*02:01-B1*13:01L HLA-DQA1*03:01-B1*03:02L HLA-DRB1*14:54L
  REGION 1..11: note = CONT. FROM ABOVE: HLA-DQA1*05:05-B1*03:01L HLA-DRB1*14:17L HLA-D PA1*01:02-B1*04:01L HLA-DQA1*01:03-B1*06:01L HLA-DRB1*08:03L HLA -DRB1*15:01L
  source 1..11: note = Severe acute respiratory syndrome coronavirus 2
RPINPTDQSSY

SEQ ID NO: 8835 - protein, 11 aa, Severe acute respiratory syndrome-related coronavirus
  REGION 1..11: note = Table B: HLA-DQA1*03:02-B1*03:03L HLA-DQA1*01-B1*05L HLA-DQA1*05:01-B1*02:01L HLA-DQA1*03:01-B1*03:02L HLA-DQA1*01:03-B1*06:01L HLA-DQA1*02:01-B1*03:03L
  source 1..11: note = Severe acute respiratory syndrome coronavirus 2
DQSSYIVDSVT

SEQ ID NO: 8836 - protein, 10 aa, Severe acute respiratory syndrome-related coronavirus
  REGION 1..10: note = Table B: HLA-DQA1*03:02-B1*03:03L HLA-DQA1*05:05-B1*03:19L
  source 1..10: note = Severe acute respiratory syndrome coronavirus 2
SSYIVDSVTV

SEQ ID NO: 8837 - protein, 10 aa, Severe acute respiratory syndrome-related coronavirus
  REGION 1..10: note = Table B: HLA-DQA1*03:02-B1*03:03L HLA-DQA1*05:01-B1*03:01L HLA-DRB1*04:03L HLA-DRB1*13:02L HLA-DRB1*13:03L HLA-DRB1*01:03L HLA-DRB1*04:02L HLA-DRB1*04:05L HLA-DRB4*03:01NL HLA-DRB1*14:01L HLA-DQA1*01-B1*05L HLA-DQA1*05:01-B1*02:01L HLA-DRB1*04:10L
  REGION 1..10: note = CONT. FROM ABOVE: HLA-DRB1*12:01L HLA-DQA1*03:01-B1*03:02L HLA-D RB1*14:54L HLA-DRB1*14:17L HLA-DRB1*10:01L HLA-DRB1*16:01L HLA-D QA1*02:01-B1*03:03L
  source 1..10: note = Severe acute respiratory syndrome coronavirus 2
IVDSVTVKNG

SEQ ID NO: 8838 - protein, 10 aa, Severe acute respiratory syndrome-related coronavirus
  REGION 1..10: note = Table B: HLA-DQA1*03:02-B1*03:03L HLA-DQA1*05:01-B1*03:01L HLA-DRB1*04:03L HLA-DRB1*13:03L HLA-DRB1*01:03L HLA-DRB1*04:02L HLA-DRB1*04:05L HLA-DQA1*01:02-B1*06:02L HLA-DRB1*01:02L HLA-DRB4*03:01NL HLA-DRB1*14:01L HLA-DQA1*01:01-B1*05:01L
  REGION 1..10: note = CONT. FROM ABOVE: HLA-DRB1*08:01L HLA-DQA1*05:05-B1*03:19L HLA-D RB1*12:01L HLA-DQA1*03:01-B1*03:02L HLA-DRB1*14:54L HLA-DQA1*05: 05-B1*03:01L HLA-DRB1*14:17L HLA-DPA1*01:02-B1*04:01L HLA-DRB1*1 6:01L HLA-DQA1*01:03-B1*06:01L HLA-DRB1*04:08L
  REGION 1..10: note = CONT. FROM ABOVE: HLA-DQA1*02:01-B1*03:03L
  source 1..10: note = Severe acute respiratory syndrome coronavirus 2
SVTVKNGSIH

SEQ ID NO: 8839 - protein, 10 aa, Severe acute respiratory syndrome-related coronavirus
  REGION 1..10: note = Table B: HLA-DQA1*03:02-B1*03:03L HLA-DQA1*05:01-B1*03:01L HLA-DRB1*13:02L HLA-DRB1*13:03L HLA-DRB1*01:03L HLA-DRB1*04:02L HLA-DQA1*01:02-B1*06:02L HLA-DRB1*14:01L HLA-DRB1*08:01L HLA-DQA1*05:01-B1*02:01L HLA-DQA1*05:05-B1*03:116L
  REGION 1..10: note = CONT. FROM ABOVE: HLA-DQA1*03:01-B1*03:02L HLA-DPA1*01:02-B1*04: 01L HLA-DRB1*16:01L HLA-DQA1*01:03-B1*06:01L HLA-DQA1*02:01-B1*0 3:03L HLA-DRB1*15:03L
  source 1..10: note = Severe acute respiratory syndrome coronavirus 2
VTVKNGSIHL

SEQ ID NO: 8840 - protein, 10 aa, Severe acute respiratory syndrome-related coronavirus
  REGION 1..10: note = Table B: HLA-DQA1*03:02-B1*03:03L HLA-DQA1*05:01-B1*03:01L HLA-DRB1*04:03L HLA-DRB1*13:02L HLA-DRB1*13:03L HLA-DRB1*01:03L HLA-DRB1*04:02L HLA-DRB1*04:05L HLA-DQA1*01:02-B1*06:02M HLA-DRB4*03:01NL HLA-DRB1*08:77M HLA-DPA1*01:03-B1*03:01M
  REGION 1..10: note = CONT. FROM ABOVE: HLA-DPA1*03:01-B1*04:02L HLA-DRB1*03:01M HLA-D RB1*14:01L HLA-DRB1*11:02L HLA-DRB1*11:03L HLA-DRB1*11:04L HLA-D RB1*14:02L HLA-DRB1*11:01L HLA-DRB5*01:01L HLA-DQA1*01-B1*05M HL A-DQA1*05:05-B1*03:19M HLA-DQA1*05:01-B1*02:01M HLA-DRB4*01:01L
  REGION 1..10: note = CONT. FROM ABOVE: HLA-DPA1*01:03-B1*04:01M HLA-DQA1*05:05-B1*03: 116L HLA-DPA1*01:03-B1*04:02L HLA-DRB1*12:01L HLA-DPA1*02:01-B1* 13:01L HLA-DPA1*03:01-B1*105:01L HLA-DPA1*01:03-B1*104:01M HLA-D PA1*01:02-B1*04:01L HLA-DRB1*10:01M HLA-DRB1*16:01M
  REGION 1..10: note = CONT. FROM ABOVE: HLA-DQA1*01:03-B1*06:01L HLA-DRB1*08:02L HLA-D QA1*02:01-B1*03:03L HLA-DRB1*15:03L
  source 1..10: note = Severe acute respiratory syndrome coronavirus 2
YFDKAGQKTY

SEQ ID NO: 8841 - protein, 10 aa, Severe acute respiratory syndrome-related coronavirus
  REGION 1..10: note = Table B: HLA-DQA1*03:02-B1*03:03L HLA-DRB1*04:03L HLA-DRB1*04:02L HLA-DQA1*01-B1*05L HLA-DPA1*03:01-B1*105:01L HLA-DQA1*03:01-B1*03:02L HLA-DPA1*01:02-B1*04:01L HLA-DQA1*01:03-B1*06:01L HLA-DQA1*02:01-B1*03:03L
  source 1..10: note = Severe acute respiratory syndrome coronavirus 2
SLSHFVNLDN

SEQ ID NO: 8842 - protein, 12 aa, Severe acute respiratory syndrome-related coronavirus
  REGION 1..12: note = Table B: HLA-DQA1*03:02-B1*03:03L HLA-DQA1*05:01-B1*03:01L HLA-DRB1*01:01L HLA-DRB1*08:77L HLA-DPA1*01:03-B1*03:01L HLA-DRB1*14:02L HLA-DRB5*01:01L HLA-DRB1*09:01L HLA-DRB3*01:01L HLA-DPA1*02:01-B1*13:01L HLA-DRB1*07:01L
  source 1..12: note = Severe acute respiratory syndrome coronavirus 2
SHFVNLDNLRAN

SEQ ID NO: 8843 - protein, 11 aa, Severe acute respiratory syndrome-related coronavirus
  REGION 1..11: note = Table B: HLA-DQA1*03:02-B1*03:03L HLA-DQA1*05:01-B1*03:01L HLA-DRB1*04:03L HLA-DRB1*13:03L HLA-DRB1*04:02L HLA-DQA1*05:01-B1*02:01L HLA-DQA1*05:05-B1*03:01L HLA-DRB1*14:17L HLA-DRB1*16:01L HLA-DQA1*01:03-B1*06:01L
  REGION 1..11: note = CONT. FROM ABOVE: HLA-DQA1*02:01-B1*03:03L
  source 1..11: note = Severe acute respiratory syndrome coronavirus 2
ANNTKGSLPIN

SEQ ID NO: 8844 - protein, 10 aa, Severe acute respiratory syndrome-related coronavirus
  REGION 1..10: note = Table B: HLA-DQA1*03:02-B1*03:03L HLA-DQA1*05:01-B1*03:01L HLA-DQA1*01:02-B1*06:02L HLA-DRB1*01:02L HLA-DQA1*05:05-B1*03:19L HLA-DPA1*03:01-B1*105:01L HLA-DQA1*03:01-B1*03:02L HLA-DRB1*16:01L
  REGION 1..10: note = CONT. FROM ABOVE: HLA-DQA1*02:01-B1*03:03L HLA-DRB1*15:03L
  source 1..10: note = Severe acute respiratory syndrome coronavirus 2
NTKGSLPINV

SEQ ID NO: 8845 - protein, 12 aa, Severe acute respiratory syndrome-related coronavirus
  REGION 1..12: note = Table B: HLA-DQA1*03:02-B1*03:03L HLA-DQA1*05:01-B1*03:01L HLA-DRB1*04:03L HLA-DRB1*04:02L HLA-DQA1*01:02-B1*06:02L HLA-DQA1*01-B1*05L HLA-DQA1*05:01-B1*02:01L HLA-DPA1*03:01-B1*105:01L HLA-DRB1*14:17L HLA-DRB1*16:01L
  REGION 1..12: note = CONT. FROM ABOVE: HLA-DQA1*01:03-B1*06:01L
  source 1..12: note = Severe acute respiratory syndrome coronavirus 2
LPINVIVFDGKS

SEQ ID NO: 8846 - protein, 14 aa, Severe acute respiratory syndrome-related coronavirus
  REGION 1..14: note = Table B: HLA-DQA1*03:02-B1*03:03L HLA-DQA1*05:01-B1*03:01L HLA-DRB1*04:01L HLA-DRB1*01:01L HLA-DRB3*02:01L HLA-DRB1*11:02L HLA-DRB1*13:01L HLA-DRB4*01:01L HLA-DPA1*01:03-B1*04:01L HLA-DQA1*05:05-B1*03:116L HLA-DPA1*01:03-B1*04:02L
  REGION 1..14: note = CONT. FROM ABOVE: HLA-DPA1*02:01-B1*13:01L HLA-DPA1*01:03-B1*02: 01L HLA-DPA1*01:03-B1*104:01L HLA-DQA1*05:05-B1*03:01L HLA-DRB1* 14:17L HLA-DRB1*10:01L HLA-DQA1*01:03-B1*06:01L HLA-DRB1*08:02L HLA-DRB1*08:03L HLA-DQA1*02:01-B1*03:03L
  source 1..14: note = Severe acute respiratory syndrome coronavirus 2
VIVFDGKSKCEESS

SEQ ID NO: 8847 - protein, 10 aa, Severe acute respiratory syndrome-related coronavirus
  REGION 1..10: note = Table B: HLA-DQA1*03:02-B1*03:03M HLA-DQA1*05:01-B1*03:01L HLA-DRB1*13:03L HLA-DRB1*08:77L HLA-DRB1*11:02M HLA-DRB1*11:01L HLA-DQA1*05:05-B1*03:19H HLA-DQA1*05:01-B1*02:01L HLA-DRB4*01:01L HLA-DPA1*01:03-B1*04:01L
  REGION 1..10: note = CONT. FROM ABOVE: HLA-DQA1*05:05-B1*03:116L HLA-DRB1*09:01L HLA- DPA1*01:03-B1*04:02L HLA-DQA1*03:01-B1*03:02L HLA-DPA1*01:03-B1* 104:01M HLA-DRB1*10:01L HLA-DRB1*16:01L
  source 1..10: note = Severe acute respiratory syndrome coronavirus 2
EESSAKSASV

SEQ ID NO: 8848 - protein, 10 aa, Severe acute respiratory syndrome-related coronavirus
  REGION 1..10: note = Table B: HLA-DQA1*03:02-B1*03:03L HLA-DQA1*05:01-B1*03:01L HLA-DRB1*13:02L HLA-DRB1*13:03M HLA-DRB1*01:03L HLA-DQA1*01:02-B1*06:02M HLA-DRB1*01:01L HLA-DRB4*03:01NL HLA-DRB1*08:77L HLA-DPA1*01:03-B1*03:01L
  REGION 1..10: note = CONT. FROM ABOVE: HLA-DPA1*03:01-B1*04:02L HLA-DRB1*03:01L HLA-D RB1*14:01L HLA-DRB1*11:04L HLA-DRB1*14:02L HLA-DRB1*08:01L HLA-D RB1*11:01L HLA-DRB5*01:01L HLA-DQA1*01-B1*05L HLA-DQA1*05:05-B1* 03:19L HLA-DQA1*05:01-B1*02:01L HLA-DRB4*01:01L
  REGION 1..10: note = CONT. FROM ABOVE: HLA-DPA1*01:03-B1*04:01M HLA-DQA1*05:05-B1*03: 116L HLA-DPA1*01:03-B1*04:02L HLA-DRB1*12:01L HLA-DPA1*02:01-B1* 13:01L HLA-DPA1*03:01-B1*105:01M HLA-DQA1*03:01-B1*03:02L HLA-DP A1*01:03-B1*104:01L HLA-DQA1*05:05-B1*03:01L HLA-DRB1*14:17L
  REGION 1..10: note = CONT. FROM ABOVE: HLA-DPA1*01:02-B1*04:01L HLA-DRB1*10:01L HLA-D RB1*16:01L HLA-DQA1*01:03-B1*06:01L HLA-DRB1*08:02L HLA-DQA1*02: 01-B1*03:03L HLA-DRB1*15:03L
  source 1..10: note = Severe acute respiratory syndrome coronavirus 2
ESSAKSASVY

SEQ ID NO: 8849 - protein, 10 aa, Severe acute respiratory syndrome-related coronavirus
  REGION 1..10: note = Table B: HLA-DQA1*03:02-B1*03:03L HLA-DQA1*05:01-B1*03:01L HLA-DRB1*04:01L HLA-DRB1*04:03L HLA-DRB1*13:02L HLA-DRB1*13:03M HLA-DRB1*01:03M HLA-DRB1*04:02L HLA-DQA1*01:02-B1*06:02M HLA-DRB4*03:01NL HLA-DRB1*08:77L HLA-DPA1*01:03-B1*03:01L
  REGION 1..10: note = CONT. FROM ABOVE: HLA-DPA1*03:01-B1*04:02L HLA-DRB1*03:01L HLA-D RB1*14:01L HLA-DRB1*11:02L HLA-DRB1*11:03L HLA-DRB1*14:02M HLA-D RB1*11:01L HLA-DRB5*01:01L HLA-DQA1*01-B1*05L HLA-DQA1*05:05-B1* 03:19M HLA-DQA1*05:01-B1*02:01M HLA-DRB4*01:01L
  REGION 1..10: note = CONT. FROM ABOVE: HLA-DPA1*01:03-B1*04:01L HLA-DQA1*05:05-B1*03: 116L HLA-DPA1*01:03-B1*04:02L HLA-DRB1*12:01L HLA-DPA1*02:01-B1* 13:01L HLA-DPA1*03:01-B1*105:01L HLA-DPA1*01:03-B1*104:01L HLA-D PA1*01:02-B1*04:01L HLA-DRB1*10:01L HLA-DRB1*16:01L
  REGION 1..10: note = CONT. FROM ABOVE: HLA-DQA1*01:03-B1*06:01L HLA-DRB1*08:02L HLA-D QA1*02:01-B1*03:03M HLA-DRB1*15:03L
  source 1..10: note = Severe acute respiratory syndrome coronavirus 2
SSAKSASVYY

SEQ ID NO: 8850 - protein, 10 aa, Severe acute respiratory syndrome-related coronavirus
  REGION 1..10: note = Table B: HLA-DQA1*03:02-B1*03:03L HLA-DQA1*05:01-B1*03:01L HLA-DQA1*01:02-B1*06:02L HLA-DQA1*05:05-B1*03:19L HLA-DQA1*05:01-B1*02:01L HLA-DPA1*03:01-B1*105:01L HLA-DQA1*03:01-B1*03:02L HLA-DPA1*01:02-B1*04:01L
  REGION 1..10: note = CONT. FROM ABOVE: HLA-DQA1*01:03-B1*06:01L HLA-DQA1*02:01-B1*03: 03L HLA-DRB1*15:03L
  source 1..10: note = Severe acute respiratory syndrome coronavirus 2
KSASVYYSQL

SEQ ID NO: 8851 - protein, 13 aa, Severe acute respiratory syndrome-related coronavirus
  REGION 1..13: note = Table B: HLA-DQA1*03:02-B1*03:03L HLA-DQA1*05:01-B1*03:01L HLA-DRB1*04:03L HLA-DRB1*04:05L HLA-DPA1*01:03-B1*03:01L HLA-DQA1*01-B1*05L HLA-DQA1*05:01-B1*02:01L HLA-DPA1*01:03-B1*04:02L HLA-DPA1*02:01-B1*13:01L
  REGION 1..13: note = CONT. FROM ABOVE: HLA-DPA1*01:03-B1*104:01L HLA-DPA1*01:02-B1*04 :01L HLA-DRB1*10:01L HLA-DRB1*16:01L HLA-DQA1*01:03-B1*06:01L HL A-DRB1*04:08L HLA-DQA1*02:01-B1*03:03L
  source 1..13: note = Severe acute respiratory syndrome coronavirus 2
SVYYSQLMCQPIL

SEQ ID NO: 8852 - protein, 10 aa, Severe acute respiratory syndrome-related coronavirus
  REGION 1..10: note = Table B: HLA-DQA1*03:02-B1*03:03L
  source 1..10: note = Severe acute respiratory syndrome coronavirus 2
QPILLLDQAL

SEQ ID NO: 8853 - protein, 14 aa, Severe acute respiratory syndrome-related coronavirus
  REGION 1..14: note = Table B: HLA-DQA1*03:02-B1*03:03L HLA-DQA1*05:01-B1*03:01L HLA-DRB1*04:01L HLA-DRB1*13:02L HLA-DRB1*13:03L HLA-DRB1*01:03L HLA-DRB1*04:04L HLA-DRB1*04:05L HLA-DRB1*01:02L HLA-DRB1*08:04L HLA-DRB1*08:77L HLA-DPA1*01:03-B1*03:01L
  REGION 1..14: note = CONT. FROM ABOVE: HLA-DPA1*03:01-B1*04:02L HLA-DRB1*03:01L HLA-D RB1*14:01L HLA-DRB1*11:03L HLA-DQA1*05:05-B1*03:19L HLA-DRB4*01: 01L HLA-DPA1*01:03-B1*04:02L HLA-DRB1*12:01L HLA-DRB3*01:01L HLA -DQA1*05:05-B1*03:01L HLA-DRB1*10:01L HLA-DQA1*01:03-B1*06:01L
  REGION 1..14: note = CONT. FROM ABOVE: HLA-DRB1*04:08L
  source 1..14: note = Severe acute respiratory syndrome coronavirus 2
PILLLDQALVSDVG

SEQ ID NO: 8854 - protein, 12 aa, Severe acute respiratory syndrome-related coronavirus
  REGION 1..12: note = Table B: HLA-DQA1*03:02-B1*03:03L HLA-DQA1*05:01-B1*03:01L HLA-DRB1*04:03L HLA-DQA1*01:02-B1*06:02L HLA-DQA1*01:01-B1*05:01L HLA-DQA1*01-B1*05L HLA-DQA1*05:05-B1*03:19L HLA-DQA1*05:01-B1*02:01L
  REGION 1..12: note = CONT. FROM ABOVE: HLA-DQA1*05:05-B1*03:01L HLA-DQA1*01:03-B1*06: 01L HLA-DQA1*02:01-B1*03:03L
  source 1..12: note = Severe acute respiratory syndrome coronavirus 2
LDQALVSDVGDS

SEQ ID NO: 8855 - protein, 13 aa, Severe acute respiratory syndrome-related coronavirus
  REGION 1..13: note = Table B: HLA-DQA1*03:02-B1*03:03L HLA-DRB1*13:02L HLA-DRB1*13:03L HLA-DRB1*01:03L HLA-DRB1*04:02L HLA-DRB1*04:05L HLA-DRB4*03:01NL HLA-DRB1*04:10L HLA-DRB1*12:01L HLA-DRB1*14:54L HLA-DRB1*14:17L HLA-DRB1*16:01L HLA-DQA1*02:01-B1*03:03L
  source 1..13: note = Severe acute respiratory syndrome coronavirus 2
DQALVSDVGDSAE

SEQ ID NO: 8856 - protein, 12 aa, Severe acute respiratory syndrome-related coronavirus
  REGION 1..12: note = Table B: HLA-DQA1*03:02-B1*03:03L HLA-DRB1*04:03L HLA-DRB1*04:02L HLA-DRB1*04:05L HLA-DQA1*01-B1*05L HLA-DQA1*05:01-B1*02:01L HLA-DQA1*03:01-B1*03:02L HLA-DRB1*14:17L HLA-DRB1*16:01L HLA-DQA1*02:01-B1*03:03L
  source 1..12: note = Severe acute respiratory syndrome coronavirus 2
LVSDVGDSAEVA

SEQ ID NO: 8857 - protein, 12 aa, Severe acute respiratory syndrome-related coronavirus
  REGION 1..12: note = Table B: HLA-DQA1*03:02-B1*03:03L HLA-DQA1*01-B1*05L HLA-DQA1*05:01-B1*02:01L HLA-DQA1*03:01-B1*03:02L
  source 1..12: note = Severe acute respiratory syndrome coronavirus 2
VSDVGDSAEVAV

SEQ ID NO: 8858 - protein, 10 aa, Severe acute respiratory syndrome-related coronavirus
  REGION 1..10: note = Table B: HLA-DQA1*03:02-B1*03:03L HLA-DQA1*05:01-B1*03:01L HLA-DRB1*04:03L HLA-DRB1*13:02L HLA-DRB1*13:03L HLA-DRB1*01:03L HLA-DRB1*04:02L HLA-DRB1*04:05L HLA-DRB4*03:01NL HLA-DRB1*14:02L HLA-DQA1*01:01-B1*05:01L HLA-DRB5*01:01L HLA-DQA1*01-B1*05L
  REGION 1..10: note = CONT. FROM ABOVE: HLA-DQA1*05:05-B1*03:19L HLA-DQA1*05:01-B1*02: 01L HLA-DPA1*01:03-B1*04:02L HLA-DRB1*12:01L HLA-DPA1*03:01-B1*1 05:01L HLA-DQA1*03:01-B1*03:02L HLA-DRB1*14:54L HLA-DQA1*05:05-B 1*03:01L HLA-DRB1*14:17L HLA-DRB1*16:01L
  REGION 1..10: note = CONT. FROM ABOVE: HLA-DQA1*01:03-B1*06:01L HLA-DQA1*02:01-B1*03: 03L
  source 1..10: note = Severe acute respiratory syndrome coronavirus 2
VGDSAEVAVK

SEQ ID NO: 8859 - protein, 10 aa, Severe acute respiratory syndrome-related coronavirus
  REGION 1..10: note = Table B: HLA-DQA1*03:02-B1*03:03L HLA-DQA1*05:01-B1*03:01L HLA-DQA1*01-B1*05L HLA-DQA1*05:05-B1*03:19L HLA-DQA1*05:01-B1*02:01L HLA-DQA1*03:01-B1*03:02L
  source 1..10: note = Severe acute respiratory syndrome coronavirus 2
GDSAEVAVKM

SEQ ID NO: 8860 - protein, 10 aa, Severe acute respiratory syndrome-related coronavirus
  REGION 1..10: note = Table B: HLA-DQA1*03:02-B1*03:03L HLA-DQA1*05:01-B1*03:01L HLA-DRB1*13:03L HLA-DQA1*01:02-B1*06:02M HLA-DPA1*01:03-B1*03:01L HLA-DPA1*03:01-B1*04:02L HLA-DRB1*14:01L HLA-DRB1*14:02L HLA-DQA1*05:01-B1*02:01L
  REGION 1..10: note = CONT. FROM ABOVE: HLA-DPA1*01:03-B1*04:01L HLA-DRB1*12:01L HLA-D PA1*02:01-B1*13:01L HLA-DPA1*03:01-B1*105:01M HLA-DQA1*05:05-B1* 03:01L HLA-DPA1*01:02-B1*04:01L HLA-DQA1*01:03-B1*06:01L HLA-DQA 1*02:01-B1*03:03L HLA-DRB1*15:03L
  source 1..10: note = Severe acute respiratory syndrome coronavirus 2
DSAEVAVKMF

SEQ ID NO: 8861 - protein, 10 aa, Severe acute respiratory syndrome-related coronavirus
  REGION 1..10: note = Table B: HLA-DQA1*03:02-B1*03:03L HLA-DQA1*05:05-B1*03:19L HLA-DRB1*09:01L HLA-DPA1*01:03-B1*04:02L HLA-DQA1*03:01-B1*03:02L
  source 1..10: note = Severe acute respiratory syndrome coronavirus 2
AEVAVKMFDA

SEQ ID NO: 8862 - protein, 10 aa, Severe acute respiratory syndrome-related coronavirus
  REGION 1..10: note = Table B: HLA-DQA1*03:02-B1*03:03L HLA-DQA1*05:01-B1*03:01L HLA-DRB1*13:02L HLA-DRB1*13:03M HLA-DRB1*01:03L HLA-DQA1*01:02-B1*06:02H HLA-DRB1*01:01L HLA-DRB4*03:01NL HLA-DRB1*08:77L HLA-DPA1*01:03-B1*03:01L
  REGION 1..10: note = CONT. FROM ABOVE: HLA-DPA1*03:01-B1*04:02L HLA-DRB1*03:01L HLA-D RB1*14:01L HLA-DRB1*14:02L HLA-DRB5*01:01L HLA-DQA1*01-B1*05L HL A-DQA1*05:05-B1*03:19L HLA-DQA1*05:01-B1*02:01L HLA-DRB4*01:01L HLA-DPA1*01:03-B1*04:01M HLA-DQA1*05:05-B1*03:116L
  REGION 1..10: note = CONT. FROM ABOVE: HLA-DPA1*01:03-B1*04:02L HLA-DRB1*12:01L HLA-D PA1*02:01-B1*13:01L HLA-DPA1*03:01-B1*105:01M HLA-DPA1*01:03-B1* 104:01L HLA-DQA1*05:05-B1*03:01L HLA-DPA1*01:02-B1*04:01L HLA-DR B1*10:01L HLA-DRB1*16:01L HLA-DQA1*01:03-B1*06:01L
  REGION 1..10: note = CONT. FROM ABOVE: HLA-DQA1*02:01-B1*03:03L HLA-DRB1*15:03L
  source 1..10: note = Severe acute respiratory syndrome coronavirus 2
EVAVKMFDAY

SEQ ID NO: 8863 - protein, 12 aa, Severe acute respiratory syndrome-related coronavirus
  REGION 1..12: note = Table B: HLA-DQA1*03:02-B1*03:03L HLA-DQA1*05:01-B1*03:01L HLA-DRB1*01:03L HLA-DRB1*04:04L HLA-DRB1*04:05L HLA-DRB1*01:02L HLA-DPA1*01:03-B1*03:01L HLA-DPA1*03:01-B1*04:02L HLA-DRB1*14:01L HLA-DRB1*04:10L HLA-DRB1*12:01L
  REGION 1..12: note = CONT. FROM ABOVE: HLA-DPA1*02:01-B1*13:01L HLA-DPA1*03:01-B1*105 :01L HLA-DQA1*05:05-B1*03:01L HLA-DPA1*01:02-B1*04:01L HLA-DRB1* 16:01L HLA-DRB1*04:08L HLA-DRB1*15:03L
  source 1..12: note = Severe acute respiratory syndrome coronavirus 2
VAVKMFDAYVNT

SEQ ID NO: 8864 - protein, 10 aa, Severe acute respiratory syndrome-related coronavirus
  REGION 1..10: note = Table B: HLA-DQA1*03:02-B1*03:03L HLA-DQA1*05:01-B1*03:01L HLA-DRB1*04:01L HLA-DRB1*04:03L HLA-DRB1*13:02L HLA-DRB1*13:03L HLA-DRB1*01:03M HLA-DRB1*04:05L HLA-DQA1*01:02-B1*06:02M HLA-DRB1*01:01L HLA-DRB1*01:02L HLA-DRB1*08:77L
  REGION 1..10: note = CONT. FROM ABOVE: HLA-DPA1*01:03-B1*03:01L HLA-DPA1*03:01-B1*04: 02L HLA-DRB1*03:01L HLA-DRB1*14:01L HLA-DRB1*11:03L HLA-DRB1*14: 02M HLA-DQA1*01:01-B1*05:01L HLA-DRB1*08:01L HLA-DRB1*11:01L HLA -DQA1*01-B1*05L HLA-DQA1*05:05-B1*03:19L
  REGION 1..10: note = CONT. FROM ABOVE: HLA-DQA1*05:01-B1*02:01L HLA-DRB4*01:01L HLA-D PA1*01:03-B1*04:01L HLA-DQA1*05:05-B1*03:116M HLA-DRB1*09:01L HL A-DPA1*01:03-B1*04:02M HLA-DRB1*12:01L HLA-DPA1*02:01-B1*13:01M HLA-DPA1*03:01-B1*105:01L HLA-DQA1*03:01-B1*03:02L
  REGION 1..10: note = CONT. FROM ABOVE: HLA-DPA1*01:03-B1*104:01L HLA-DPA1*01:02-B1*04 :01L HLA-DRB1*07:01L HLA-DRB1*10:01L HLA-DRB1*16:01L HLA-DQA1*01 :03-B1*06:01M HLA-DRB1*08:02L HLA-DRB1*08:03L HLA-DQA1*02:01-B1* 03:03M HLA-DRB1*15:03L
  source 1..10: note = Severe acute respiratory syndrome coronavirus 2
KMFDAYVNTF

SEQ ID NO: 8865 - protein, 11 aa, Severe acute respiratory syndrome-related coronavirus
  REGION 1..11: note = Table B: HLA-DQA1*03:02-B1*03:03L HLA-DRB1*13:03L HLA-DPA1*03:01-B1*04:02L HLA-DQA1*05:05-B1*03:19L HLA-DQA1*05:01-B1*02:01L HLA-DPA1*01:03-B1*04:01L HLA-DRB1*12:01L HLA-DPA1*01:02-B1*04:01L
  source 1..11: note = Severe acute respiratory syndrome coronavirus 2
DAYVNTFSSTF

SEQ ID NO: 8866 - protein, 11 aa, Severe acute respiratory syndrome-related coronavirus
  REGION 1..11: note = Table B: HLA-DQA1*03:02-B1*03:03L HLA-DPA1*03:01-B1*04:02L HLA-DQA1*01-B1*05L HLA-DQA1*05:01-B1*02:01L HLA-DRB1*12:01L HLA-DPA1*01:02-B1*04:01L
  source 1..11: note = Severe acute respiratory syndrome coronavirus 2
AYVNTFSSTFN

SEQ ID NO: 8867 - protein, 11 aa, Severe acute respiratory syndrome-related coronavirus
  REGION 1..11: note = Table B: HLA-DQA1*03:02-B1*03:03L HLA-DRB1*04:03L HLA-DRB1*13:02L HLA-DRB4*03:01NL HLA-DRB1*08:77L HLA-DRB3*02:01L HLA-DPA1*03:01-B1*04:02L HLA-DQA1*05:01-B1*02:01L HLA-DRB1*12:01L HLA-DRB1*07:01L HLA-DRB1*16:01L
  REGION 1..11: note = CONT. FROM ABOVE: HLA-DQA1*02:01-B1*03:03L HLA-DRB1*15:03L
  source 1..11: note = Severe acute respiratory syndrome coronavirus 2
NTFSSTFNVPM

SEQ ID NO: 8868 - protein, 10 aa, Severe acute respiratory syndrome-related coronavirus
  REGION 1..10: note = Table B: HLA-DQA1*03:02-B1*03:03L HLA-DRB1*04:03L HLA-DQA1*01-B1*05L HLA-DQA1*05:01-B1*02:01L HLA-DRB1*12:01L HLA-DQA1*03:01-B1*03:02L HLA-DRB1*16:01L HLA-DQA1*01:03-B1*06:01L HLA-DQA1*02:01-B1*03:03L
  source 1..10: note = Severe acute respiratory syndrome coronavirus 2
FSSTFNVPME

SEQ ID NO: 8869 - protein, 10 aa, Severe acute respiratory syndrome-related coronavirus
  REGION 1..10: note = Table B: HLA-DQA1*03:02-B1*03:03L HLA-DQA1*05:01-B1*03:01L HLA-DRB1*04:03L HLA-DRB1*13:02L HLA-DRB1*13:03L HLA-DRB1*01:03L HLA-DRB1*04:02L HLA-DRB4*03:01NL HLA-DQA1*01:01-B1*05:01L HLA-DRB1*08:01L HLA-DRB5*01:01L HLA-DQA1*01-B1*05L
  REGION 1..10: note = CONT. FROM ABOVE: HLA-DQA1*05:01-B1*02:01L HLA-DRB1*12:01L HLA-D RB1*12:02L HLA-DPA1*03:01-B1*105:01L HLA-DQA1*03:01-B1*03:02L HL A-DQA1*05:05-B1*03:01L HLA-DRB1*14:17L HLA-DRB1*16:01L HLA-DQA1* 01:03-B1*06:01L HLA-DQA1*02:01-B1*03:03L
  source 1..10: note = Severe acute respiratory syndrome coronavirus 2
SSTFNVPMEK

SEQ ID NO: 8870 - protein, 10 aa, Severe acute respiratory syndrome-related coronavirus
  REGION 1..10: note = Table B: HLA-DQA1*03:02-B1*03:03M HLA-DQA1*05:01-B1*03:01M HLA-DRB1*04:01L HLA-DRB1*13:02L HLA-DRB1*13:03L HLA-DRB1*01:03L HLA-DRB1*04:02L HLA-DRB1*04:05L HLA-DQA1*01:02-B1*06:02M HLA-DRB1*01:01L HLA-DRB1*01:02M HLA-DRB4*03:01NL HLA-DRB1*08:77L
  REGION 1..10: note = CONT. FROM ABOVE: HLA-DRB3*02:01L HLA-DPA1*01:03-B1*03:01L HLA-D PA1*03:01-B1*04:02L HLA-DRB1*03:01L HLA-DRB1*14:01L HLA-DRB1*14: 02M HLA-DRB1*08:01L HLA-DRB1*11:01L HLA-DQA1*01-B1*05L HLA-DQA1* 05:05-B1*03:19L HLA-DQA1*05:01-B1*02:01L HLA-DRB4*01:01L
  REGION 1..10: note = CONT. FROM ABOVE: HLA-DPA1*01:03-B1*04:01L HLA-DQA1*05:05-B1*03: 116M HLA-DRB1*09:01L HLA-DPA1*01:03-B1*04:02L HLA-DRB1*12:01L HL A-DPA1*02:01-B1*13:01L HLA-DPA1*03:01-B1*105:01M HLA-DQA1*03:01- B1*03:02M HLA-DPA1*01:03-B1*104:01L HLA-DQA1*05:05-B1*03:01L
  REGION 1..10: note = CONT. FROM ABOVE: HLA-DPA1*01:02-B1*04:01L HLA-DRB1*07:01L HLA-D RB1*10:01L HLA-DRB1*16:01L HLA-DQA1*01:03-B1*06:01L HLA-DRB1*08: 03L HLA-DQA1*02:01-B1*03:03M HLA-DRB1*15:03M
  source 1..10: note = Severe acute respiratory syndrome coronavirus 2
STFNVPMEKL

SEQ ID NO: 8871 - protein, 15 aa, Severe acute respiratory syndrome-related coronavirus
  REGION 1..15: note = Table B: HLA-DQA1*03:02-B1*03:03L HLA-DRB1*13:03L HLA-DRB1*07:01L HLA-DQA1*01:03-B1*06:01L
  source 1..15: note = Severe acute respiratory syndrome coronavirus 2
VPMEKLKTLVATAEA

SEQ ID NO: 8872 - protein, 13 aa, Severe acute respiratory syndrome-related coronavirus
  REGION 1..13: note = Table B: HLA-DQA1*03:02-B1*03:03L HLA-DQA1*05:01-B1*03:01L HLA-DRB1*13:02L HLA-DRB1*13:03L HLA-DRB1*01:03L HLA-DRB1*04:02L HLA-DRB1*04:04L HLA-DQA1*01:02-B1*06:02L HLA-DRB1*01:02L HLA-DRB4*03:01NL HLA-DPA1*01:03-B1*03:01L
  REGION 1..13: note = CONT. FROM ABOVE: HLA-DQA1*01:01-B1*05:01L HLA-DQA1*01-B1*05L HL A-DQA1*05:01-B1*02:01L HLA-DRB1*04:10L HLA-DRB1*12:01L HLA-DPA1* 02:01-B1*13:01L HLA-DPA1*03:01-B1*105:01L HLA-DRB1*14:54L HLA-DP A1*01:03-B1*104:01L HLA-DQA1*05:05-B1*03:01L HLA-DRB1*14:17L
  REGION 1..13: note = CONT. FROM ABOVE: HLA-DRB1*16:01L HLA-DQA1*01:03-B1*06:01L HLA-D RB1*04:08L HLA-DRB1*15:03L
  source 1..13: note = Severe acute respiratory syndrome coronavirus 2
EKLKTLVATAEAE

SEQ ID NO: 8873 - protein, 10 aa, Severe acute respiratory syndrome-related coronavirus
  REGION 1..10: note = Table B: HLA-DQA1*03:02-B1*03:03L
  source 1..10: note = Severe acute respiratory syndrome coronavirus 2
TLVATAEAEL

SEQ ID NO: 8874 - protein, 10 aa, Severe acute respiratory syndrome-related coronavirus
  REGION 1..10: note = Table B: HLA-DQA1*03:02-B1*03:03L HLA-DQA1*05:01-B1*03:01L HLA-DRB1*04:03L HLA-DRB1*01:03L HLA-DRB1*04:02L HLA-DQA1*01:02-B1*06:02L HLA-DRB4*03:01NL HLA-DQA1*01:01-B1*05:01L HLA-DQA1*05:05-B1*03:19L
  REGION 1..10: note = CONT. FROM ABOVE: HLA-DRB4*02:01NL HLA-DQA1*05:01-B1*02:01L HLA- DPA1*01:03-B1*04:02L HLA-DRB1*12:01L HLA-DPA1*03:01-B1*105:01L H LA-DQA1*03:01-B1*03:02L HLA-DQA1*05:05-B1*03:01L HLA-DRB1*14:17L HLA-DRB1*16:01L HLA-DQA1*01:03-B1*06:01M HLA-DRB1*04:08L
  REGION 1..10: note = CONT. FROM ABOVE: HLA-DQA1*02:01-B1*03:03L
  source 1..10: note = Severe acute respiratory syndrome coronavirus 2
VATAEAELAK

SEQ ID NO: 8875 - protein, 10 aa, Severe acute respiratory syndrome-related coronavirus
  REGION 1..10: note = Table B: HLA-DQA1*03:02-B1*03:03L HLA-DQA1*05:01-B1*03:01L HLA-DRB1*04:03L HLA-DRB1*01:03L HLA-DRB1*04:02L HLA-DQA1*01:02-B1*06:02L HLA-DRB4*03:01NL HLA-DQA1*01:01-B1*05:01L HLA-DQA1*05:05-B1*03:19L
  REGION 1..10: note = CONT. FROM ABOVE: HLA-DQA1*05:01-B1*02:01L HLA-DPA1*01:03-B1*04: 02L HLA-DRB1*12:01L HLA-DPA1*03:01-B1*105:01L HLA-DQA1*03:01-B1* 03:02L HLA-DQA1*05:05-B1*03:01L HLA-DRB1*14:17L HLA-DPA1*01:02-B 1*04:01L HLA-DRB1*16:01L HLA-DQA1*01:03-B1*06:01M
  REGION 1..10: note = CONT. FROM ABOVE: HLA-DRB1*04:08L HLA-DQA1*02:01-B1*03:03L
  source 1..10: note = Severe acute respiratory syndrome coronavirus 2
ATAEAELAKN

SEQ ID NO: 8876 - protein, 10 aa, Severe acute respiratory syndrome-related coronavirus
  REGION 1..10: note = Table B: HLA-DQA1*03:02-B1*03:03L HLA-DQA1*05:05-B1*03:19L HLA-DQA1*03:01-B1*03:02L HLA-DQA1*01:03-B1*06:01L
  source 1..10: note = Severe acute respiratory syndrome coronavirus 2
TAEAELAKNV

SEQ ID NO: 8877 - protein, 10 aa, Severe acute respiratory syndrome-related coronavirus
  REGION 1..10: note = Table B: HLA-DQA1*03:02-B1*03:03L HLA-DQA1*05:05-B1*03:19L HLA-DQA1*03:01-B1*03:02L
  source 1..10: note = Severe acute respiratory syndrome coronavirus 2
AEAELAKNVS

SEQ ID NO: 8878 - protein, 10 aa, Severe acute respiratory syndrome-related coronavirus
  REGION 1..10: note = Table B: HLA-DQA1*03:02-B1*03:03M HLA-DQA1*05:01-B1*03:01L HLA-DQA1*05:05-B1*03:19L HLA-DQA1*05:01-B1*02:01L HLA-DQA1*03:01-B1*03:02L
  source 1..10: note = Severe acute respiratory syndrome coronavirus 2
EAELAKNVSL

SEQ ID NO: 8879 - protein, 10 aa, Severe acute respiratory syndrome-related coronavirus
  REGION 1..10: note = Table B: HLA-DQA1*03:02-B1*03:03L HLA-DQA1*05:01-B1*03:01L HLA-DRB1*04:03L HLA-DRB1*04:02L HLA-DRB4*03:01NL HLA-DQA1*03:01-B1*03:02L HLA-DRB1*14:17L HLA-DQA1*01:03-B1*06:01L HLA-DQA1*02:01-B1*03:03L
  source 1..10: note = Severe acute respiratory syndrome coronavirus 2
ELAKNVSLDN

SEQ ID NO: 8880 - protein, 11 aa, Severe acute respiratory syndrome-related coronavirus
  REGION 1..11: note = Table B: HLA-DQA1*03:02-B1*03:03L HLA-DRB1*04:03L HLA-DQA1*05:01-B1*02:01L HLA-DQA1*02:01-B1*03:03L
  source 1..11: note = Severe acute respiratory syndrome coronavirus 2
LAKNVSLDNVL

SEQ ID NO: 8881 - protein, 10 aa, Severe acute respiratory syndrome-related coronavirus
  REGION 1..10: note = Table B: HLA-DQA1*03:02-B1*03:03L HLA-DQA1*05:01-B1*03:01L HLA-DRB1*04:03L HLA-DRB1*13:03L HLA-DRB1*01:03L HLA-DRB1*04:05L HLA-DQA1*01:02-B1*06:02L HLA-DRB1*01:01L HLA-DRB1*08:77L HLA-DPA1*03:01-B1*04:02L HLA-DRB1*14:01L HLA-DRB1*14:02L
  REGION 1..10: note = CONT. FROM ABOVE: HLA-DQA1*01-B1*05L HLA-DQA1*05:05-B1*03:19L HL A-DQA1*05:01-B1*02:01L HLA-DRB4*01:01L HLA-DPA1*01:03-B1*04:01L HLA-DQA1*05:05-B1*03:116L HLA-DPA1*01:03-B1*04:02L HLA-DRB1*12:0 1L HLA-DPA1*02:01-B1*13:01L HLA-DPA1*03:01-B1*105:01L
  REGION 1..10: note = CONT. FROM ABOVE: HLA-DPA1*01:02-B1*04:01L HLA-DRB1*10:01L HLA-D RB1*16:01L HLA-DQA1*01:03-B1*06:01L HLA-DRB1*08:02L HLA-DQA1*02: 01-B1*03:03L HLA-DRB1*15:03L
  source 1..10: note = Severe acute respiratory syndrome coronavirus 2
VSLDNVLSTF

SEQ ID NO: 8882 - protein, 10 aa, Severe acute respiratory syndrome-related coronavirus
  REGION 1..10: note = Table B: HLA-DQA1*03:02-B1*03:03L HLA-DQA1*05:05-B1*03:19L
  source 1..10: note = Severe acute respiratory syndrome coronavirus 2
SLDNVLSTFI

SEQ ID NO: 8883 - protein, 12 aa, Severe acute respiratory syndrome-related coronavirus
  REGION 1..12: note = Table B: HLA-DQA1*03:02-B1*03:03L HLA-DQA1*05:01-B1*03:01L HLA-DRB1*04:03L HLA-DRB1*01:03L HLA-DRB1*04:02L HLA-DRB1*04:05L HLA-DRB1*01:02L HLA-DQA1*01:01-B1*05:01L HLA-DQA1*01-B1*05L HLA-DQA1*05:05-B1*03:19L HLA-DQA1*05:01-B1*02:01L
  REGION 1..12: note = CONT. FROM ABOVE: HLA-DRB1*16:01L HLA-DRB1*04:08L
  source 1..12: note = Severe acute respiratory syndrome coronavirus 2
DNVLSTFISAAR

SEQ ID NO: 8884 - protein, 12 aa, Severe acute respiratory syndrome-related coronavirus
  REGION 1..12: note = Table B: HLA-DQA1*03:02-B1*03:03L HLA-DQA1*05:01-B1*03:01L HLA-DRB1*04:03L HLA-DRB1*04:02L HLA-DRB1*01:02L HLA-DQA1*01-B1*05L HLA-DQA1*05:05-B1*03:19L HLA-DRB1*16:01L HLA-DRB1*04:08L HLA-DRB1*15:03L
  source 1..12: note = Severe acute respiratory syndrome coronavirus 2
NVLSTFISAARQ

SEQ ID NO: 8885 - protein, 10 aa, Severe acute respiratory syndrome-related coronavirus
  REGION 1..10: note = Table B: HLA-DQA1*03:02-B1*03:03L HLA-DQA1*05:01-B1*03:01L HLA-DRB1*04:03L HLA-DRB1*13:03L HLA-DRB1*01:03L HLA-DRB1*04:02L HLA-DQA1*01:02-B1*06:02L HLA-DRB4*03:01NL HLA-DQA1*01:01-B1*05:01L HLA-DQA1*05:05-B1*03:19L
  REGION 1..10: note = CONT. FROM ABOVE: HLA-DQA1*05:01-B1*02:01L HLA-DQA1*03:01-B1*03: 02L HLA-DQA1*05:05-B1*03:01L HLA-DRB1*14:17L HLA-DPA1*01:02-B1*0 4:01L HLA-DRB1*16:01L HLA-DQA1*01:03-B1*06:01L HLA-DQA1*02:01-B1 *03:03L
  source 1..10: note = Severe acute respiratory syndrome coronavirus 2
STFISAARQG

SEQ ID NO: 8886 - protein, 10 aa, Severe acute respiratory syndrome-related coronavirus
  REGION 1..10: note = Table B: HLA-DQA1*03:02-B1*03:03L HLA-DQA1*05:01-B1*03:01L HLA-DRB1*04:03L HLA-DRB1*04:02L HLA-DQA1*01:02-B1*06:02L HLA-DRB4*03:01NL HLA-DQA1*05:05-B1*03:19L HLA-DQA1*05:01-B1*02:01L HLA-DPA1*03:01-B1*105:01L
  REGION 1..10: note = CONT. FROM ABOVE: HLA-DQA1*03:01-B1*03:02L HLA-DQA1*05:05-B1*03: 01L HLA-DRB1*14:17L HLA-DQA1*01:03-B1*06:01L HLA-DQA1*02:01-B1*0 3:03L
  source 1..10: note = Severe acute respiratory syndrome coronavirus 2
ISAARQGFVD

SEQ ID NO: 8887 - protein, 11 aa, Severe acute respiratory syndrome-related coronavirus
  REGION 1..11: note = Table B: HLA-DQA1*03:02-B1*03:03L HLA-DRB1*04:03L HLA-DRB1*16:01L HLA-DQA1*01:03-B1*06:01L
  source 1..11: note = Severe acute respiratory syndrome coronavirus 2
ARQGFVDSDVE

SEQ ID NO: 8888 - protein, 10 aa, Severe acute respiratory syndrome-related coronavirus
  REGION 1..10: note = Table B: HLA-DQA1*03:02-B1*03:03L HLA-DRB1*04:03L HLA-DRB1*13:03L HLA-DRB1*01:03L HLA-DRB1*04:02L HLA-DRB1*04:05L HLA-DRB4*03:01NL HLA-DQA1*01-B1*05L HLA-DQA1*05:01-B1*02:01L HLA-DRB1*04:10L HLA-DRB1*12:01L HLA-DPA1*03:01-B1*105:01L
  REGION 1..10: note = CONT. FROM ABOVE: HLA-DQA1*03:01-B1*03:02L HLA-DRB1*14:54L HLA-D RB1*14:17L HLA-DRB1*16:01L HLA-DQA1*02:01-B1*03:03L
  source 1..10: note = Severe acute respiratory syndrome coronavirus 2
FVDSDVETKD

SEQ ID NO: 8889 - protein, 10 aa, Severe acute respiratory syndrome-related coronavirus
  REGION 1..10: note = Table B: HLA-DQA1*03:02-B1*03:03L HLA-DQA1*01-B1*05L HLA-DQA1*05:01-B1*02:01L HLA-DQA1*03:01-B1*03:02L
  source 1..10: note = Severe acute respiratory syndrome coronavirus 2
VDSDVETKDV

SEQ ID NO: 8890 - protein, 10 aa, Severe acute respiratory syndrome-related coronavirus
  REGION 1..10: note = Table B: HLA-DQA1*03:02-B1*03:03L
  source 1..10: note = Severe acute respiratory syndrome coronavirus 2
DSDVETKDVV

SEQ ID NO: 8891 - protein, 10 aa, Severe acute respiratory syndrome-related coronavirus
  REGION 1..10: note = Table B: HLA-DQA1*03:02-B1*03:03L HLA-DRB1*04:03L HLA-DRB1*13:03L HLA-DQA1*01:01-B1*05:01L HLA-DQA1*01-B1*05L HLA-DQA1*05:01-B1*02:01L HLA-DQA1*03:01-B1*03:02L HLA-DRB1*16:01L HLA-DQA1*02:01-B1*03:03L
  source 1..10: note = Severe acute respiratory syndrome coronavirus 2
SDVETKDVVE

SEQ ID NO: 8892 - protein, 10 aa, Severe acute respiratory syndrome-related coronavirus
  REGION 1..10: note = Table B: HLA-DQA1*03:02-B1*03:03L HLA-DQA1*05:05-B1*03:19L
  source 1..10: note = Severe acute respiratory syndrome coronavirus 2
VETKDVVECL

SEQ ID NO: 8893 - protein, 11 aa, Severe acute respiratory syndrome-related coronavirus
  REGION 1..11: note = Table B: HLA-DQA1*03:02-B1*03:03L HLA-DRB1*04:03L HLA-DRB1*04:02L HLA-DQA1*05:01-B1*02:01L HLA-DRB1*14:17L HLA-DQA1*01:03-B1*06:01L HLA-DQA1*02:01-B1*03:03L
  source 1..11: note = Severe acute respiratory syndrome coronavirus 2
LSHQSDIEVTG

SEQ ID NO: 8894 - protein, 12 aa, Severe acute respiratory syndrome-related coronavirus
  REGION 1..12: note = Table B: HLA-DQA1*03:02-B1*03:03L HLA-DQA1*05:01-B1*03:01L HLA-DRB1*04:03L HLA-DQA1*01:02-B1*06:02L HLA-DQA1*01:01-B1*05:01L HLA-DQA1*01-B1*05L HLA-DQA1*05:05-B1*03:19L HLA-DQA1*05:01-B1*02:01L
  REGION 1..12: note = CONT. FROM ABOVE: HLA-DPA1*03:01-B1*105:01L HLA-DQA1*05:05-B1*03 :01L HLA-DRB1*16:01L HLA-DQA1*01:03-B1*06:01M HLA-DQA1*02:01-B1* 03:03L
  source 1..12: note = Severe acute respiratory syndrome coronavirus 2
SHQSDIEVTGDS

SEQ ID NO: 8895 - protein, 13 aa, Severe acute respiratory syndrome-related coronavirus
  REGION 1..13: note = Table B: HLA-DQA1*03:02-B1*03:03L HLA-DRB1*04:03L HLA-DRB1*12:01L HLA-DQA1*05:05-B1*03:01L HLA-DQA1*01:03-B1*06:01L
  source 1..13: note = Severe acute respiratory syndrome coronavirus 2
SDIEVTGDSCNNY

SEQ ID NO: 8896 - protein, 12 aa, Severe acute respiratory syndrome-related coronavirus
  REGION 1..12: note = Table B: HLA-DQA1*03:02-B1*03:03L HLA-DQA1*03:01-B1*03:02L HLA-DQA1*05:05-B1*03:01L HLA-DQA1*01:03-B1*06:01L
  source 1..12: note = Severe acute respiratory syndrome coronavirus 2
IEVTGDSCNNYM

SEQ ID NO: 8897 - protein, 11 aa, Severe acute respiratory syndrome-related coronavirus
  REGION 1..11: note = Table B: HLA-DQA1*03:02-B1*03:03L HLA-DQA1*01:02-B1*06:02L HLA-DPA1*03:01-B1*105:01L HLA-DRB1*16:01L HLA-DQA1*01:03-B1*06:01L
  source 1..11: note = Severe acute respiratory syndrome coronavirus 2
NYMLTYNKVEN

SEQ ID NO: 8898 - protein, 12 aa, Severe acute respiratory syndrome-related coronavirus
  REGION 1..12: note = Table B: HLA-DQA1*03:02-B1*03:03L HLA-DQA1*05:01-B1*03:01L HLA-DRB1*13:02L HLA-DRB1*04:04L HLA-DQA1*01:02-B1*06:02L HLA-DRB1*01:02L HLA-DRB1*08:04L HLA-DRB1*14:01L HLA-DRB1*11:04L HLA-DRB1*11:01L HLA-DQA1*01-B1*05L HLA-DQA1*05:01-B1*02:01L
  REGION 1..12: note = CONT. FROM ABOVE: HLA-DRB1*04:10L HLA-DPA1*03:01-B1*105:01L HLA- DQA1*05:05-B1*03:01L HLA-DRB1*10:01L HLA-DQA1*01:03-B1*06:01L HL A-DRB1*08:03L HLA-DRB1*15:03L
  source 1..12: note = Severe acute respiratory syndrome coronavirus 2
LTYNKVENMTPR

SEQ ID NO: 8899 - protein, 12 aa, Severe acute respiratory syndrome-related coronavirus
  REGION 1..12: note = Table B: HLA-DQA1*03:02-B1*03:03L HLA-DQA1*01:02-B1*06:02L HLA-DRB1*01:02L HLA-DRB1*14:01L HLA-DQA1*01-B1*05L HLA-DQA1*05:01-B1*02:01L HLA-DRB1*12:01L HLA-DPA1*02:01-B1*13:01L HLA-DPA1*03:01-B1*105:01L
  REGION 1..12: note = CONT. FROM ABOVE: HLA-DRB1*15:03L
  source 1..12: note = Severe acute respiratory syndrome coronavirus 2
YNKVENMTPRDL

SEQ ID NO: 8900 - protein, 10 aa, Severe acute respiratory syndrome-related coronavirus
  REGION 1..10: note = Table B: HLA-DQA1*03:02-B1*03:03L HLA-DQA1*05:01-B1*03:01L HLA-DRB1*04:03L HLA-DRB1*13:03L HLA-DRB1*04:02L HLA-DQA1*01:02-B1*06:02L HLA-DRB4*03:01NL HLA-DQA1*01-B1*05L HLA-DQA1*05:05-B1*03:19L HLA-DQA1*05:01-B1*02:01L
  REGION 1..10: note = CONT. FROM ABOVE: HLA-DRB1*12:01L HLA-DPA1*03:01-B1*105:01L HLA- DQA1*03:01-B1*03:02L HLA-DRB1*14:54L HLA-DQA1*05:05-B1*03:01L HL A-DRB1*14:17L HLA-DPA1*01:02-B1*04:01L HLA-DRB1*16:01L HLA-DQA1* 01:03-B1*06:01L HLA-DQA1*02:01-B1*03:03L HLA-DRB1*15:03L
  source 1..10: note = Severe acute respiratory syndrome coronavirus 2
VENMTPRDLG

SEQ ID NO: 8901 - protein, 10 aa, Severe acute respiratory syndrome-related coronavirus
  REGION 1..10: note = Table B: HLA-DQA1*03:02-B1*03:03L HLA-DQA1*05:01-B1*03:01L HLA-DRB1*04:03L HLA-DRB1*13:03L HLA-DRB1*01:03L HLA-DRB1*04:02L HLA-DRB1*04:05L HLA-DQA1*01:02-B1*06:02L HLA-DRB1*01:02L HLA-DRB4*03:01NL HLA-DQA1*01:01-B1*05:01L
  REGION 1..10: note = CONT. FROM ABOVE: HLA-DQA1*05:05-B1*03:19L HLA-DQA1*05:01-B1*02: 01L HLA-DRB1*12:01L HLA-DPA1*03:01-B1*105:01L HLA-DQA1*03:01-B1* 03:02L HLA-DRB1*14:54L HLA-DQA1*05:05-B1*03:01L HLA-DRB1*14:17L HLA-DRB1*16:01L HLA-DQA1*01:03-B1*06:01L HLA-DRB1*04:08L
  REGION 1..10: note = CONT. FROM ABOVE: HLA-DQA1*02:01-B1*03:03L
  source 1..10: note = Severe acute respiratory syndrome coronavirus 2
INAQVAKSHN

SEQ ID NO: 8902 - protein, 10 aa, Severe acute respiratory syndrome-related coronavirus
  REGION 1..10: note = Table B: HLA-DQA1*03:02-B1*03:03L HLA-DQA1*05:01-B1*03:01L HLA-DRB1*13:02L HLA-DRB1*13:03L HLA-DRB1*01:03L HLA-DRB1*04:02L HLA-DQA1*01:02-B1*06:02L HLA-DRB1*01:02L HLA-DRB4*03:01NL HLA-DRB1*08:77L HLA-DRB3*02:01L HLA-DPA1*01:03-B1*03:01L
  REGION 1..10: note = CONT. FROM ABOVE: HLA-DPA1*03:01-B1*04:02L HLA-DRB1*14:01L HLA-D RB1*14:02L HLA-DRB1*08:01L HLA-DRB5*01:01L HLA-DQA1*01-B1*05L HL A-DQA1*05:01-B1*02:01L HLA-DPA1*01:03-B1*04:01L HLA-DQA1*05:05-B 1*03:116L HLA-DRB1*09:01L HLA-DRB1*12:01L
  REGION 1..10: note = CONT. FROM ABOVE: HLA-DPA1*03:01-B1*105:01L HLA-DQA1*03:01-B1*03 :02L HLA-DPA1*01:02-B1*04:01L HLA-DRB1*07:01L HLA-DRB1*16:01L HL A-DQA1*02:01-B1*03:03L HLA-DRB1*15:03L
  source 1..10: note = Severe acute respiratory syndrome coronavirus 2
QVAKSHNIAL

SEQ ID NO: 8903 - protein, 12 aa, Severe acute respiratory syndrome-related coronavirus
  REGION 1..12: note = Table B: HLA-DQA1*03:02-B1*03:03L HLA-DQA1*05:01-B1*03:01L HLA-DRB1*13:03L HLA-DRB1*01:03L HLA-DRB1*04:04L HLA-DRB1*04:05L HLA-DRB1*01:02L HLA-DRB4*03:01NL HLA-DPA1*01:03-B1*03:01L HLA-DRB1*14:01L HLA-DRB1*11:04L HLA-DRB1*08:01L
  REGION 1..12: note = CONT. FROM ABOVE: HLA-DQA1*01-B1*05L HLA-DQA1*05:01-B1*02:01L HL A-DRB1*04:10L HLA-DRB1*12:01L HLA-DPA1*02:01-B1*13:01L HLA-DPA1* 03:01-B1*105:01L HLA-DQA1*03:01-B1*03:02L HLA-DRB1*14:54L HLA-DQ A1*05:05-B1*03:01L HLA-DPA1*01:02-B1*04:01L HLA-DRB1*16:01L
  REGION 1..12: note = CONT. FROM ABOVE: HLA-DRB1*04:08L HLA-DQA1*02:01-B1*03:03L HLA-D RB1*15:03L
  source 1..12: note = Severe acute respiratory syndrome coronavirus 2
SHNIALIWNVKD

SEQ ID NO: 8904 - protein, 10 aa, Severe acute respiratory syndrome-related coronavirus
  REGION 1..10: note = Table B: HLA-DQA1*03:02-B1*03:03L HLA-DQA1*05:01-B1*03:01L HLA-DRB1*04:03L HLA-DRB1*04:05L HLA-DQA1*01:02-B1*06:02L HLA-DPA1*03:01-B1*04:02L HLA-DRB1*14:01L HLA-DQA1*01-B1*05L HLA-DQA1*05:05-B1*03:19L HLA-DQA1*05:01-B1*02:01L
  REGION 1..10: note = CONT. FROM ABOVE: HLA-DRB1*12:01L HLA-DPA1*02:01-B1*13:01L HLA-D PA1*03:01-B1*105:01L HLA-DQA1*03:01-B1*03:02L HLA-DQA1*05:05-B1* 03:01L HLA-DRB1*16:01L HLA-DQA1*01:03-B1*06:01L HLA-DQA1*02:01-B 1*03:03L HLA-DRB1*15:03L
  source 1..10: note = Severe acute respiratory syndrome coronavirus 2
IALIWNVKDF

SEQ ID NO: 8905 - protein, 10 aa, Severe acute respiratory syndrome-related coronavirus
  REGION 1..10: note = Table B: HLA-DQA1*03:02-B1*03:03L HLA-DRB1*01:03L HLA-DQA1*01:02-B1*06:02L HLA-DPA1*01:03-B1*03:01L HLA-DPA1*03:01-B1*04:02L HLA-DQA1*01-B1*05L HLA-DQA1*05:01-B1*02:01L HLA-DPA1*01:03-B1*04:01L
  REGION 1..10: note = CONT. FROM ABOVE: HLA-DPA1*01:03-B1*04:02L HLA-DRB1*12:01L HLA-D PA1*02:01-B1*13:01L HLA-DPA1*03:01-B1*105:01L HLA-DPA1*01:02-B1* 04:01L HLA-DRB1*16:01L HLA-DQA1*01:03-B1*06:01L HLA-DRB1*04:08L HLA-DQA1*02:01-B1*03:03L HLA-DRB1*15:03L
  source 1..10: note = Severe acute respiratory syndrome coronavirus 2
IWNVKDFMSL

SEQ ID NO: 8906 - protein, 10 aa, Severe acute respiratory syndrome-related coronavirus
  REGION 1..10: note = Table B: HLA-DQA1*03:02-B1*03:03L
  source 1..10: note = Severe acute respiratory syndrome coronavirus 2
KDFMSLSEQL

SEQ ID NO: 8907 - protein, 15 aa, Severe acute respiratory syndrome-related coronavirus
  REGION 1..15: note = Table B: HLA-DQA1*03:02-B1*03:03L HLA-DRB1*04:01L HLA-DRB1*13:02L HLA-DRB1*04:02L HLA-DRB1*04:04L HLA-DRB1*04:05L HLA-DRB1*01:01L HLA-DRB1*08:04L HLA-DRB3*02:01L HLA-DPA1*01:03-B1*03:01L HLA-DPA1*03:01-B1*04:02L
  REGION 1..15: note = CONT. FROM ABOVE: HLA-DRB1*14:01L HLA-DRB1*11:02L HLA-DRB1*11:03 L HLA-DRB1*11:04L HLA-DRB1*14:02L HLA-DQA1*01:01-B1*05:01L HLA-D RB1*08:01L HLA-DRB1*11:01L HLA-DQA1*05:01-B1*02:01L HLA-DRB1*09: 01L HLA-DPA1*01:03-B1*04:02L HLA-DRB3*01:01L
  REGION 1..15: note = CONT. FROM ABOVE: HLA-DPA1*02:01-B1*13:01L HLA-DPA1*01:03-B1*02: 01L HLA-DPA1*01:03-B1*104:01L HLA-DPA1*01:02-B1*04:01L HLA-DRB1* 07:01L HLA-DRB1*10:01L HLA-DRB1*08:02L HLA-DRB1*08:03L
  source 1..15: note = Severe acute respiratory syndrome coronavirus 2
LPFKLTCATTRQVVN

SEQ ID NO: 8908 - protein, 10 aa, Severe acute respiratory syndrome-related coronavirus
  REGION 1..10: note = Table B: HLA-DQA1*03:02-B1*03:03M HLA-DQA1*05:01-B1*03:01L HLA-DRB1*13:03L HLA-DQA1*01:02-B1*06:02M HLA-DRB1*01:02M HLA-DRB1*08:77L HLA-DPA1*01:03-B1*03:01L HLA-DPA1*03:01-B1*04:02L HLA-DRB1*14:01L HLA-DRB1*11:02L
  REGION 1..10: note = CONT. FROM ABOVE: HLA-DRB1*14:02L HLA-DRB1*08:01L HLA-DQA1*05:05 -B1*03:19L HLA-DQA1*05:01-B1*02:01L HLA-DRB4*01:01L HLA-DPA1*01: 03-B1*04:01L HLA-DQA1*05:05-B1*03:116L HLA-DRB1*09:01L HLA-DPA1* 01:03-B1*04:02L HLA-DRB1*12:01L HLA-DPA1*02:01-B1*13:01L
  REGION 1..10: note = CONT. FROM ABOVE: HLA-DPA1*03:01-B1*105:01M HLA-DQA1*03:01-B1*03 :02L HLA-DPA1*01:03-B1*104:01L HLA-DQA1*05:05-B1*03:01L HLA-DPA1 *01:02-B1*04:01L HLA-DRB1*10:01L HLA-DRB1*16:01L HLA-DQA1*01:03- B1*06:01L HLA-DRB1*08:03L HLA-DQA1*02:01-B1*03:03L
  REGION 1..10: note = CONT. FROM ABOVE: HLA-DRB1*15:03M
  source 1..10: note = Severe acute respiratory syndrome coronavirus 2
QVVNVVTTKI

SEQ ID NO: 8909 - protein, 10 aa, Severe acute respiratory syndrome-related coronavirus
  REGION 1..10: note = Table B: HLA-DQA1*03:02-B1*03:03L HLA-DQA1*05:01-B1*03:01L HLA-DRB1*04:03L HLA-DRB1*13:02L HLA-DRB1*13:03L HLA-DRB1*04:02L HLA-DRB1*04:05L HLA-DRB1*01:02L HLA-DRB4*03:01NL HLA-DRB1*08:77L HLA-DRB3*02:01L HLA-DRB1*14:01L HLA-DQA1*05:01-B1*02:01L
  REGION 1..10: note = CONT. FROM ABOVE: HLA-DRB1*12:01L HLA-DRB1*12:02L HLA-DPA1*03:01 -B1*105:01L HLA-DQA1*03:01-B1*03:02L HLA-DRB1*14:54L HLA-DRB1*14 :17L HLA-DPA1*01:02-B1*04:01L HLA-DRB1*16:01L HLA-DQA1*01:03-B1* 06:01L HLA-DQA1*02:01-B1*03:03L HLA-DRB1*15:03L
  source 1..10: note = Severe acute respiratory syndrome coronavirus 2
VVNVVTTKIA

SEQ ID NO: 8910 - protein, 10 aa, Severe acute respiratory syndrome-related coronavirus
  REGION 1..10: note = Table B: HLA-DQA1*03:02-B1*03:03L HLA-DQA1*03:01-B1*03:02L HLA-DQA1*02:01-B1*03:03L
  source 1..10: note = Severe acute respiratory syndrome coronavirus 2
VNVVTTKIAL

SEQ ID NO: 8911 - protein, 11 aa, Severe acute respiratory syndrome-related coronavirus
  REGION 1..11: note = Table B: HLA-DQA1*03:02-B1*03:03L HLA-DQA1*01:02-B1*06:02L HLA-DQA1*05:05-B1*03:19L HLA-DPA1*03:01-B1*105:01L HLA-DQA1*01:03-B1*06:01L
  source 1..11: note = Severe acute respiratory syndrome coronavirus 2
IALKGGKIVNN

SEQ ID NO: 8912 - protein, 10 aa, Severe acute respiratory syndrome-related coronavirus
  REGION 1..10: note = Table B: HLA-DQA1*03:02-B1*03:03L HLA-DQA1*01:02-B1*06:02L HLA-DQA1*03:01-B1*03:02L HLA-DPA1*01:02-B1*04:01L HLA-DQA1*01:03-B1*06:01L HLA-DQA1*02:01-B1*03:03L HLA-DRB1*15:03L
  source 1..10: note = Severe acute respiratory syndrome coronavirus 2
KIVNNWLKQL

SEQ ID NO: 8913 - protein, 10 aa, Severe acute respiratory syndrome-related coronavirus
  REGION 1..10: note = Table B: HLA-DQA1*03:02-B1*03:03L HLA-DQA1*05:01-B1*03:01L HLA-DRB1*04:03L HLA-DRB1*01:03L HLA-DRB1*04:05L HLA-DQA1*01:02-B1*06:02L HLA-DRB1*01:01L HLA-DRB1*01:02L HLA-DPA1*03:01-B1*04:02L HLA-DRB1*14:01L HLA-DRB1*14:02L
  REGION 1..10: note = CONT. FROM ABOVE: HLA-DQA1*01-B1*05L HLA-DQA1*05:05-B1*03:19L HL A-DQA1*05:01-B1*02:01L HLA-DPA1*01:03-B1*04:01L HLA-DQA1*05:05-B 1*03:116L HLA-DRB1*09:01L HLA-DPA1*01:03-B1*04:02L HLA-DRB1*12:0 1L HLA-DPA1*02:01-B1*13:01M HLA-DPA1*03:01-B1*105:01L
  REGION 1..10: note = CONT. FROM ABOVE: HLA-DQA1*03:01-B1*03:02L HLA-DPA1*01:03-B1*104 :01L HLA-DPA1*01:02-B1*04:01L HLA-DRB1*10:01L HLA-DRB1*16:01L HL A-DQA1*01:03-B1*06:01M HLA-DRB1*08:03L HLA-DQA1*02:01-B1*03:03L HLA-DRB1*15:03L
  source 1..10: note = Severe acute respiratory syndrome coronavirus 2
IFYLITPVHV

SEQ ID NO: 8914 - protein, 10 aa, Severe acute respiratory syndrome-related coronavirus
  REGION 1..10: note = Table B: HLA-DQA1*03:02-B1*03:03L HLA-DQA1*05:01-B1*03:01L HLA-DRB1*04:03L HLA-DRB1*01:03L HLA-DRB1*04:05L HLA-DQA1*01:02-B1*06:02L HLA-DRB1*01:01L HLA-DRB1*01:02L HLA-DRB1*08:77L HLA-DRB3*02:01L HLA-DPA1*03:01-B1*04:02L
  REGION 1..10: note = CONT. FROM ABOVE: HLA-DRB1*14:01L HLA-DRB1*11:03L HLA-DRB1*14:02 L HLA-DQA1*01-B1*05L HLA-DQA1*05:05-B1*03:19L HLA-DQA1*05:01-B1* 02:01L HLA-DPA1*01:03-B1*04:01L HLA-DQA1*05:05-B1*03:116L HLA-DR B1*09:01L HLA-DPA1*01:03-B1*04:02L HLA-DRB1*12:01L
  REGION 1..10: note = CONT. FROM ABOVE: HLA-DPA1*02:01-B1*13:01L HLA-DPA1*03:01-B1*105 :01L HLA-DQA1*03:01-B1*03:02L HLA-DQA1*05:05-B1*03:01L HLA-DPA1* 01:02-B1*04:01L HLA-DRB1*07:01L HLA-DRB1*10:01L HLA-DRB1*16:01L HLA-DQA1*01:03-B1*06:01L HLA-DQA1*02:01-B1*03:03L
  REGION 1..10: note = CONT. FROM ABOVE: HLA-DRB1*15:03L
  source 1..10: note = Severe acute respiratory syndrome coronavirus 2
FYLITPVHVM

SEQ ID NO: 8915 - protein, 10 aa, Severe acute respiratory syndrome-related coronavirus
  REGION 1..10: note = Table B: HLA-DQA1*03:02-B1*03:03L HLA-DRB1*04:03L HLA-DQA1*01-B1*05L HLA-DQA1*05:01-B1*02:01L HLA-DQA1*03:01-B1*03:02L HLA-DRB1*16:01L
  source 1..10: note = Severe acute respiratory syndrome coronavirus 2
HTDFSSEIIG

SEQ ID NO: 8916 - protein, 10 aa, Severe acute respiratory syndrome-related coronavirus
  REGION 1..10: note = Table B: HLA-DQA1*03:02-B1*03:03L HLA-DQA1*05:01-B1*03:01L HLA-DRB1*13:02L HLA-DRB1*13:03L HLA-DRB1*04:02L HLA-DQA1*01:02-B1*06:02L HLA-DRB4*03:01NL HLA-DRB1*08:01L HLA-DQA1*05:05-B1*03:19L HLA-DQA1*05:01-B1*02:01L
  REGION 1..10: note = CONT. FROM ABOVE: HLA-DPA1*01:03-B1*04:02L HLA-DRB1*12:01L HLA-D PA1*03:01-B1*105:01L HLA-DQA1*03:01-B1*03:02L HLA-DQA1*05:05-B1* 03:01L HLA-DPA1*01:02-B1*04:01L HLA-DRB1*16:01L HLA-DQA1*01:03-B 1*06:01L HLA-DQA1*02:01-B1*03:03L
  source 1..10: note = Severe acute respiratory syndrome coronavirus 2
DFSSEIIGYK

SEQ ID NO: 8917 - protein, 12 aa, Severe acute respiratory syndrome-related coronavirus
  REGION 1..12: note = Table B: HLA-DQA1*03:02-B1*03:03L HLA-DQA1*05:01-B1*03:01L HLA-DRB1*13:02L HLA-DRB1*01:03L HLA-DQA1*01:02-B1*06:02L HLA-DRB1*01:02L HLA-DRB1*08:77L HLA-DRB3*02:01L HLA-DPA1*03:01-B1*04:02L HLA-DRB1*14:01L HLA-DRB1*11:03L
  REGION 1..12: note = CONT. FROM ABOVE: HLA-DRB1*11:04L HLA-DRB1*08:01L HLA-DQA1*05:01 -B1*02:01L HLA-DRB1*12:02L HLA-DPA1*03:01-B1*105:01L HLA-DQA1*05 :05-B1*03:01L HLA-DRB1*08:03L
  source 1..12: note = Severe acute respiratory syndrome coronavirus 2
SSEIIGYKAIDG

SEQ ID NO: 8918 - protein, 12 aa, Severe acute respiratory syndrome-related coronavirus
  REGION 1..12: note = Table B: HLA-DQA1*03:02-B1*03:03L HLA-DQA1*05:01-B1*03:01L HLA-DRB1*01:03L HLA-DQA1*01:02-B1*06:02L HLA-DRB1*01:02L HLA-DRB3*02:01L HLA-DPA1*03:01-B1*04:02L HLA-DRB1*14:01L HLA-DRB1*08:01L HLA-DQA1*05:01-B1*02:01L
  REGION 1..12: note = CONT. FROM ABOVE: HLA-DPA1*03:01-B1*105:01L
  source 1..12: note = Severe acute respiratory syndrome coronavirus 2
SEIIGYKAIDGG

SEQ ID NO: 8919 - protein, 11 aa, Severe acute respiratory syndrome-related coronavirus
  REGION 1..11: note = Table B: HLA-DQA1*03:02-B1*03:03L HLA-DQA1*05:01-B1*03:01L HLA-DRB1*04:03L HLA-DRB1*13:03L HLA-DRB1*01:03L HLA-DRB1*04:02L HLA-DRB1*04:05L HLA-DRB4*03:01NL HLA-DQA1*01-B1*05L HLA-DQA1*05:01-B1*02:01L HLA-DRB1*04:10L HLA-DRB1*12:01L
  REGION 1..11: note = CONT. FROM ABOVE: HLA-DQA1*03:01-B1*03:02L HLA-DRB1*14:54L HLA-D RB1*14:17L HLA-DRB1*16:01L HLA-DRB1*04:08L HLA-DQA1*02:01-B1*03: 03L
  source 1..11: note = Severe acute respiratory syndrome coronavirus 2
IGYKAIDGGVT

SEQ ID NO: 8920 - protein, 10 aa, Severe acute respiratory syndrome-related coronavirus
  REGION 1..10: note = Table B: HLA-DQA1*03:02-B1*03:03L HLA-DQA1*05:01-B1*03:01L HLA-DRB1*13:02L HLA-DRB1*13:03L HLA-DRB1*01:03L HLA-DRB4*03:01NL HLA-DQA1*03:01-B1*03:02L HLA-DRB1*16:01L HLA-DQA1*02:01-B1*03:03L
  source 1..10: note = Severe acute respiratory syndrome coronavirus 2
KAIDGGVTRD

SEQ ID NO: 8921 - protein, 10 aa, Severe acute respiratory syndrome-related coronavirus
  REGION 1..10: note = Table B: HLA-DQA1*03:02-B1*03:03L HLA-DQA1*05:01-B1*03:01L HLA-DQA1*01:02-B1*06:02L HLA-DRB1*01:02L HLA-DPA1*03:01-B1*04:02L HLA-DRB1*14:01L HLA-DRB1*14:02L HLA-DQA1*01-B1*05L HLA-DQA1*05:05-B1*03:19L
  REGION 1..10: note = CONT. FROM ABOVE: HLA-DQA1*05:01-B1*02:01L HLA-DQA1*05:05-B1*03: 116L HLA-DRB1*09:01L HLA-DPA1*02:01-B1*13:01L HLA-DPA1*03:01-B1* 105:01L HLA-DQA1*03:01-B1*03:02L HLA-DPA1*01:03-B1*104:01L HLA-D PA1*01:02-B1*04:01L HLA-DRB1*10:01L HLA-DRB1*16:01L
  REGION 1..10: note = CONT. FROM ABOVE: HLA-DQA1*01:03-B1*06:01L HLA-DQA1*02:01-B1*03: 03L HLA-DRB1*15:03L
  source 1..10: note = Severe acute respiratory syndrome coronavirus 2
AIDGGVTRDI

SEQ ID NO: 8922 - protein, 10 aa, Severe acute respiratory syndrome-related coronavirus
  REGION 1..10: note = Table B: HLA-DQA1*03:02-B1*03:03L HLA-DQA1*05:01-B1*03:01L HLA-DQA1*01:02-B1*06:02L HLA-DQA1*05:05-B1*03:19L HLA-DQA1*05:01-B1*02:01L HLA-DQA1*03:01-B1*03:02L HLA-DQA1*05:05-B1*03:01L HLA-DQA1*01:03-B1*06:01L
  REGION 1..10: note = CONT. FROM ABOVE: HLA-DQA1*02:01-B1*03:03L
  source 1..10: note = Severe acute respiratory syndrome coronavirus 2
IDGGVTRDIA

SEQ ID NO: 8923 - protein, 11 aa, Severe acute respiratory syndrome-related coronavirus
  REGION 1..11: note = Table B: HLA-DQA1*03:02-B1*03:03L HLA-DQA1*03:01-B1*03:02L
  source 1..11: note = Severe acute respiratory syndrome coronavirus 2
DGGVTRDIAST

SEQ ID NO: 8924 - protein, 11 aa, Severe acute respiratory syndrome-related coronavirus
  REGION 1..11: note = Table B: HLA-DQA1*03:02-B1*03:03L HLA-DRB1*13:03L HLA-DRB1*04:05L HLA-DRB4*03:01NL HLA-DQA1*05:01-B1*02:01L HLA-DRB1*16:01L HLA-DQA1*01:03-B1*06:01L
  source 1..11: note = Severe acute respiratory syndrome coronavirus 2
GVTRDIASTDT

SEQ ID NO: 8925 - protein, 13 aa, Severe acute respiratory syndrome-related coronavirus
  REGION 1..13: note = Table B: HLA-DQA1*03:02-B1*03:03L HLA-DRB1*01:03L HLA-DRB1*04:05L HLA-DRB1*01:02L HLA-DRB1*08:01L HLA-DQA1*05:05-B1*03:19L HLA-DRB1*16:01L HLA-DRB1*04:08L
  source 1..13: note = Severe acute respiratory syndrome coronavirus 2
DIASTDTCFANKH

SEQ ID NO: 8926 - protein, 16 aa, Severe acute respiratory syndrome-related coronavirus
  REGION 1..16: note = Table B: HLA-DQA1*03:02-B1*03:03L HLA-DQA1*05:05-B1*03:19L HLA-DPA1*02:01-B1*13:01L HLA-DRB1*04:08L
  source 1..16: note = Severe acute respiratory syndrome coronavirus 2
IASTDTCFANKHADFD

SEQ ID NO: 8927 - protein, 10 aa, Severe acute respiratory syndrome-related coronavirus
  REGION 1..10: note = Table B: HLA-DQA1*03:02-B1*03:03L HLA-DQA1*05:01-B1*03:01L HLA-DRB1*13:03L HLA-DRB1*01:03L HLA-DQA1*01:02-B1*06:02L HLA-DRB1*08:77L HLA-DPA1*01:03-B1*03:01L HLA-DPA1*03:01-B1*04:02L HLA-DRB1*03:01L HLA-DRB1*14:02L
  REGION 1..10: note = CONT. FROM ABOVE: HLA-DQA1*01-B1*05L HLA-DQA1*05:05-B1*03:19L HL A-DQA1*05:01-B1*02:01L HLA-DRB4*01:01L HLA-DPA1*01:03-B1*04:01L HLA-DPA1*01:03-B1*04:02L HLA-DRB1*12:01L HLA-DPA1*02:01-B1*13:01 L HLA-DPA1*03:01-B1*105:01L HLA-DPA1*01:03-B1*104:01L
  REGION 1..10: note = CONT. FROM ABOVE: HLA-DQA1*05:05-B1*03:01L HLA-DPA1*01:02-B1*04: 01L HLA-DRB1*10:01L HLA-DRB1*16:01L HLA-DQA1*01:03-B1*06:01L HLA -DRB1*08:02L HLA-DQA1*02:01-B1*03:03L HLA-DRB1*15:03L
  source 1..10: note = Severe acute respiratory syndrome coronavirus 2
TWFSQRGGSY

SEQ ID NO: 8928 - protein, 11 aa, Severe acute respiratory syndrome-related coronavirus
  REGION 1..11: note = Table B: HLA-DQA1*03:02-B1*03:03L HLA-DQA1*05:01-B1*03:01L HLA-DRB1*04:03L HLA-DRB1*13:02L HLA-DRB1*13:03L HLA-DRB1*01:03L HLA-DRB1*04:02L HLA-DRB1*04:05L HLA-DRB1*01:02L HLA-DRB4*03:01NL HLA-DRB1*08:04L HLA-DRB1*08:77L HLA-DRB3*02:01L
  REGION 1..11: note = CONT. FROM ABOVE: HLA-DPA1*01:03-B1*03:01L HLA-DPA1*03:01-B1*04: 02L HLA-DRB1*14:01L HLA-DQA1*01-B1*05L HLA-DQA1*05:01-B1*02:01L HLA-DPA1*01:03-B1*04:01L HLA-DRB1*12:01L HLA-DRB1*12:02L HLA-DRB 3*01:01L HLA-DPA1*03:01-B1*105:01L HLA-DQA1*03:01-B1*03:02L
  REGION 1..11: note = CONT. FROM ABOVE: HLA-DRB1*14:54L HLA-DRB1*14:17L HLA-DPA1*01:02 -B1*04:01L HLA-DRB1*07:01L HLA-DRB1*16:01L HLA-DRB1*04:08L HLA-D QA1*02:01-B1*03:03L
  source 1..11: note = Severe acute respiratory syndrome coronavirus 2
GSYTNDKACPL

SEQ ID NO: 8929 - protein, 13 aa, Severe acute respiratory syndrome-related coronavirus
  REGION 1..13: note = Table B: HLA-DQA1*03:02-B1*03:03L HLA-DRB1*01:02L HLA-DPA1*01:03-B1*03:01L HLA-DRB1*12:01L HLA-DPA1*02:01-B1*13:01L HLA-DQA1*03:01-B1*03:02L HLA-DPA1*01:03-B1*104:01L
  source 1..13: note = Severe acute respiratory syndrome coronavirus 2
NDKACPLIAAVIT

SEQ ID NO: 8930 - protein, 10 aa, Severe acute respiratory syndrome-related coronavirus
  REGION 1..10: note = Table B: HLA-DQA1*03:02-B1*03:03L HLA-DQA1*05:01-B1*03:01L HLA-DRB1*04:03L HLA-DRB1*13:02L HLA-DRB1*13:03L HLA-DRB1*01:03L HLA-DRB1*04:02L HLA-DRB1*04:05L HLA-DQA1*01:02-B1*06:02L HLA-DRB1*01:02L HLA-DRB4*03:01NL HLA-DRB1*08:77L HLA-DRB3*02:01L
  REGION 1..10: note = CONT. FROM ABOVE: HLA-DPA1*01:03-B1*03:01L HLA-DPA1*03:01-B1*04: 02L HLA-DRB1*14:01L HLA-DQA1*01:01-B1*05:01L HLA-DRB1*08:01L HLA -DQA1*01-B1*05L HLA-DQA1*05:05-B1*03:19L HLA-DQA1*05:01-B1*02:01 L HLA-DQA1*05:05-B1*03:116L HLA-DRB1*04:10L
  REGION 1..10: note = CONT. FROM ABOVE: HLA-DPA1*01:03-B1*04:02L HLA-DRB1*12:01L HLA-D RB1*12:02L HLA-DPA1*03:01-B1*105:01L HLA-DQA1*03:01-B1*03:02L HL A-DRB1*14:54L HLA-DQA1*05:05-B1*03:01L HLA-DRB1*14:17L HLA-DPA1* 01:02-B1*04:01L HLA-DRB1*07:01L HLA-DRB1*16:01L
  REGION 1..10: note = CONT. FROM ABOVE: HLA-DQA1*01:03-B1*06:01M HLA-DRB1*04:08L HLA-D QA1*02:01-B1*03:03M HLA-DRB1*15:03L
  source 1..10: note = Severe acute respiratory syndrome coronavirus 2
IAAVITREVG

SEQ ID NO: 8931 - protein, 14 aa, Severe acute respiratory syndrome-related coronavirus
  REGION 1..14: note = Table B: HLA-DQA1*03:02-B1*03:03L HLA-DRB1*08:77L HLA-DPA1*03:01-B1*04:02L HLA-DRB1*11:04L HLA-DRB1*14:02L HLA-DRB1*08:01L HLA-DRB1*11:01L HLA-DRB1*04:10L HLA-DRB1*09:01L HLA-DRB3*01:01L HLA-DRB1*08:03L
  source 1..14: note = Severe acute respiratory syndrome coronavirus 2
AAVITREVGFVVPG

SEQ ID NO: 8932 - protein, 10 aa, Severe acute respiratory syndrome-related coronavirus
  REGION 1..10: note = Table B: HLA-DQA1*03:02-B1*03:03M HLA-DRB1*11:02L HLA-DQA1*05:05-B1*03:19M HLA-DQA1*05:05-B1*03:116L HLA-DRB1*09:01L HLA-DPA1*01:03-B1*04:02L HLA-DQA1*03:01-B1*03:02L HLA-DPA1*01:03-B1*104:01L
  source 1..10: note = Severe acute respiratory syndrome coronavirus 2
REVGFVVPGL

(The sequence listing continues in the following parts.)
